United States Patent Application Publication US 2019/0348154 A1 - sequence listing, part 91

SEQ ID NO: 341649 - DNA, 2064 bp, Pseudomonas aeruginosa
atggctgatctccaggatgagtacgaagagctgctcgaggaggtgcgtgtaggcagcgttgccggtcacgaattgcagatcaccgagttcttccggatctattcgactctggctgcagaaaatggggatacaccggacatggactattgtccggtgctgaaggaaggttctggaggataccgtgtcgatgggtacgcactgggtatgctcagtgatgacagctccgaggccggcgatctctatctcgcagtctgcgactatcggcaggaggcggatatgcctgccgtcaacagccgggatgtggacagggccgtcgatggtgtcgagcggttcttcaaggcggccatgagccagaagttcctggccagtctggaggaggccagccctgcatatcagcttgctgcactgattcagcagtacggcagcagaatcaggcgcctgcgcgtcattctcttcaccaactgtcatctccgtgtccgcaaaagtctcttcgagacccgggatgtcggttcggtgacattgcacgtcaacgtcttggatctcgagcgctatgcaagaatctcgtccgtcggtggcgagccggtcgagattgacttcgatgaggacttcggtggggcgatcgaatgtctgcctgtatcgaccggagctgagagctatcagagttatctatttgccatgtctggcagcgcattggcgaaggtatttgcagctttcggcaatcgcctgctggagcagaatgtcaggagttatctgcaggcgagaaccagtgtcaacaagggcattctgcgaaccattgccgaagaacccggaatgttcttcgcctacaacaacggaatcactgccacggcttcatcggtcgatatccgtagactggaagaaggtgggccggccatctcccatatcagggatttccagatcgtcaatggtggccagactacagcctccctgctatacgccagagatgggctggggcgggatctcgatcaggtgtacgttcaggtcaaactgtcggttgtcgatgaggggcgtctcgaggaggtggttccctgcatctccgaatatgcgaacacccagaacaaggtttcccttgccgacctggcctccaacagcccggttcagatcaggatcgagcgtctctccaaggacgtatctgtgccacagagggcaggatccctgcacagcagcaaatggttctacgagcgtgcccgggggcagtacaagaatctctttgcctacaagtcgaaggccgagcgcagcaggctggaactgacctatccgaaatcccagctactgaccaagaccgacttggccaaatacgagttggcttttgaaggcaagccccatcatgtcagtgaaggggctcagaaatgcttcagcaggtttacatcagtgcttgctgggctcgatgatgcttcgaagatcacagagacgtggtttcgccgggccgtggccaaggctctgctttttctccggctcgatgagattgtgcagaaatcggaatggtatcgcagtgaccgtggctacaaggcccagatagttacctacacgattgcggcatgtgccgaggggtttcgggctgcagagcttcagatcgatctggacaggatctggcgggagcaagaggttcctcggactctcctggactggatgttcgtggaggcctggagagtgtccgaaattctcaagtcgcctccggaaagcgtgcgaaacgtatccgagttcgccaagcgggagttctgctgggcgcagtatgtcaaggggagggtggggttacccggctccgccgtgaagcagtatggggtttctctgcaggaatacgcagacgaaacaaggcaggggcagcgagaagcgatcaggaatcaggagatcgatttcgatattgcccttttcggtctggctgacagagcagtcgagatcatggagcaggcccgacagagcggggctgcttcgcccaagaacatggatgcgctcaagaagcttgcggctgggcgtctcaccagcctctcgaagggggagaagggcgcgctgaaatatctgctggagcgactggaaatcgaatactaa

SEQ ID NO: 341650 - DNA, 1695 bp, Pseudomonas aeruginosa
atgacagaaatccagatgaacatgattttcagggagcatacagctattgatgctgtggcagtgcttcccaggccgattcaggtcgtcgatctcttcgcagggccgggggggttgggtgaggggttttcggcttctggggatggcaagcagttcgagatcgtcgtgtctgccgaaaaggatcttgcggcatggcaaaccctcagactgagggcattctaccgtcttctgaaaacaaagaatccgaagcggctgatcgactactacagtttttgcaacggtactacggaccggccctactcggatgcgagcgaagccgagtggaaagaggcagaggcagaggcacgatgcataacgcttggcacgaaggagggagatcgagagcttgatgagatcctcgatgtacggcttgacagcagtcgaccctgggtactgataggtggtccgccctgccaagcctattcggttgtcggccgtgcgcgtaatcaggcaaaggcaaactatagtgccgaagaggacgatcgccatttcctctacaaggaatatctgagaatcatcaaggagagaaagcctgcagtcttcgtcatggagaatgtgaagggtattctttcgtccaaagtgggaggggagagaatcttctcccagatactgaaagatctctcagatcccaacaaggctctcggagatgccgagcccggcatcaagtaccgcatctgttcgctcgtgagcgggcaaacctatggtccaggggatgatgtcgagcaggtagatcctcatgctttcgtcatcagggcagaggagcacggcattcctcaagctaggcatcgagtgattctcctcggcatagctctggatgaggagggcagcattccatcccatgcgctgctggcaaaggcggaggagaaggtagtggtcaaacaggttctgggcgacctcccgatgctgcgtagccgactgacccggcagcgcgatggaaatgaagcctggtaccgagtggttgcagatcagctggacgagctgagatcagaactcgatgagagagctgatccgaaactggcttcagagatggatattgtcagaagcggtctactgtccgcttcgattgatgttggagatatccgggttgcccgagtcggaaaagatggaaggacgggcctttcttctttggatgagtggtatctggatgacgacttggactattggctgaaccatgatgcgcgtggacatatgccttcggatctacgtcgctatatatttgcaagtctgtttgcccgagctcatggggtatctcctaaagggcatcagcagttttctctgaaggggttggctccggcacacaagaactgggaaactggaaagttcagcgacaggtttcgagttcaactggcgaatcagcctgccacaaccatcactagtcacatttcaaaagatgggcactattttatccattatgatccaaaacagtgccgtagcctgactgtccgtgaagccgctaggatacaaacttttcccgataactactttttccagggaaatagaactcagcaatttcagcaggtaggtaatgcggtgcctccgcttctggcaaataaaattgcggggattgttttcaatgttgtgtgtgaaaaggcatcaaaagagaagtctagcaatttttcttgcgtgtgggggcgtggtaggcgattaaaaaatgtatga

SEQ ID NO: 341651 - DNA, 1560 bp, Pseudomonas aeruginosa
gtgacaagcattcaacaacgtgccgccttgcaacgccagatctgggccatcgccaacgatgtgcggggcgcagtcgatggctgggacttcaagcaatacgtgctcggaactctgttctaccgcttcatcagcgaaaatttcgctgattacatgagcggcggtgacgagtcagtcaattacgccgccatggatgatgatgacgaaaatatcgcgctcgccaaagacgacgccatcaagaccaagggctacttcatctaccccagtcagctattcgtcaacatggcggccaatgccgccgacaacaccagtctgaacaccgatctgaacgcgatcttcaaagccatcgaggcctccgccagtggctacccctccgagcgcgatattaaggggctgttcgctgatttcgacaccaccagcaaccgcctgggcaataccgtcaaggataagaatgcacgcctggcagacgtgctaaaaggcgtagcaaaactggacttcggcagcttcgacgaaagccatatcgacctgtttggtgatgcctacgaatttctcatctccaactacgccgccaacgcaggcaaatccggcggcgagttcttcaccccgcagcaggtttccaagctgattgcccagttggcgatgcacaagcaaacccgcatcaacaagatctacgacccagcctgcggctccggctcgctgctgctgcaagctaaaaaacagtttgaagaccacgtcatcgaagaggggttcttcggccaggaactcaaccacaccacgtacaacctggcgcggatgaacatgttcctgcacaacgtcaactacgacaaattcaacatccagctcggtgacaccctgatcgagccgcactttggtgatgacaaacccttcgatgccatcgtctccaacccgccgtactcggtgaagtggaagggggcggatgacccaaccctgatcaacgatgatcgcttcgctcctgccggtgtgctggcgcccaagtccaaggccgacttcgccttcgtgctgcatgcgctcagttacctatccagtaagggtcgcgctgccatcgtctgcttccctggcatcttctaccggggtggtgccgagcagaagatccgccaatacctggtggacaacaactatgtggaaagcgtgatcgcgctagcacctaacctgttcttcggcaccaccatcgccgtgaccattctggtgctggcgaaaaacaagccagacaccaccacccagttcatcgacgccagcggcctgtgcaagaagggcgtcaacaacaacctgctggaagacgcgcatatcgagcgcatcatgcaggtgttcgatagcaaggcgaatatcgagcacttcgcccaatccatcccattggcgcgcatcgctgccaacgattacaacctgtccgtcagcagctatgtggaagccaaggacaatcgtgaggcggtgaatatcgcccagctcaatgccgacctgaaaaccaccgttgccaggatcgaccagctacgcaagggcatcgatgccatcgtggcggagatcgagggtgaggaggtggaggcgtga

SEQ ID NO: 341652 - DNA, 1224 bp, Pseudomonas aeruginosa
atgagctttttggaaaggctgctggatgggatcgaggtggaatggaaggcactcagggaagttaccaatgtcttacgggggaaacgattaaccaagagccagctctctgagggagcagtattcccggtatatcacggtgggctagaacctttaggctactacgcggaatcaaatcggccggccaatacggttatgattattaatgttggtgcctctgcaggtgcggtaggttacagttctgtggacttctggtcttcggatggttgcttttgccttgagcaaaacgaagcattgaacaatagatttttgtacttcgctttaattggtcatcaaaattttttgcgatcgagggtgcgagttgcagggatcccgactcttgatgccattgtgattgacaagatcgaaatccccatcccctgcccagaagaccccaagaaatcgcttgaaatccaagccgaaatcgtccgcatactggatacctttaccgagctgaccgccgagctgaccgccgagctgaccgccgagctgacctcccgtaagaaacaatataactactaccgcgaccagttgttaagttttgatgaggggaatgttgagtggaaggcgttgggagcggttggcgagtttattcgtggcaagcgttttaccaaggctgattatgtagaagacggcattagcgttattcattacggtgaaatatatacgcgttacggcgtttctacgacgcaagcctattctcaggttagaaaggatatggcggggttgctacgctatgcagaaccgggtgatgtcgtcatagctggtgttggtgaaacggttgaagatgtggggaaggctgtcgcttggcttggtagccataaagtggctattcatgacgatagttatgccttccggcactcaatgaatcccaagtacattgcttatgtgatgcagacagcttcgtttaattctcagaagacgaagcatgtttctagtggcaaggttaagcgcctgctgattgaaagtatgaaaaaagaagtgtgcattcctgttcctttcccgaacgaccctgataagtcccttgcggagcaggctcggatcgtttcgattctcgataaatttgatgcgctgatcaactccgtcagcgaaggcctgccccgcgagatcgaactccgtcagaagcaatacgagcattatcgtgacgtactgttgagtttccctaggccagaagaggtagcggcgtaa

SEQ ID NO: 341653 - DNA, 1179 bp, Pseudomonas aeruginosa
atgggtaagacgctaagggaaatagccgaaggtctgcagaaaagcccgaagaaggtgcagttggtctacgccttcaatggtacaggaaaaacgcgcttgtcgcgggagttcaaacggctaattgcgcccaaagcagatgctgacgaagtcagtgataaggccgaccagcctgggctgtcgcgcaacaagattctctattacagcgcctttactgaagatttgttctattgggataacgacctgaccggtgacgccgagcctaaactgaaaatccaaccaaatacctttactgattggatattgttggatcaaggtcaggatcagaatgtcattactaccttccagcgttataccaacgacaagctcacgcctcggttcaacgcagagcaaaaagacgaacagacaggggaggtgattgctaaagccttctcagaggtcactttttccttggagcgtggtaatgctgatgagcagtcgggtaatttgaaaatctccaagggcgaggaaagtaattttatctggagtattttctataccctacttgagcaggtgattggcgtgctcaatgtcgcagagccggctgatcgcgaaactgatcagtttgaccagctggagtacgtgttcattgacgacccggttagctcgctggatgaaaatcatcttattcaattggcggtgaatctggggcagttgatcaattcgagtgagtcgcaagtgaagttcatcgtatccacacacagcgcaattttttataacgtgctgtataacgaggtgggtgccaagaacggttatattctcagccggctggatgatggcacatttatgtgtgaggaaaagaagggcgactctaacaagagtttctcttaccatttgcatattaaatcgctcattgagcaggcagtcgcttccaacaacgtacagcgctatcattttgcgctgttacgtaatctttatgagaaaaccgctaattttcttggataccaacgatggtctgagctgttgccggaggataagaaagcgtatgccgctcgggtgatgaatttctatcctcataacactttgtccaacgaagaaatcgctgagccgacagcgcccgaaaaagagatggttcgcttactgcttgaaaagctgaatacttatggctactggcaacaggagcaggagcaggagaatgcttga

SEQ ID NO: 341654 - DNA, 144 bp, Pseudomonas aeruginosa
atgcttgataaacctattttttggctggcatcggtttccttcatgagtattcagcagcgtggctgcagttattaccggcagcctccggcagccatcaagttgcacgaatgcatttgggtgtatgtgcatacattgcgggcatga

SEQ ID NO: 341655 - DNA, 417 bp, Pseudomonas aeruginosa
atgcagaagcgcatgaccgagctgtttggcgtcggcgtgccggcgatttccaagcatctgaagaatattttcgacagcggcgatctggaggaagaggtggttgtttccattttggaaacaaccactgaacgcggcacagtcgctgagcgaggcgaatatcaagaagatggagcgcgccgttacagcgtttttcgactacatcgagggcatcatcgagcgccgcaatgtgaaagtgtgaacaagtttctggccttcaatgagtaccgcattctggaaggctacggcacggtatcgcggcagcaggcggagcagaaggcgtttgccgagtatgaaaaattcaacaagcagcagcgcatcgaatccgacttcgaccgtgaggtgaagaagctgctgcaaaaaagggacgtggaagaatga

SEQ ID NO: 341656 - DNA, 3135 bp, Pseudomonas aeruginosa
atgagcgactacgcagccatcgctgaattgaacaacttcatcgttctggagcagtacatcaaggccgtgcaggttgccgagggctaccagagcgaaggcgatctggagcgcgagttcatcgatgacttgcagaagcagggttatgaatacgcgcccggcctgactacgcacgatgccttgctggccaatgtgcgtacgcagttgcaaaccctcaacgatgtgcagttttccaagggtgagtgggatcgtttcgttgaaaactggttgaacaagcctagcgacggcatcgtcgagaaaacccgcaagattcacgacgattacattcacgacttcgtttttgacaacgggcgcatccagaacatttacctgctggacaagaagatcatccaacgcaacaagctgcaggtgatcaagcagttcgagcagaagggcagccatgccaaccgctacgacgtgacgattctggtcaatggcttgcccctggtacaggtggagttgaagaagcgcggcgtggcgattcgcgaggcgttcaaccaggtgcatcgctacagcaaggagagcttcaacagcgagcattccctgttcaagttcctgcaactgttcgtcatctccaacggcaccgacacgcgttactttgccaacaccacgcagcgcaacaagcacagcttcgacttcaccatgaattgggcgaaggctgataacagcctgatcaaggatctgaaggacttcaccgccaccttcttccagaaagacacactgctgaaggtgcttctgcgctactcggtcttcgataccagcaacacgctgctggtcatgcgtccgtaccagattgccgctacggagcgcattctgcggaagattcactgcgcgtatcaggccaagaagtggagtacacgcgagggcggtggtttcatctggcacaccacgggctccggcaagacactgaccagcttcaaggctgcccgcttagccaccgagttgccgttcatcgacaaggtgttcttcgtggtagatcgcaaggatctggactaccagaccatgaaggagtaccagcgcttctccccggaaagcgtgaacggctcggacagtaccgcgggactcaagcgcaatctggacaaggacgacaacagaatcgtcgtcaccactatccagaagctcaataacctgatgaagagcgaacccgacctgcccatttacggcaagcaggtggtgttcatcttcgatgagtgccaccgcagccagttcggtgaggcgcagaagaacctgaataagcgcttcaagcagttctatcagttcggttttactggcacgccaatcatgccgcagaacgctctgggggcagaaactactgccagcgtgtttggcctcgaattgcattcgtacgtaatcaccgatgcgattcgcgacgaaaaagtgctcaagttcaaggtcgattacaacgatgtgcggccacagttcaaggccatcgaaaccgagcaggacgaagccaagctcagcgcagcggaaaaccgacaggccttgctgcaccctgagcgtattcgcgagatcacgcagtacatcctcaacacctttcggcagaaaacccatcgtctgcaagcgggtggcaagggcttcaacgccatgttcgcggtgagcagcgtggaagcggccaggctctactacgagtcgttcaaggcgctacagaagggcagcgacaagccgttgcgggtggccaccatcttctccttcgcggccaacgaggagcaggacgcagtaggagagatcgaagacgaaagcttcgatgtttccgccatgagcaacagcagcgccaaggagtgcttgaacgcggccgttgccgaatacaacgccctgttcaaaaccaacttcagcgtggatagcaagggctttcagaactactaccgcgatctggccaagcgcgtaaagggtgcggacgacagtggcaagagacttccggccgacgagcaggttgatctgctgatcgtggtgggcatgttcctcactggcttcgatgcacccacgctaaataccttgtttgttgacaagaacctgcgctaccacggcctgattcaggcttattcgcgcaccaaccgcatttttgatgcgaccaagaccttcggtaatatcgtgaccttccgcgatctggaacaagccaccatcgacgccatcaccttgttcggcaacagcaacacccgcaacgtggttctggagaagagctacaaggagtacatggagggctttaccgatgtgctgacgggggaggcgcgccgcggtttcgtcgatgtagtagctgaactggagctgcgttttcccgacccgacggcgattgaaaaagagtccgataaaaaggcttttgccaagctgtttggcgagtatctgcgcgtggagaacgtgctgcagaactacgatgagttcgccagcctgaaggccttgcagagcctggatatgaacgactcagcggcggtcgaggcgttcaaggcacagcattatctgaatgatgaaggccttgccgctctgcaaacgatcacgatgccggcggagcgcaagatacaggactaccgttccacttataacgatgttcgggattggttgcgccgtgaaagaacggctgctgaaaaagaaaaatccaccatcgactgggatgacgtggtctttgaagtggatttgctcaagtcccaggaaatcaatctggattacatcctggaactgctcttcgagcacaacaagaaaaccaagagcaaggttgagctggtcgaggaaatgcgccggatcattcgcgccagcctaggtaaccgcgcgagggaaagcctggtggtcgatttcatcaatcaaaccgacctcgaccagatcgaagatgcagccagtgtgatcgaggcattctatgcctacgcccaggctgtgttgcggcaagaagtcgaggagctgatcgacacggagagcctcaatgcagaggctgccaggcgctacatcacgacttcgttgcggcgggaatatgccagcgacgccggaaccgagctgaactccattctgcccaagatgagcccgttgaatccccaatttctgtctaaaaagcaaagcgtctttcaaaaaatcgctgtttttgttgagaagtttaagggcgtaggtggggcgatctag

SEQ ID NO: 341657 - DNA, 348 bp, Pseudomonas aeruginosa
gtgcccaccggcagcccggacgcggtacgcctggaacaccgcgtggccggcgccgacgccaacccctacctgctactggcagcggtgctggcaggcgttcatcacgggctgaccaacaaggtcgagccgggcgcgccgatcgaaggcaactcctacgagcagatggagccgagcctgccgaacaacctgcgcgacgccctgcgcgagctggacgaaagcgagatcatggcgaagtacatcgacccgaagtacatcgacatcttcgtcgcctgcaaggaaagcgagctggaggaattcgagcactcgatctccgacctcgagtacaactggtacctgcataccgtctga

SEQ ID NO: 341658 - DNA, 1062 bp, Pseudomonas aeruginosa
atgccccgcctttccgtcctgctgttcctcgccctcgcaccctggctggcccaggccgaggagaccctgcgcgtctacaactggaacgactacatcgacccgcaggtgctcgagtccttccagaaggacaccggcatccgcgtcgagtaccacaccttcgccaccgccgaggaactggacaaggcgctgcgcagtggcgaggcgatcgacgtcgccgtcccctcccacgacaccctgccggccctgctgaaggacaacctgctgcggccgctggacttcacccagctgcccaaccgcagccatctcgaccgtcaattgctgagcaaactggccgcggtcgatcctgacaatcgccacgccgtcccctatctatggggtgccgtaggcctggccatcaataccccgcaggccgaagccgcctatggcgggccgctgcccaacagctggagcctgctgttcgacgccagccagagccagcgcctgaaaagctgcggcatcagcctgctggacgcgccggacgaaaccctggcgatcctcctcaactaccagggccgcaacctcggtcgtactgcgccgagccaggtacgccgcgcagccgaggcgctgcacggactgcgaccgaacctgcgctacgtcgacagcgagcgctacatcgccgacctcgaaggcggtcgcctctgcctggccatggcctgggtcggcgacgccctgcgcgcggccaaggcgggccagccggtaagtttcgaggtaccgcaggaaggctcggtgctgttcatcgacaacctggtgatcccggccggcgcccagcatccacgcgaggcgcaccgtttcatcgactacctgatgcaaccgaagatcgccgcacagatcaccgccgccaccctctaccccagcggcaacgccgacgccgccggcttcctcgatcccgccctgcgccagcaaccgggcctgtatccggaccgcgacaccagccgccgcctgttcgccctggaaacgccgccggaaaaactccggccggtggtcgacgagatctggaaggccttccgcggcgccagccactga

SEQ ID NO: 341659 - DNA, 204 bp, Pseudomonas aeruginosa
atgccggcctacccgtggctggtggagaacaagctcgacggcaaggacatcgagaagaagctcgaagtgatgcgcaccctcggcgtgccctataccgacgaagacatcaagggcgccaaggactcgctgaaaggcaagaccgaaatggatgccgtggtcgcctacctgcaggtgctcggcacctcgatcaagaacaaacggtga

SEQ ID NO: 341660 - DNA, 813 bp, Pseudomonas aeruginosa
gtgctgcccggttccgcagtgccgctgaggctgctgccgttgctcaggttgacggtcggcgtggccggcgccacgccatcgacggtggtgctgccctggccgctggtgttgcccgccgggtcggtggccgtggcgttgaccacggttccatccgccagcggcgtggacggggtgaagctccagttgccgctgccgtcggcggtgacctgcccgatcgggttgccgctgccatcggtcagggtcacgctgctgcccggctcggcggtaccgctgagcgtggtgccgttgctggggttgaccactggcgtggccggggctaccgagtccacggtgacactgctgcccgcactggtgttgccggaggcgtcggtggccgtggcgttgaccacggtgccgttgggcaacggcgtgcccggtgtgaagctccagttgccgctgccgtcggcggtgacctggccgatcgggttgccgctgccatcggtcagggtcacggtggcgcccggctcagcggtgccgctgagcgtgctgccgttgctcgggttgaccactggcgtggccggtgccacggcgtccacggtgacgctggccggcgaactggcgttgccggacgggtcggtagccgtggcgttgaccaccgtaccgttgggcaacggcgtgctcggggtgaaggtccagttgccgctgccgtcggcggtgacctgccctatcgggttaccgttgccgtcggtcagggtcacgctagcgcctggctcggcggtgccgctgagcgtggtgccgttgctcgggttgagcaccggcgccgccggggcctga

SEQ ID NO: 341661 - DNA, 3363 bp, Pseudomonas aeruginosa
atgatctcgtcgttctacgccatgttcatgctgcgcggagtgaacgcgaagcagccggatgccagccagttgatcggcgaattcagctccggggtgctcaaccgctatgaggaatatgcgaacagttggctctggggctgggcactcgacgtccagcagaccatcgccctttccgatgggaacggcaacgagttgaccaggctgaaagccgacaaggacgccaacatcctcgaagacgtcgcctcatgtccggtcaacggtcaactgaaactgctgcatactttcgaatcgaccagtttcgtgcccatcggcaacacgccttacgaaatcactcggataggcagcaggacaccgcagttcaagggcgtactggatgcagatgggatggcgagcataagcggctgcgctcccaatacgctgtaccaggtcaagttctacccagaggtaagcatccaggagatcgacgcgctctaccgctcctacgacgacgtaatcgccaagctgaacgaatggcttctggagcaatggaacggcccgctttccgccgaatggaaaaggctcgcgccggttggcgaccgtaggcggatggagcagataaccgacgcctatctggacggcatgggcaaagcgctggtcaatctctgggatgatgtggtcgagctgttcggcatcctcgcgaacctcgacgagcacgcggcgaaactccttgagttcatcaacgaagcggatttcgaaaagctcaaggctcaggccaaggaactcctcggtaccgccttgctgatcgccagcgacgaaccgcttctgttcatctatgccagcgccatcgtgtgctggacccagttgctgccgcccacgactgccgcggaaatggtcgcggaactctccaccggcctgctcctcgatattctgctcggcatcatcctgaccggcggagccggtctcgccgttcgcctggccgtcaagggctcgaaagcgatcaaggcctccgaaggtgcgatgctgctgcgcaaagccatgcaggtgctgatcgataccagctgtcggcattccctccagttgcacgcggaaaagctgaaacctctggccgtccgcggtgaagtgatggccaacagctccaacaagatcaccgcacagatccagagcaccgcccaaggcatcgcccgcaccgagcccgacaccctgccgctgagccgaggaaagcgcgcgaacacctcgctctccagcagtcaggcgacgcccgatgcctccgcacccggcaggacgcccgccggcaaacccgccgaccaggccgcccagacctgcgtcaaggactgtcccgtttcgatggtcaccggcgaggagctgctgaccctgaccgactgcgagctggacggtccgctgcgtttcgcctggacgcgcctgtaccgcaccagcgcggcggaaatcgacaatggtctgggcttcggctggagccatgcactctcccatcgcctcgatcgcgacggcgacgagctggtatggaccgatcacgagaaccgccggacccgcttcccgatccctgacgcccagcgcccggcgatcaccaaccgactgtcgcgcgccgccatctacctcggcggcgacccatccgaactgatccttgcccaggccggcgaaaagccgcgcttctaccacttccgcaaagacccggacggcgcttacctgatcgccatcagcgacgcctacggcaaccgcctggaactgagtcgcgaccgcctcggccggccgcgccgcctcagccacaaggccgggcgcgcgctactgctgtgctaccagggcaggcacatcgagcgcgtcgagtaccaggtgtaccagcccgccgataacctggaggcctgctggcacaccacccaggtactcgcccgctaccgctgcaacgaacgtggccagttgatcgaagccggaaacgcactctacgaggccgaacgctatcgctacgacgcgcgcaatgtcatcctcgagcgccagttggccggcggcgcctcgttcttctgggaatgggaaggcgaaggcaagcaggcccgcgcggtccatcactgggccagcttcccgcagatggactcgcgctacgtctggaacgaagacggcagcgttaccgcgatcaacgccgacggcagcgaggaagtctatgtccacgacgacaacgcgcgcctggtacgccaggtcgatcccgacggaggcgaaaccctcaggcactacgacgagaagggccaactggtcgccgaacgcgatccgttgggaacgatcaccgagtaccgctacgaccaggccggacgcttggaggcactgctcccggccgaaggcgagccaacctgctatagctacttcgacggcttcgtgcgcagcgtgcgccgcggcgaggcgcagtggaagtacgagcgcaacgctcagggcgacatcacccgccagaccgatcccgaaggcaacgtcacccactacgcctacgaccaccgcggctgcctggtggaaatcacccatgccgacgacagcctgcaccagttgacctggaatccgctcggccagttgatagaagaacagcttccggacggtagcgtgcgccgctatcgctacgacacactgggtagacagatcacccgccaggacgaaagcggcgccatcacccggttccagtgggatgcagcaggccgcctgagccagatcaccctgcccggtggcgccagccgcatgtaccgctacaacgcttacggcaaggtcaccagcgagtgcgacgaacagggccggatgacccgctacgaatatcttgacgacctgcacctggtcagccggcggatcaacccggacggcagtcagctgcgctaccgctacgaaaacgcccggctactgctcagcgagatcgagaacgaacgcggcgaacgctatcgcctcgattaccacggcaacggcctgatcagccaggaaaccggcttcgacggccgccgcaccgcctatcgctacgacctcaaaggccagcttctggagaaaaccgagtacggcgacgacggcagcgaactgcgcaccacctaccagcgcgacagtaccgggcgcctgctggcgaagacactgcccgacggcaatcgggtcgactaccgctacgatacgctcggacgcctggtcgccgtcgacgacggcacctggccgctggcctacgaatacgacctacgggaccgcctggtcccgcgagcaccagggctgggccacccttcactacgcctacgacgccctcggccagttgatccactgccgactgcccgacggcaaccgcgtcgactaccgctaccagaccggcggcaccctctcggcaatcgatctcaacggccagtccctgacccggcaccagttcggtag

SEQ ID NO: 341662 - DNA, 1158 bp, Pseudomonas aeruginosa
  misc_feature (248)..(257): n is a, c, g, or t
atgatgcaaacccaatcgacttggctcccacgaaacttgagtcatttttggcgacggctcagggcgctcaccatcaaggagtttcgccagctgatacgcgacaagagcaacctggcgataggtatcttcctgcccatcgcactgatactgctcttcgggtacggactctcgctcgatattcggaatgcgccagtcgccatcgtcctagaagatggcgcgcccatggcgcgcgatgttgtggcgggatnnnnnnnnnnctacatcgcccctcgttacgtcacgacgatggccgaggcggaagccctgatgcgtggccgccaggtcgacggcattgtccgcatcccctccgacttttctcggcaactggctcagggccgaggaacggtacagcttgtcgtccatggaacggatgcagcgacggccgccagtcttcgtggttatgtgtccgcagccattgatggatggaacaagcgccgcgccgatagcgccggcagggtcagtgctgctccaggcgtggagcttgttgaccgtctctggttcaactcggccaattcgagcacctggtatctggttcctgggctgatagtcctcatcatgaccctggttggcggattcctaacctcgatggtcatcgcccgggaatgggagcgcggaacgatggaggcccttttcgtcaccccggtgcgttccctcgaaatactgctcgccaaaatcatcccgtacttcgcggtgggtatgggagggctgacgctctgcctggtcgccgcccgggggttgttccatgtgccgcttcacggttcgctctgggtgctgatggtcagttcaatgctttatctgatggtcgcactgagtctggggttgttgatttcagcggccgcccgcaatcagtttcttgcaagccaggtcgccgtcatcattaccttcctgccggccctgatgctctccggcttcctgtttgacctgcacaacgtaccgaccggcatccagaaggtcgcgtccatcctgcctgcaacctactacgttgaactggcgcgcatgagcttcctggccggcgacaacctcaacctaatagtgcgcgactggacaatccttatcgtgcagtttgccgtgctcatcacgggcgcgcgtctacgcaccaagaagacattggaccgatga

SEQ ID NO: 341663 - DNA, 2340 bp, Pseudomonas aeruginosa
atgaccctgctcgttcagccgtctttcagcgcgggcgagatggcgcctgcgacctatggccgtgttgacctggcgcgctactacactggtctgcgcacctgtcgaaacttccaggtgctaccagagggtggcgtacagaaccgctctggcacgaagttcatcgccgaggtgaaagccagcgcgaatttcactcgccttatccccttccagtactcgaccgaacagacctacatcttggagttcggcaacctgtatatccgcttcgtgagcaatggcgggcaggttgtcagtggatcggtgccctacgagatcgctagtccgtacacaactgccgatctgcgcgatctgaagttcacccagtctgctgacgtcctgacgatcgttcacccgaactacgcgccacgcgagttgaagcgccttgccccgaccaactggacgcttaccactatcgctttccagccgggtattgctgcgccaacaggactctccggctcgccgcgcactggtgggtctggcgacacaacgaactatcgataccgggttacggcagtcagttcgaaggacacaggctctatcgagtcctgggcgagcaataccgtcactgtggcgagttgggatggcaagccaggcgccaccctgtcctgggcagccgtaacaggtgcagaccactacaacatctacaaggacaagtcatcaggggttttcggctacatcggccaggctgacaccacttcgttcagcgacatcaacatcgcgcctgacaacgacaagactgtgccgattggatacaacccattcactggtggcaacaatccatcggtcgtaggctacttccagcagcggcttgtgtttgcggcaagcaacagtcagcctcaaaccatctggatgagcagggtcggggacttccataacttcggatactcggacccctacaaggacgatgacggcatcgagttcacgattgccagccgcgaggtcaaccagattcgccacctcgtatcccttcgtgaccttctggtgctgacctcaggcgcggagtggtcggtcagttcgtcgaaagaaaccggcatcactcctgagtcgatctctgtcagtgctcaaagctactttgggtcgagcggcgttatcccagcggtctacgccaatactgcgctgtacatccaggcccggggcggaaagctatccacgctcgcctacaacgatatcgacgcaggctttaggcccagcgatgtgagcgtgctttcgtctcacctcctgcgtgggtacaccatcgaagatcaggcgttcacgctgacgcccaatggcgtcctgtggatggtccggaatgatggtgtgttgctcggattcacgttcatgcctgagcaacaggttttcgcctggcatcgccatgatacagacggtgagatcgagtccgtagcgactgttccagagggcgacgaggacatcctatacatgatcgtcaagcgcacgatcaatgggtctaccaagcgttacatcgagcgcatgcagtcacggcagttgaacaagttcgaaagcggtgattacgtttacgaccgctcgttcttcgtcgattgcggtctgacctacgacgggcgcggcaccatgagcgctacgctgaccggtgggactgactggaaatacccgaacgcgctgactcttgaagcgctatcggctcctttcaatcccgggcatgtcggtcgctatctgatcctctacggcggtggagacgagaacaacattggcgatgtgctgaccgtcaagattctcgcctatgactccccaggtgtcgtttccgtggagcctcagacgattgtccctgagtcattgcgcgggatctcggcgacgcgctggggcttcgccgcaaccaccatcagcggccttggccatcttgaggggaagacggtttcgattctcgcggacggaaacgtcgcgcctcaggccgttgtctctggcggctcgatcaccctggatggtccatcgctagtcgtccatatcggcctgccgatcactgcggagatcgagacgctagatatcaccatgcagaaccagcaggcgttcctcggcaacaagaagcgcatcaaccagcttgtcgtgctgctcgagcagagtcgcggattttgggccggcgctcggagtgatcgtcttagggctgcgagcggatgggaatacaagcagcgtgcgacggagaactacggcgagcctatcgaactgaagaccggcaaggctgagatcagtatcagtacagattggacggacgacggacggatcttcatccgccagagcgatccgctacccatcaccatcttgggagtgttgccgaatgtccaggccgggggctga

SEQ ID NO: 341664 - DNA, 336 bp, Pseudomonas aeruginosa
atgaaaatgcccgacaaagaccccatcacgtgggctgcgctgctggcgtggctgtctgcgcactatccgcagctgtacgccgccggcctgtcctttgtggtcgcgctgacccgggtgatctacggcggtggaacgcggcgccaggcgctgctcgaggcaacgctctgcaccctgatcaccttgggcctgattcctgtccttgagtggtttggccttccgcagaacatggctactgctgccggggtgttcaccggtttcctgggtgtgaagaagatcgccgagttcgctgatcggatcgccgactggaagtttccgcgccggggggctggcgaatga

SEQ ID NO: 341665 - DNA, 459 bp, Pseudomonas aeruginosa
  misc_feature (442)..(451): n is a, c, g, or t
atggcagaactgaccacgttggctcgtccctacgcaaaggcggctttcgagtacgcccaggctcatcagcaactggccgattggtcggctgcgctgggtgtgctggccgcagtgtcgcaggacgacaccgtgcgccagctgctcaaagagcctcagctgacctcttcggccaaggcccagagcctgatcgatgtgtgcggcgacaagctgaatgcaccagcccagaacttcgtccggactgtggctgagaacaagcggctcgaactgctgccgaccatcgctgagatgtacgagcagttgaaggccgagcaggaaaagtcggtcgaggtagaagtcaccagtgccttcaccttgagcaaagaacagcaggacaaactcgccaaggctctcagcgcccggctcagtcgcgaagtgcggctacatgcgtcggaagacgcgagcnnnnnnnnnngagcctga

SEQ ID NO: 341666 - DNA, 567 bp, Pseudomonas aeruginosa
atgagcattgactggaacacggcaccggagggtgcgactcattgggagccgagtggacctagtttcaatgaaggctggatgaagaaagaagggaatgaatggttttattggggcgaaggacccaaaagatggttccaagggaagctttcctgcaatgtgtccgcagagcgtgaggcgacattcgaggctagaccgcaagaggcctgggacggccagggcctgccgccggttgggacggtgtgtgagtatcgctgccaggataatatttgcgagccaaaagattggacggtagttcacgtgctggcccatgcgaaccatggttccgatacagcgatgctgctggccgaggatgtatcaggcgagcctggaacaatgtatggacggatctggattcctagaacttgtcgcccgctccgcacccccgagcagatcgccgccgaggagcgtcgcaagagcatcctccacttagcaaacctcctgatagacagtcggggccaatgcaacgaatacagtcaggctgaagcgatatttgacgccggctaccgccgccaggaggaagggaaatga

SEQ ID NO: 341667 - DNA, 330 bp, Pseudomonas aeruginosa
atgaacgaccgcacactactcgaactggcggcgcgggcggcgggttttaccgggtacggattcttcctgggcgatgatgggatcgatgtcagtgacgaaactggtactcgcttcgcctggaacccgcttacccaagatcaccacgcgctcaggctggcggtgaagcttcgcctggacattacgttctacaacggttttcaggaggtggccgccgagccatcaaatggtgacgggatgaacccttgccaggaagtgttcacagaaaacccgtatgcggcaactcggcgagcaatcgtccgcgctgctgccgagatcggcaagtcgatgtaa

SEQ ID NO: 341668 - DNA, 222 bp, Pseudomonas aeruginosa
gtgcattgggccggcggcctcgatgtcgccgggaagcggcatgcggccgaggatgtcgccgacggcgcggagcgacttcttctctggttcgtacaggaagggcggcactttctcgacgtggcgggcgacaagcaggaagcgcttccgggactgcgccaggccgccgagttcgccgcagtcgtgagtggtttccgccacggcgtagccgaagccgccgagtag

SEQ ID NO: 341669 - DNA, 852 bp, Pseudomonas aeruginosa
  misc_feature (660)..(669): n is a, c, g, or t
atgtcctctcacactgctcttccaattgagccgctcgatgttctgatcataggagccggtgtgtctggcatcggcgctgcggcttaccttcgacgtcaccaaccgaacaaggtgtttgcgattctcgagtcccgggagcgaatgggcggcacctgggacctgttccgctatcccggcatacgctccgactccgacctgtacaccttcggcttcgacttcaagccttggaccaaggcgaaatctctggcggatgccgccgacattctcgaatacctgcgagaagccgtcgctgaataccagttggaccccttcatccagtaccggcagaaagtggtctcggcgaattggcagagcgacaaagggctgtgggcagtatgcgtcgaggacggccacacggcagaaacccgcaccatcgaatgccgctggctgttcagcgcaggcggttactaccgttatgaccaaggcttcagcccacgcttcgagggcgcggagcagttcaaggggcaaatcatccacccgcaacactggcccgagcgcttggactatcggggcaagcatgtggtggtcatcggcagcggcgcaacggcggtgaccctgattcccgccatggccgacgaggtcgccagcatcaccatgttgcagcggacgccctcctatatnnnnnnnnnnctcctatatcgtcaaccagcccgccaacgattccgttgccgcttttcttcgcaagattctgccggcgcaaaccgcctactcactgacgcgctacaagaatgccaagatcaccctggtcttctggcgattctgccagcgcttccccgggctcgcccgcaagctgctcatatggctgacccgtag

SEQ ID NO: 341670 - DNA, 9459 bp, Pseudomonas aeruginosa
atgccgctgagtccgaacggcaagctggatcgcaaggcgctaccggcgcctgaagtaagcgtggcgcaggcaggctacagcgcaccgcgcaacgcagtggagcgaaccctggcggaaatctggcaggacctgctgggcgtcgagcgggtcggcctggacgacaacttcttcagcctcggcggcgactcgatcgtctcgatccaggtagtcagccgtgcgcgccaggccggattgcaactgagcccgcgcgacctgttccagcaccagaacatccgcagcctggccctggcggccaaggcgggtgcggcgacggcggaacaggggccggcaagcggcgaggtggcgctggcgccggtacagcgctggttcttcgagcgggcgattcccaaccgccagcactggaaccagtctctcttgttgcaggcgcgccagccgctcgacggcgaccggctggggcgtgccctggaacgcctgcaggcgcagcacgatgccctgcgcctgcgtttccgcgaagagcgcggcgcctggcaccaggcctacgccgagcaggccggcgagccgctgtggcgccggcaggcggggtccgaggaggcgttgctggcgctttgcgaagaagcccagcgcagcctcgacctcgaacaggggccgctgctgcgtgcgctgctggtggacatggccgacggcagccagcgcctgctgctggtcatccaccacctggcggtggacggggtgtcctggcgcatcctgctggaagacctgcagcgtctctatgccgacctcgacgccgatctcgggccgcgtagcagttcctaccaggcctggagccggcacctgcacgaacaggccggcgcgcgcctggacgaactcgactactggcaggcgcaactgcacgacgctccgcatgcgctgccatgcgaaaacccgcacggagccctggaaaaccgccatgagcgcaagttcgtcctgaccctggacgccgagcgtacccggcagttgctgcaggaagccccggcggcctaccggacccaggtcaacgacctgctgctgaccgccctggcccgtgcgacctgccgctggagcggcgacgccagcgtgctggtgcagctcgaagggcacggccgcgaggacctcggcgaggccatcgacctgagccgcacggtgggctggttcaccagcctgttcccgctgcgcctgaccccggccgcggacctcggcgagtcgctgaaggcgatcaaggagcaactacgcggcgtgccggacaagggcgtcggctacggcctgctgcgctacctggctggagaggaggctgcgacccgcctggccgcgctgccgcagccgcggatcaccttcaattacctgggccggttcgaccgtcagttcgatggggcggcgctgctggtaccggccacggaaagcgccggcgccgcccaggatccgtgcgccccgctggccaactggttgagcatcgaaggccaggtctacggcggcgagctgagcctgcactggagcttcagccgggaaatgttcgccgaggcgaccgtccagcgcctggtcgatgactacgcgcgggagctgcacgcgctgatcgagcattgctgccaggagggcaacgtcggcgccacgccgtcggacttccccctcgcgacgttgcgccaggagcagttggatcgcctgcctctggcgcggatcgaggacatctacccgctgtcgccgatgcagcacggcatgctgttccactcgctctacgagcaggcttccggcgattacctgaaccagctccgagtcgacgtccatggactcgatcccgcgcgcttccgcgccgcctggcaggcggcgctggacagtcatgacatcctgcgcgccggtttcctctggcagggcgatctggagcagccgctccaggtgatccacaaacacctcgaactgccgttcgccgagcatgactggcgtggtcgcgaagcgctcgccgaggctctcgacgagctggccgcgagcgaacgccggcggggtttcgagctggagcaggcgcccttgctgcggctggtcctggtgcgtatggacgaagagcgctaccacctggtctacacccaccaccacatcctgctggatggctggagcagcgcgcagctgctcggcgaggtgctcgctcgctacaccggcgaacaggccgagcgcacgggtgggcgctaccgcgactacatcgcctggctgcaggcacaggacaagcgcgtcagcgaagcattctggaaagaacaactggcggaactgctggagccgacacgcctggcccaggcggtcgccgccgagcgcgagcaggtcggcagcggccagttccagcgcagcctgccgccggcacgcactgcgcggctgaagacgttcgcccagcggcacgcggtgaccctcaataccctggtgcaggccgcctggtcgctactgctgcaacgctacaccgggcaggatacggtggtcttcggcgccaccgtcgccggccgtcccgccgaactggccgggatcgaaaggcagatcggcctgttcatcaataccctgccggtggtcgccacgccgcaaccgggcatgcgcctcaccgactggttgcaggaggtgcaggcgcgcagcctggcgctgcgcgagcaggagcacacgccgctgttcgagatccagcgttgggccgggctcggcgaggcgctgttcgacagcttgctggtattcgagaactaccctgtggccgaagccctggaaaagggctcgccaggcggcgtgcgcttcggcccggtgagcaatcatgaacagaccaactacccgctgaccgtcgccctgggcgtcggcgacagtctgacgctgcaatacagctatgaccgccaggcgttttccgatgccgcggtcgagcagttggaccggcacctgctgaacttgctcgaaggcttcgtcgacaacgccgaacggacactggtcgagctgagcctgctggatgccgaggagcgcgcgctgatcgattcgctgtggaaccgcagtgagtcgggcttccccgcttcgccgctgatccaccagcgggtggcggagcgcgcgcgcctggccccggacgcgccggcggtgctgttcgacgaccaggtgctgagcttcgccgagctggacagccgggccaatcgcctggctcacgcgctgatcgcccgcggcgtcggtcccgaggtgcgggtggcgatcgccatgcagcgcagtgcggaaatcatgattgccttcctcgccgtgctgaagtccggcggcgcctacgtgcccctggacatcgagtacccgcgcgaacgcctgctgtacatgatgcaggacagccgcgcgcacctgctgctgacccagaaccacctgctcgaccgactgccgattcccgacggactgtcctgcctgtgcctggaccgcgaacaggagtgggccggtttccccgcccatgatccagaggtggcgctgcatggcgacaacctggcctacgtgatctacacctccggctccaccggcatgcccaagggcgtggcagtgtcccacggcccgctggccgcgcacatcgtggctaccggcgagcgctacgagatgaccccggcggactgcgagctgcacttcatgtcgttcgccttcgacggctcccatgaaggctggatgcacccgttgatcaacggtgcgcgggtgctgatccgcgacgacagcctgtggctgccggagcagacctacgcgcagatgcatcgccacggcgtcaccgtcgcggtgttccctccggtctatctgcagcaactggccgagcacgccgagcgcgacggcaacccgccggcggcccgggtctactgcttcggcggcgacgcggtggcgcaggccagctacgacctggcctggcgcgcgctacgcccgcaatacctgttcaacggctacggaccgaccgaaacggtggtcaccccgctgctctggaaagcccgcccggacgacccctgtggcgccgcctacatgccgataggtacgctgctgggcaatcgcagcggctacatcctcgatgcccagttgaacctgctgccggtcggcgtggccggtgagctgtaccttggcggggaaggcgtggcgcgcggttacctggagcgtccggcactgaccgccgaacgtttcgtgccggatccctttggcgcgcccggcagccgcctgtatcgcagcggtgacctgacccgtgggcgggcggatggcgtggtggactacctgggacgggtagaccaccaggtgaagatccgcggtttccgtatcgagctgggcgagatcgaagcacgcctgcgcgagcaggcggcggtgcgcgaggcggtggtggtcgcccaggcgggtgccagcggccagcaactggtcggctatgtggtcccgcaggatccggcgctggtcgaggatgccggtgcccaggcggcctgccgcgacgccttgcgcaaggcgctgaaggaacgcttgcccgagtatatgttgccggcgcacctgctgttcctggcgtgcatgccgctgacccccaacggcaagctggatcgcaagggcctgcccaagccaagcgccgatcagcagcaacgcgactaccaggcaccgcgcagcgaagtggaaagacaactggcgacgatctgggcggaggtgctgaagctggagcaggtcggcctggccgacaacttcttcgagatcggcggcgattccatcatttccctgcaggtggtcagccgtgcgcgccagctcggcatccatttcactccgaagatgctcttcgaggcgcagaccatcggtgccctggctccgctggccgagagcggtacgcaggtgctggctatcgaccagggaccggtgaccggcgtcacgccgttgctgccgatccagcagggtttcttcgccgaagaggtcgccgagcgccactggtggaaccagtcggtgctcctggaagcccgcgagccgctcgatgcccggcaccttgagcaggccctgcggggcgtgctggcgcaccacgatgcgctgcgcctgtccttcacccgcgaggcggccggctggacggcgcgccaccggggggtggaagagggcgctgcggcgctgctccgcgtcgctcgggtcgccgacctggcggcgctgcgggcgcttgccgacgaagtccagcgcagtctcgacctggccgatgggccgttgttgcgcgccctgctggcgaccttcgacgacggcagccagcgcctgctgctggttatccaccacctggtggtggatggcgtgtcctggcgtattctcttcgaagacctgcagaccgcctaccggcagttgctggcgggtcaggccgtcgagctaccggccaagaccagcgccttcagggattgggccgagcgcctgcaggcgtttgccggtgacggcggcctggatggcgaactggcgtactggcaagggcaattgcagggcgcctccagcgacctgccgtgcctcgacccgctgggcgaccagagcaaccgccatgcccgttcggtcagttgcggactggacgccgaggcgacccggcaattgctgcaggaagcgccggccgcctaccgcacccaggtcaacgacctgctgttgaccgcgctggcgcgggtggtctgccgctggaccgggcaggtcgatgcgttgatccagttggaagggcatggccgcgaagaactcttcgccgagatcgacctgacgcgcacggtgggctggttcaccagcctgttcccgctgcgcctgacgccggccgagggcatcgccgcatcgatcaagggcatcaaggagcaactgcgcgcggtgccgaacaaaggcatcggcttcggcgccctgcgctacctgggcagcgcggcgagccaggcagccctggccggattgccgatgccgcgcatcaccttcaactacctcggccagttcgacggcagcttcgccatggacgagggcgcactgttcgttccggccggcgagcgcgccggcgacgaccagagcccggacgcgccgctggccaactggctggcgctgaacggacgcatctatggcggcgaactgcgcatcgactggagcttcagtggcgagcgcttcgaaaccaccagcatccagcgcctggccgacgcctatcgcgacgaactgctggcgctgattgcccactgccgagtggccgagggccagggtctgacgccctcggacttcccgctggcgcgccttgaccaggcgcgtctcgaccaattgccgctggcgccctgcgaagtcgaggacctctacccgctatcgccgatgcagcagggcatgctgttccacagtctgtaccagcaggaggccggcgattacatcaatcaactgcgggtcgacatcgacggtctgcatccggagagcttccgcgcggcctggcaggcggcgctggacgagcacgatgtgttgcgcagcgggttcctctggcagggcgccttcgagacgccgctacaggtggtgcgcaagcgtgtcgaagtgccgttcagcgtacttgactggcgcggtcgcgaggacctggcggcggccctcgacgagctggctgccggcgaaggccggctgggcttcgacctgagcgaggcgccgctgctgcgcctggtactggtgcgcacggacgaagagcgctaccacctgatctacaccaatcaccatatcctgatggacggctggagcaactcgcagctactcggcgaggtactgcagcgctaccgtggcgaaacgccgccgcgctccggcggccgctatcgcgactacatcgcctggttgcagcgccaggacgccgcgctcgccgaggccttctggctgccgcgcctgcgccaactggacgagccgacccgcctggggcagtcgatcgcccaggccaggcagcgcggcaagggctacgcggaacggttgcgcgagctcgatggcgagcagacccggcgcctggccgagctggcccgcgagcagaagatcaccgtcaataccctggtccaggccgcctggctgatgttgctgcaacgctataccggacaggacagcgtggccttcggcgctactgtcgccggtcgcccggcggaactgaacggtatcgaggagcagatcggcctgttcatcaataccctgccggtcatcgctaccccgcttccgcagcagagcctggcgtcgtggctgcaggcggtgcagggcgagaacctggccctgcgcgaattcgaacacacgccgctgtacgacatccagcgctgggccgggcagggcggcgaggcgctgttcgacaatatcctggtgttcgagaactaccccgtttcgcagatgctccagcagcaggcctcgcaaggcctggctttcggtgccgtgggcaaccacgagcagaccaactacccgttgaccctcagcgtaagcctggggcagcgcctggaactgcagttcgcctatgaccgcgagcatttcgacgacgccagcgtggcgcgcctggatcgtcacctgacgcacctgctggcgcagatggtcgagcgtcctgccagcacctgcctggccgagttccagctgctggaagcggcggagcggcgccaggcgatcttcgactgggggcgcaacccgggacgctatccggacgagcgcagcgtcgagcagctgttcgccagccgcgcggcgatggagcccgagcgggtggcattgctcttcgaggagcgccaactgagctacggcgagctcaacgcccaggccaaccgcctggcccaccgcctgatcgagctgggcgtggggcctgacgtgctggttgggatcgccgtcgagcgcgggctggaaatgatcgtcagtctgctggcggtgctcaaggccggcggcgcctacgtaccgctggacccggaatatccgcaggagcgcctcggctacatgatcgaggacagcggcatcgccctgttgctcagccagagccacctgctgcaacgcctgccagcggcctccgggatcgcctgcctggcgctcgaccaggcgcgggactggcaggaccgtccggcgagcgacccgcagttgcgggcgcatccgcagaacctcgcctacgtgatgttcacctccggttccaccggccgtcccaagggcgtcggcatcagccgagagagcctgtcgcggcatacccacgtttcgctggagttcttcggcatcgggccggacgaccgggtgctgcaattctccaccttcaatttcgacggcttcgtcgagcagctctacccgccgctcgcctgtggcgcctcggtggtgctgcgcggcaccgagatctgggacagcgagacgctgtaccgggagatcgtcgagcgacgcatcaccacggtggacctgactaccgcctactggaacatgctggccaaggacttcgccaaccagggcgtgcgcgactacggcgcgctccgtcaggtccacgccgggggcgaggcgatgccgccggaaagcctggtggcatggaaggccgccgggctggagcatgtgcgcctgctcaacacctacggccccaccgaggcgaccgtcacggtcaccaccctggattgcgcgccctacgtcgacggcagcaaggcgatcccggcgaccatgccgatcggcaaggtgctgccgggccgcgccatctatctgctggacgatgccgggcaaccggcgccggtcggggcggtcggcgagctggtgatcggcgccgagctgctggcgcgtggctatttcaagcgtcccgacctgacggccgcacgcttcattcccgatccgttcgacgagcagggcggcggccgcctgtaccgcaccggcgatctggcacgctacggcgccgacggggtgatcgagtacgtcggccgggtcgaccatcaagtcaaggtccgtggcttccgcatcgaactgggcgagatcgaggcctgcctcggcgagcacccggcggtgcgcgaggccctggtcatcgccgtcgagggtgctgccggggcgcagctggtggcctatctggtgccgcaagcggaagcgctggctagcgccacgctggaggtacaggccgcgctgcgcaacgagctgaaggccctgctgcgcgacagcctccccgaatacatggtgccggcgcacctgctgttcctcgaacgcctgccgctgagccccaacggcaaggtcgaccgcaaggctctgccggcgcctgacgccagtctcctccaggaggcctacgtggcgccgcgcagcgagctggaatgccaggtcgcggcgatctggcaagaggtgctgaaactccagcgggttggcctcgacgaccatttcttcgaactcggcgggcactcgctgctggccatcaacgtgatttcgcgcattcaactggagctgggcatgaagctcaccccccaactgttgttccaattcccgaccctggggcttttcgtcagcaatctggaaaaggccggtgggcaggtcgacacatcgaaactgaacaagctggaagccctgcttgatgaaatggaggaagtttga

SEQ ID NO: 341671 - DNA, 648 bp, Pseudomonas aeruginosa
atgatgggcgtcaacgcgaacatttccgagtccctcaccgggaccatcgaagcccctttcccggagttcgaggcgccgccggcgaaccccatggaggtgctgcgcaactggctggaacgcgcccgccgctatggcgtgcgcgagccgcgggcactggccctggccacggtcgacgggctgggccggccgtcgacgcggatcgtggtgatcgccgagctgggcgagcgcggggtggtgttcgccacccacgccgatagccagaagggccgcgaactggcgcagaacccctgggcctcgggggtgctgtactggcgcgagagcagccagcagatcatcctcaacggccgcgccgaacgcctgcccgacgagcgtgccgacgcccagtggctgagccgcccgtaccagacccacccgatgtcgatcgcctcgcggcagagcgaaaccctcgccgacatccacgccctgcgcgccgaagcccggcgcctggcggaaaccgatggcccgctgccgcgcccgccgggctactgcctgttcgaactgtgcctggagtcggtggagttctggggcaacggcaccgagcggctgcacgagcgcctgcgctacgaccgcgacgaaggaggctggaagcaccgctacctgcaaccgtga

SEQ ID NO: 341672 - DNA, 561 bp, Pseudomonas aeruginosa; identical to SEQ ID NO: 328154

SEQ ID NO: 341673 - DNA, 657 bp, Pseudomonas aeruginosa; identical to SEQ ID NO: 328350

SEQ ID NO: 341674 - DNA, 264 bp, Pseudomonas aeruginosa
gtgaaaaagcgttttaccgaagagcagattctcgacttcctcaagcaggcggaggccggtgtgccggtgaaggaactgtgtcgccgacacggcttcagtgatgcctcgttctacacctggcgggccaagtttggcggtatgaccgtggcggacgccaaacggttgaaggatcttgaactggaaaacagccgattgaagaagttgctcgccgaggcccacctcgacatcgagtcgctgaaagtggtcgcccggggaaaagggtaa

SEQ ID NO: 341675 - DNA, 603 bp, Pseudomonas aeruginosa
atgggcgcggacgtgcttgatgttcagggtgccgccaaccattgggcgcaatgtcgggtagtcctggacgctattcggaacatacagcttggtttctccgaggtcgcggatgcgcggtgcgaagcggaagcccagcaggtgcatcagggcgaagacatgatcggtgaagccagccgtgtcagtgtagtgctcctcgatccgcaagtcggactcgtggtacagcagaccgtcgagcacataggtagagtcgcgcacgccgacattcaccacgcgggtgctgaacggtgcgtactggtcggagatgtgggtgtagaacagccgccccggctcgctgccgtacttcgggttgacgtggccggtgctttcgcctcgaccacccgcccggaagcgctggccatcggaagaagaggtcgtgccgtcgccccagtgagcggcgaaggtatgacggtactggtggttgaccagctcggccagggccgccgagtaggtttcgtctcggatgtgccaggcttgcagccaggacagcttggcgtaggtcaggccggggctcgactcggccatcttggtcagcccgaggttgattgcatcgcccaggatcgctga

SEQ ID NO: 341676 - DNA, 633 bp, Pseudomonas aeruginosa
atgcttctacaaacccgcttcggcgggtttttttgcttcgtacggttcagccccgaaacgaaattattttctgaggtgggctggcttccagaaatcggggcgattcataagcgatcacattttgataccaacggccaagcacttggtctcggcgactttgagagtattaactctgaatccattgctggaggccgtaccatgattgctgttttgcgtagccgaaaacctgaggacagaaaggatcccccgaagcgtctggtctacctttgcatggttgctttggctccttgtatggcgctcgtagccttatggaatcaaggagatttgacgcttgtcacagcttcgctgacgttgtctgttggcgcgtttctctatgtaaatttagaggctatccagatctatttgaagcctgcgtgggcccgtgagtaccatgccaaattggctccactgacggcgcgcctaacctgttcagggctttctgctgatgagcgtcggcaggtgctacgccgaattcaggatctcaatgaccgctaccatttggtcaccagtccagctatcacctacatgtgggttaagcgcatggcattttcgatggcgtgcattgcgcgatttttgcgtgcgagcactcactga

SEQ ID NO: 341677 - DNA, 333 bp, Pseudomonas aeruginosa
atgagcgcgaaatacgagattttcctggggacggatcgtcagtactacttccgtttgaaggcgcctaacggcgagaagatcctggccagcgaaggctataccacaaaggcgaactgccagaatggtatccagtcggtgaaggtcaactccccatatgatgccaattacaagaagctgacagccgttaacggtcagtactatttcaccctgcatgcaggtaatggtcaggtgattggcaagagtgaaatgtatacctccacccaagggcgtgatggtggtatcgcggcggttaaggcttacggcccaactgcccaaaccgtagatctcacctga

SEQ ID NO: 341678 - DNA, 561 bp, Pseudomonas aeruginosa
atgaatcagaaatcactcactgtcaagctgagagacttcaccgaagacgaccatccttttggcaatgtccaaggaaaggcaacctttgggaagctgctcgacttcgtcgacgcccatccacagtattccgtttttgggatctccctctctggtattgaagcgacggatgcatcatttccgagagaaagcgtggtagctgtcgcgaagctctataggggggagcgcggcttcttcctcaaggacgtcaagagtcgagacttgctggacaactggagctacgccgctcaggccaaagagattcctctgactgtctgggccgaagacggttaccaagtcatcgggcctgagatcagctcttccacgaaggaactgctggattgcgtgctacctcggcgcgcagttactgccgccaaggtagccgaagcactaaacatttcggtcgctaatgccagcactaagctcaagaagctcaaggatcaggggttcatcctcagagccgaagagaccgccgagtctggcggaattgagtacgtataccgagccatcggtgaatccgcttaa

SEQ ID NO: 341679 - DNA, 1083 bp, Pseudomonas aeruginosa
ttgattgctgatgttgagcgttttctgcgggaaaaccctggcactaaggctaaggacatcgccaagcatcttggggtggctaaaggggaggtcaattctcttctttataagagtcctgatacgttcgcccaagatgctgaccatcggtggtcggtggtgaagactgtgctgaccattgtccttaaaaaggaggcgtgggtggacagtgcctcctttgagggggcgctggctgccgctggttcgcccttggattctgcctgcacagacgctgtgttcgttgtgcccaagggctgcaagatcatgattgatgctgcggcgcgaatgctagcgctatgcaatcagctcgttttggttggcaaaacggtgtcgattgatttcagtacctgcaaggcaacgctgacctacttcaatcggctaggtttttttgaccacctagccggggccgtagatgtggttccggagcgtccttctcagtctggagcggcaacctaccgtggtaacaacgaaggtgtggttgagcttgcctctattgatcctcgcattcccgatgagtcgatccccaaacgtctgaaaaacagcctcgtgaggtgtgcaggtgagcgctactcgcagtctgcgtttacgttcatttctgagctatttggtaacgtgcgggatcatgcaaagtcagagattccgggttttgcagctcttcagcactacccgaaaggccgcaagatccagacagtgatctctgacagcggggttggcattgttggaagccttcagcccgttttggagcagagatacccggagctttttaagaaactcgacttctcgaaatcagaggcagggcctgagctggtcttgcatgtattcaagcaggggcgagtctcaagctctgatgaggatgggcgagggctgggcttgaaacgaagtggtgatgtggctgctaatttcaatgccacggttacggtgaggcaaaaaaatttcgagctgacgatggtctaccgcgactctcaattcaaccgcagccaccggcgaacggatatgcctaccatcctgggaacccacatctgctttgacttcttaattgacagctaa

SEQ ID NO: 341680 - DNA, 1167 bp, Pseudomonas aeruginosa
atgaccatgacgattgcagtagatgccagtggccgagttgtttcgattaacgaagtagtacgcggtctggcttgtggctgtcggtgcattgaatgcaatgaggtcgttgttgctcgccaagggctacagcggatgcaccatttctcccatgcctcacataaagcgccctgtgaggtcacgccagaaagctttctgcaccgatacgccaagcagttggttaaagaaagcttagggttgcagttgcctccgcagccggggcatcgcccagattctcaagaccagagctcctggtgggattttgaatccgtcaaagaagaaccctggatgggagactttaggcccgaccttgtcgctgagctgacggatggcccgttgttgattgagttcgcctgcacctcgtttgttgatgaggagaaactggcgaggatcgagcagttgggtattcgcaccgtcgagatcgatttgagtggtttggtcgtaacgccctcagcagaaggtttgctggagataaaaagatccatcctgcatgacgcgaccttaaaacagtggctctacccgctcccggaaatcgttgttggcggcgatacgttgctgcctgttgatagcggtgttcagcaggagcccagggtgcacttgcctgagcggcagcggttcacgattcagggcttttgggtcgatctgcgggtgcttgagtttggttctgtggtggtgcgttcagtggcatacagtccagctatcgctgagctgctcaagcgactgtcgcgacgatacgcaggtcgctatgtggccaagtacaagaactggatgtttcctgcgtggacaaggtctgcgcttcaggatgagcttaaggcactggctgatggtgatagccctggtttgagtagagcggttgatccgtcttcacgggtactagaggcgtcgttcacgactgagagtcagccggacgtgaatggttacctcgatgcgcgactcatcctccggcactaccgtacagggcttgctcctggatgcctgccttgcggcgaattcaaggctcgtcactatggcattgggttggactgtgatgcgttggaagatttcttccgggccagtggcgttgagcttcttggtgttgaggtgattcggatagctgggaaggctgatttcatctacgtattacgtcgatga

SEQ ID NO: 341681 - DNA, 954 bp, Pseudomonas aeruginosa
atgttcgaagctcttcagcgtctaaagcatcacctcacagagaacccctcgcgcggacgggcctacgagatcctgctgttcatgaccagtagctgtcttgcccgccctgacaaccaagagaaactaacctttgaggctaagactctgctcgccggctgcggtaatgctgcggagaaagactcagaccctaagaattgggtgccgaaaatctcgatcctgcggcgcaccctgaagctggcccagtcagaatcagatgagccgcgcctgcaacttggctatacgccaggtggcggcaggggggtggtcagcctgtattggctggaactggaaccccaaaatgacgaagagaaaacgcctgaagtagaacccgcctcatcaatcatctaccgacgttccgccaagggcgcaatcaagccatcgctcgcggctcgcctgttcctgagtggcggtgaaatgcgcaacctgagtgtcagaggtatcagctttctgagctcaatccttctgggcagtgcattctgggttgccctactcggaatcatgctgctgagcctgggcctacgtgaggggcccattacgatgggaagcctcatcaccctatgcctcagcctggcaggatttgtattcatctggcgcgagggctactcaccttggttcaaagtgattgatgactgcgtcgtgaaagcacctaactgggtgtccgcgttcaaagaaaccagctgcgagctggaaatgttccggcatgacaactaccgctggacgcgcctggtgcgcttttcggctgactgccccgtttgcggcagcaccatcgagctccaaccaggcaagccagaccatcaactccccctggtaggtcgctgcgtcgaaagcccacacgcccatgtctatagctttgaccggatgaccctacgaggtgcgtacattggcccccccatgcccgaagagaaggatcagtaa

SEQ ID NO: 341682 - DNA, 1140 bp, Pseudomonas aeruginosa
atgtgggagcaagttgatcgagacaaactctttgccgaggtgtgggccgagccgatgcaatcggtggccaagcgctacgggctgtcggatgtgggcttgaagaagctgtgcagccgcttgcagattcccacgccaccccgaggcgactgggccaagttgaaagcgggcaaagcggtaaccgccccaccaacgctgccggtgttcaaaggcaatccccgccaccttcaccgctttgtggcgcaaccggtcaaaccgtctggtgaggccccaccaccggatgcgcggttgctgccggttctggcgtttgagcgtgaccccgccaatcacatccgagtaccgagccggggtacgcattggcatccccaggtggccgctacccgcgatgcgctcaacagcggctacaaagacaaccgagggataccgattccaggtggtcgggggttcgatatttctgtgtcggttggccagcgcaaacgggcattccgggtgttgaataccctggtcaaagccttggaaaagcgtggctacagcctgcgccctggtgatcggcacatgcaggtcgaaatgtatggtagccgcttcacgctaggcatctatgagcccaccaaacgctccaactatgttccaacggcgaaagagctggcggccaaaagtcgtggcgaacatagctattggccgcgctatcagtacaccccgtcgggaacgctcgaaatccgttgcggcgatggccatgacgcggtggtcaaagacacggtgcggcaatccatcgaggagcagctcaatctggcggtggaggtgatggctaggcgggcgatcagcaggcttcgctaccaggaagagcaagagcgcttggcggcgatccgcgaaaagcgccgccaggaggcattggcacagcaagcgattcaggacgccgagaagaaaaggctggagcatctgattgcagatgcgcagcgctggcagcaggcggaaaccatccgggcgtttttacgtgcccaagaagctcatggtcagcaggttggcggtttgtccgaacagcagcagatgtttctggcctgggctcgggctaaagcgaactggctggatcccttggtaatgcagccagacgccattctggatcagaagataaagattccttactga

SEQ ID NO: 341683 - DNA, 357 bp, Pseudomonas aeruginosa
atggacgagctgagtgcggtaaccgatctgttgtatggccgcggtacacccatgtcggggttatccctgactgacgaagaagccatggccatggtgcgtcagcgctttccctttaacgagttctgtcttgtacgcgattggctgtggctggatttagcggtcacgccagccgagcgcgagcagctgagcaacacggggcgtcagccggtgctggtgtatgcgcataccgtcgtttacgacagtgccaggcgctgggacgcgggggactttgtgcggacatcgccgttacacgttttgcatggtgagggtctgttccagacctggagcacgctctacgtgttgctcggtgaggggtag

SEQ ID NO: 341684 - DNA, 357 bp, Pseudomonas aeruginosa
gtgcctgaccggatcagcacccgtctgcctgcgcggactcaacgccttttactcgaagcgctgctggagcattaccccgacgaagtcattactggcttcctggtgaacgccactatcagctgcaactgcgtgcggggccatgcctacaaagtccgccgttatccggagcatgccgtgctcacctcgggggagatcagccatgtcgtgcgcgatggggcgcgctggttgatccataccgaagagttcgactgtttcgtgatcgtgaattttgcacccggtgggcttcagtcactgcgccatctgattgatctctatgagacggcccgcatggcgcactcgcgctggtgccttcaataa

SEQ ID NO: 341685 - DNA, 1893 bp, Pseudomonas aeruginosa
atgttggcattccccctgactcccttcgctgatgaaagcgtaaacggctacctcctgcggttggccgaggagaacttcatggactcctctgccgccctgctccgcgaggcaggggttcgactcaaagcccgttacagtgagactgagctcaatgccatcagtgagacgcatggcttggattgtgcggggatccaacagcttgccggtttctcacaagtcgtgggatcgctcgggcaaggacgatttctccgtaccgcagcggttccggtctgtgtcgagtgcttgcgcgcgtccgcctacatccgtcagtcgtggcatcaccagttgttcatcgcatgccccgagcatcaacgcgcactgttggcagtttgcccggagtgttcggaaccgctcgacctcaagcgccactcgattacaacctgcccctgcgggtacgacctgaccactgcggatgtcacgccagcagatcctgcgagcctctgggtggccagcctcctgtggcctgccagtggcatttcgctgccgggactggaggctctgctccaagacgttgatgcatttctgctgtttctggcaaatctgacactgacggagccgcatcggaaaaatgctcccatcgatacggataaagccttggcggtgtgccaagccagtcatcaaatcggcagcaatttgctgcctcgcttcaggggcttcgtcgaagccaagatcgaagcggccaatcaaatggcgtccagccgtttcatgctcaatcttggcagctggtatcgcgagctgaatacggaattttcaggagaggtgtatgcaccagtccgcgagattgcacaccggctgattcttgagcgggccaatgcgcccatcaaccgcaagctgaagcagatcagcgctgactggctggggctgaaggcaacccttacggcagcggaagcggcacggatactgaaaagctctccggatcgcgtagtggcattcgtaaaggccggcctgttggatggaaccatcttgcagggctcgaccagcgagttctgcatggtcaagcgcgcggaggttgaggtacaccagcaagcagcggcggatttcctctacggtaaggatttgctcaaacttctcggcatcagtcggcgtacccgagatcgtctgacggagactggcctgttgagtccggtaccggagatgcagcgcccgctgtttgcacggggcgattaccgaagaagtgaagcggtggcactgcttgagcggctgaccgagagcagctgcgagatcgatgagcccaagcgcagcctgtcatttgcggatatcagtggtaagagcttttccaacgcacaagccaatgacctgcttaagcgagtatttgcgggtgatcttcaaccgctaggccgtgtgcgtggcatccaggggttcgcggcgtttcgctttgatgaagacacgcttgcagaagtgtcggctcagcattccaccggtattgagttcaccatcactgacctgaccaaaattacgaagtggaaacaccagaccatcaaaggttggattgatgccggctacctgcgggcacgtgctgaatcaggcaagaaataccggacattcatcggtttggccgacctgatcgcattcctttccacctatgtggtggcagcagatacggcagatcgactgggcagccagtcggtctggcttaagggggcgatgaagaaggttggcgcactggtgactggccccagtggagaggtggagagcgggcttttgctctcggtcgatgcgttggtgaacatcgtttctaatcgagcccctacttggtcacggccatctaaacccagcgcccgcatgagccacagccctgaactgaaggcggtagtggatcagttttgccaggcgacggaggtgcactgtgcctga

SEQ ID NO: 341686 - DNA, 708 bp, Pseudomonas aeruginosa
atgagcggtatttacgatcagctcgttcagcatgagcggttttcatcagctcttgctgtgattttggcggctgtagaacgtgcgcgtgatgaggattatcaaattcagccggtcgttgggcccacgcgtgtggggaagacaagggtattggcgcgtgcgatccaagaggtcttgcgcacctcccctgtcggatcgcagagcgtgatctcggtggtgagtcccaaacatctgacggcacgagccctgccggatgcttgcctgagcagcattggcatgagcaccgggggctttaagaatcatgtggcggcgactgaggcttttatcaaagcagccaataagcggaacacaaagctcatcatctttgatgagtgccaacacatgctggagcgcggcagtagcaccacggtgcgggcggcggctgatttttttaagcttttcgatggaaaactgaaggccagtatcgtcctggccggtttgccatcgcttaatcagctgttcctggaaaatgagcaactggctgatcgtgtcagacggccattccaattttatccgtatgactgtcagggccctgattacacgcattttcgggcggcgttggcgacagcgctgcaatacctgacgaacaacggttggcgcacgttcgatctcaaggatgccgagtttgccaagcgcatgtacatcgcgcgtgtgcggggcgttttggcctga

SEQ ID NO: 341687 - DNA, 612 bp, Pseudomonas aeruginosa
atgaccattaagcaggcgatggatgaagagctcaaaaaatttatgccaccaccgccgccatctcttgagcaggttcagcgtttgattttgcataagaataagacgactcgtactgtgcagcactacgggatcgaattcgagggctttcagtacaacagctatgccttcaaggaagtgacgcgggattttcttcagcagcaagtgacgattctgtttaaccctgctgaatgcgcggcgatttatgccgttgatccccgtagcggtgaattgatcaagctcgattgcaagatgcgcgacgttccaaatgtctcgttcgaggtcatcaaagagattcgtaagcagtatgagcgtgacccgcagaccatgacgggtcatgactaccatcgtgtctacgcaagcttgctgatcaaatggacgacagacagcacccggcgccgctcaaagatttccgaccataaccgtgcaggtcagaaaaaagctcgtgagggttatcaccgtgacgtgcaaacccagcttgaccagcatgcgatagctccggtcgcacgcactgtcatgtcggtcgactcggatgatgactttgtgccggcccctgtcgaggtcatccagccatga

SEQ ID NO: 341688 - DNA, 279 bp, Pseudomonas aeruginosa
atggcgaaacccaagtttcacaacaggctgatgtacgtagtagtcagctatgaacttaacaacatctttgtacacttgctcgacggtgtagcaagcctcattttctgctcgttcatgtcgattcttgatttctttctcagcgcttttcttagatcctggcattctatgaaataccatcttatccaaggtattaaaaagcgactctacgtgtggcttatcgtccccacgataggcgcgggcataatggatatcaatcccaagatctcggacgagctctaa

SEQ ID NO: 341689 - DNA, 999 bp, Pseudomonas aeruginosa
atgtctatccagggaatggaaacttgcaaattctggaggtttatatcagtgaataatccaatccgggaaaacggggttgtgaatatttccgggcaacccttcattatcaagtcgctgcaagtggatttgaaagatattgtcctgcgcggcaagggtggcattgagcgggttatggactttcagcagttctataatgaactggcaactggagtcatcaagatcccagggtatgcgactgagcgccaaggtaagacttgggagccttcagaatatgcggaagctattttccgcagagacatcatcaagttagttgatagcgaagaatatcggcgagcagcgcaaagcgaaaaaaatgagctactggttaaagttggacttgagcacgaaaaaaaggtgccgtgtccaaaaaccatcaggcagtaccagaaaaaatatgcaaaaggagcttttgaagccctgattcctaactaccgcgcgcgtggcggtaaaggttggagggtaaaagcggcagctaaagagctcgtccacgcagtcattctggagacctatgccaaggatgacaagctgaacctagcagcgacagcacggattgtgaatgatcgcttgaaaggctcagattgtctggttgagggtaaccagacgatcagcgtgaagctggtctctcgaatgcttcaagaaatgcctcgggatatcgtcttggatgggcgaattgatcctaggacttatcgcctgttgtcacggcaagcggtaaatgagttttacgttgagcatgcctttgaattggtgcaaatcgacgccaagacgattgatatgtatgttgtcgatgagttcggtcggcgattttcaaaaatcaccttgtactcaatggtgtgtagccgtacaggctatcccgtgggcatttatgtgacagccgggacacccagtgaatactcattgctcaagctgtttgaatttttcttttccccgaaagacgaaaaattcaaagacgctttgaattaa

SEQ ID NO: 341690 - DNA, 627 bp, Pseudomonas aeruginosa
atgaagtcgttgaaaagcggcttggaaatccgtctggaatcgcgcgacgagctggcgctggcgaaagccctggatctggatccgagaggcagtcaattgcgggcgcaggcaatgacctttgacctggttcggggcgaggtgctgaccgccctacctaccgccaagcacagagacagtcggtactacacacccgatctttcggatgtgattgatggcattgagcatattttcgaggtgaagccgaagcgctactgctcacagcataaagggctatttgagcaagtgagcgatttttgtctgcgcaacggtatgaaattcagagttctttgcaaagaggacttcaccgaaacgttcttgatcaatgtagatttattgcataaattcgcccggcaatgcgctcagcaactgccagcttgggcacagcaagtcagccagattaaaaataagacggggcacgtcagagacgtgctctgtggattggcgccggaaaattactttttgctggcaggtctgttgtctggtgttttgaggatggatctaaataaggcgctgattctatcaatggattttgatgtctatccagggaatggaaacttgcaaattctggaggtttatatcagtgaataa

SEQ ID NO: 341691 - DNA, 900 bp, Pseudomonas aeruginosa
atgccacgcaagccgcaaacacactggtttggcctgtatcaggctcttcgcccgaagatcgacgggcaccagggcgacgagagcgtctaccgactcattcgtcgtgaagccgaagcttcgaactacgacgagaaagtcatcaagcgcatgctcaatgccggggcgtttcttgagcgtatgactgacagcccacttacggtggagcaggttaaatgcggttacgctcatgctgagttcctggagcgtctttacaagctaaacgcacaggaagctcacgctcgcttcaacgcgatcctggacaaccaggtaaccctgaaagagctccgccaggccattgattccctggccgcagaatccgggcatgcgcaaatcacggctcgctcccgcgctcgccagcgtgtggtcgaacatcagcggctttgcattcaacttgcacaacagtccggggctggcttcttcgggagccctgaaggcgagctcgtgctggtgaagaacttccgagcgctgcgtaattttattttgatcgacgaccctcaacagcccatagccgtcattccacgcttgggcgacagctcgttgaaagaagggcccgcagcagaggagctgctcaagctggttacatctgtgaaacgctatttccatcgactttggctggtgctttcttctgactcactgcttgctcaggaactggtcgcacgtgccgaacagatcggtgcactgaacagctggctgtacttagcaattccaaatccagattcgtcgggcctgatcccgtatctgaaccgccgccgcatactcgaaaaagacgtcgatggagaagatgactgtgcctgggagggggtttcgctgcgcgatggtcgcaagctgtccggcagcctaaatccgatagagaaaatttga

SEQ ID NO: 341692 - DNA, 1302 bp, Pseudomonas aeruginosa
atggcgaaacaagagattgctccactcccgccgtatccccgcttgggcgagtgctatcgcctcctcgccaaagcactcgatacgaaagccagcaaccgccaggtcgatcaactcgccaggcaaggcgattttgactggcagttgctggccagcctgcgagatgaactgctcgaagcgccgttgagcagcagaagtaatgctcaattcgctcgatttgttgcctcggcggtcgagaccctgcaagaaagctatgtgcaactgatcaagaccatagcactggacgccttaacccgagagcaggcgctgcctgtcttggcggagcatttcttagcgccgtatctcggctcctttctcctgcaaatgcacaaggccatccccagcccgcctctggcgcagcttttggatgagcagcatcaccctgtaggcgtcaccctggcctggctagaacatgagctggaaatagcgcccaaccatctgggccagcagctttatcatgatgcttctggcgagaataaaaacgggcgtgaagcgatccgtcgttggcgacagggcgagcagctgccggatcttcagagcaccgccttgcttcatcagacattgcaggcgcagttcccagcttgccctttgctgctgcgggcctttaccgagtggctaatcgtcgcccgagcgttaaccgtgttagatagcgccgcctcgggttttgtccgcttgcgtcactgtgtgctccaacaggtgttgagcgacatccccatcatcgacatcggtgtcatgctttccatgctgaatatccaggccgcagcacataagcgtgaactggtcgaaaggggcctgttgctgtttgagcagttgaagcgcaccacggaaaaatctctgggcgaccaggcccgcacacgctacgccctggatcaattcagagttcttctgggccaccatgacccggaaggcatcagcacctactacctggaatggctggaaggtcgctggcatgtgctggcgggacaattggacacggcgctcctgcatttcgaagcagctgccgacctcgatctctaccgctcaggccaaacccagaaagacattctgcgggaagctctgctattggccgcctacctgggcaagcgcccgctgtacaagcgcctgaagcaccgcgccctagctatgggtctcagttatctgccgagctgggaagagtccgtggcgtctgatcatgagctgaagctgattcgcgacaatttcacggtcaagttcccggagcgaggccgctttgtggatccggtgccggcctttagtgcgctgcattag

SEQ ID NO: 341693 - DNA, 255 bp, Pseudomonas aeruginosa
atgcacaccacccaccactgcaaggcacgccaatcccagtgcgggatctcactcgacatggtcgattacgtcctggcccatggttcgcaggagaaagacaaagtcgtgttcggtaagaaggaagcgaagcagcgcttagcggctctggatcgcgaacgccgcctgctgatgaaaatcaacgacaaaggtggcgtggtggtggtcgccgatggtgaagcgctgatcacaacttacaactgctcgcagcgccactga

SEQ ID NO: 341694 - DNA, 1767 bp, Pseudomonas aeruginosa
atgaacgacaaagtcctctggcaactgctcgacactattcgaggcactggcacagccccctacaatgctctgtccctcgtcctacagttgctgtgctggtggaagctctccaaggagccggtactaccagaacaccttcgtttcgaggtgttctgcgagcagaacagctccgcgcagctggaggctctacggagcgtacagcaacacactcgccacccattcttagatgaaggtgcatggaaagggcttcacggggcgagcgacctttctgttttaacccagaaaatccgattgctagggactcaaggcctgctcgatacactgctgctggatgacgcagcgcattggagtaacgatccgcgcggtgagaccgccagctactcgcccagcctttgcgagttgatggtgtctctggcccatgtcgaccaagcccaaagtatctacataccgtgggaaacctctggtcaattggctgcccgtattgctcgaaccggagcaagcctctgggttgagtcgcaagtgcaaagcacctgcgctcaggtgctcaacctggtaggcggggtgaactgggaattgcatgcaaccgaccctttgagagccccaagtgctatcaaccaaggaaagctggttcagttcgatgcgagcatttgcttcccaccgatgggagtgaaatacccaaatgaaatctgcaatggcgatctttgggagcgtttcaccgaaaaaacccaggtcggcaatgtgctgcaaatccgtcacctgctcgcacagacacaagggctagctgttctgacagttcaaagctccgtgctattcggcaaggggatcgagcggcagctgcgcgaagatctagtcagtcggggccaaatccgcacgattatcgccttgcccggcgggctgttcagccacacgcaaattccaatcaatatccttgttctagagagcaagcgtcgaaatgaatcgatccgctttgtgaatggcaaccatgaggcattcatagaggcctccggcagaaggcgcgtggatctgaaggacatagatgcactgctgcaactggtagcgagcgacgatgcctccccatttgccaggaatgtgacggctgaagagatagcccatagcgacttcagccttgaggccagtcgctatgtccaggatgagtctgcacagaagctgagcaacaccctcaagcgctatccactgcgcaagttgggggacttctttgaaatccttcgtcccaggcaacacagcactacctcagagggtgcagaggtcaacgaggtactggcccaagacattccatcgttcggctatatccgcagtgccagcaaagaagcattgttcgacctgcaatcgcccaaggcagacagctacttcatcaagcctgacgacattctgatgactttcaaaggtgtcgtaggcaaggcaggcatagctggcgacgtcccgccgcctggccagaacagctgggtagcagggcaatcgttagtgctcttgcgcagccgattccccgatcaataccctcccaaagcgctgctgatacttctgcgatccgcaattgggcagggcttgcttaatcaagcagcagtgggggcaaccatcccctccattcagctttcgacccttaagaacattgaaattccagtgcctcctttgccgaccatgcacgccatggtgcaagcattcgatgaagaggcacgaatccagacagaaattgaaatcctgtgccgccagcaaaccgagctaaccagcgagttctggtcactccaatag

SEQ ID NO: 341695 - DNA, 2238 bp, Pseudomonas aeruginosa
atgcaaaacgttcaacatcaaaacctagtcggcttcatctggaatatcgccaacaagctacgtgggccctatcgtccgccacagtaccgtcgcgtgatgctgccgctaattgtgctgcgtcgctttgatctggtgctggctgagaacaagcagaaggtgctggacgaaaagaaacgcctggaagacaaaggcatcaccggccctgcgctggagaaggcgctctcacgtatcgccgctaccgaccgcaagcaagagctgtttaacaccagtggcttcacgtttgagaaactgctgggcgatgcacccaacattgccggcaacttgctcgcctatatccagggcttctcgccgcgcgcccgcgacatcttcgacaagtttgagtttgaggccgagatcgccaagctggacgaggcgaaccggctctacctcatcatcaaggagttctgctctgcagacatcaacctctcgcccaaggccatcagtaatttacagatgggctatctgtttgaagagctggtgcgtaagttcaacgaacaagccaacgaagaagcgggggatcacttcactccacgggaagtcattcgcctcatggtgcagttgctgttcaccggcgaagacggcatctacgaaaaaggcatctatcgcagcgtgtatgaccccacagcgggcaccggcggcatgctgtccgaatcagagaagttcatctgcggtgacggcgtcacaaacgggctgaacccggatgcaaacatcgagttgtttggccaggaatacaaccccgagtcctacgccatctgttgttcagacttgctgatcaaggacgagccgatcaataacctgatctacggcgacaccctaggcatcaaggatgccaagaacaagaccaatggttttgtgccgcacgatgggcatccgggcaaaaaattccactacatgctggccaatccaccttttggggtggagtggaaacctgaagaagattatgtccgcgaggaatacaacacgcacggcttctatggacggttcggcgcaggcctgccacgcatcaacgacggctcgctgctctttttgcagcacatgatctccaagatgcaccagccgcctaagctgatcgatggcaacaacgtcggtggcgacggctccaagatcgccatcgtgttcaatggctcccccctgttcactggtgacgccggatcgggcgagtccaatatccgccgctggatcatcgagcgcgacatgctggacgccatcgtcgccctacctgaccagatgttctacaacacaggcatttacacctatgtctggatcgtcaccaacaagaagcccgctcatcgtcaaggtaaggtgcagttgatcgacggaacccaccatttcaagaagatggacaagagcctgggcaataagcgcaacgagctctcggacgaccacatcagggagctggtgcgcctgtacgccgagcacgaccacgatgcggaaagcgaagtttgggtggacggcaagcccgagttccgggtttgcagcaagatattcgagaaccgcgagtttggcttcctcaagatcactgttgagcgcccgctgcgtttgaacttccaggccagtgctgaacgcatagccaagctggacgagcagagtgccttcattaatctggccagcagcaagaagcgtaaggatgaggctgcctaccgcgcggaaatcgcagcaggccaagaaacacaggcgaccatcaaagccgcactcgaaggcatggacagtgaagcgctgtaccgcaatcgtaccgccttctacgcagtgatcgaagccgccctgaaaaaggcagccataaaggtcggtgcgccggtcaagaaagccatcctggcagcactgtctgagcgtgaccccgaggccgacatatgtctggacaccaaaggcaacccggaaccggatgccgacctgcgcgataccgaggtcgtggccctaccggacgatattgaattgccgctgccgctgggctacgacaatgaaaccggccacgacaaactgttggcactggtgaaagaccactgcgagaactacctcaaggctgaagtcctgccgcatgtgcccgatgcctggatcgaccacagcaagaccaaagtgggctacgagatccccctcactcgacacttctacgtttatcagccaccacggccattgagcgaaatcggaagtgaaattagtcggctcgaaaaagaaattgtgaccatgctgagcgaggtgctgtga

SEQ ID NO: 341696 - DNA, 723 bp, Pseudomonas aeruginosa
atgacctacacaccgtacaaaaagtacaagtcaaccgattgcgcatggctaaaagaaatacctgagcattggtcaatcaagcggattaagaatgtagcaacgtataacgacgatacattggatgagaaggcggatcctgatttcgaaattgattacgtagacatttcgagtgtcaccctagcgggcgggattgaaaaatcagaagcaatgctatttgaaaagtccccatcgcgagcacgaagaaaagtaaagcacggcgacatcatcgtttccacagtgagaacttatctcaaagcaattgcaccgatttcgaacccaccagaaaacatgattgtttcaaccggatttgcagttattcgacccaaagagaatcttcactctggattcgctggatatttattacaatcaaatggttttgtaggagaagtagtcgccaactctgttggcgttagttatccagcgattaacgctagcgatcttgtccggattgaagcagttgaacctccaatggaggagcaagccataattgctcgtttccttgattttaaaatagcgcaaatagataccttaattcgttcaatgggcggctctgctgaaatcgaaaagaacgccaagaaaaagagcatggtttcgctacttcaggaatatcgctccgccatgatcaccaatgcagtcactggacaaattgacgtccgggcagtgccgatcccgcataaagggtga

SEQ ID NO: 341697 - DNA, 3039 bp, Pseudomonas aeruginosa
atgcacaaagaaatcgactttgaaaacgacatcgaacacgcactgatcagcagcggcggctacgaaaaaggtgatcccaaaacctacgacccggataccgcgctgtttcctggggatgtcgttgcctttgtgcagaagacgcagcctaagatctgggctcgtctgacccaactcgacgcagccaagccctcatcaatgttgttggatagcttagtgaaggagcttgccgccaaaggggcgctggcgatcttgcgtgagggcttcaagtgcgtgggcaagacggtgcggcttgcctactttgcgcccaacactgggctcgacccggcaagtaccgagcgttacgacgataaccgcttgaccatcgtgcggcaggtcaacaccaagagcggggcgatccccgatgtggtgttggcggtgaatggcttgcctgtggccacgctggagttgaagaacccgatgtcggccactcgctggaacgtggaaaacgcaaagcaccagtaccgctttgagcgcgaccccaaagagctgttgttcgccttcaaacagcgttgcctggtgcactttgccgtggacaccgaattggtcttcatgacgaccaagctggagggcaaggacacattcttcctgcctttcaatcttgggcatgaccacggtgccggcaacccgcccgttgaaggcgatgtacgtaccgcctacctgtggcgcaaggtgcttacgcgcgacagcttgatggacgtccttgctcggttcattcacctggacgtcgaggaaaagaccgttgtcaccgaaaaaggcatcaagcgccatagcaaggagtcgatgattttcccccgctaccatcagctggatgcggttcgggcactgaccaaccacgcgcaagtgcatggttcagggcacaactacttgatccagcattccgctgggtcaggcaaatctaactccatcgcctggctagcacatcgcctctccagcctgcatgacgccaacaacgagaaaatctttcactcagttgtagtgatcaccgaccgtcgggtgctggatcaacagctgcaagacacgatcttccagtttgagcacaagctgggtgttgtacagaagatcgacgaaaacactcagcagttggccaaagcgctggccgatggtgtgccgatcatcatttccaccatccagaagtttcccttcatcacccaagccattcgcacgatggagaccaacggaaaaggagtggccatctcgacggtgggcaagcgtttcgcggtgatcgtggacgaggcgcacagctcgcagagcggcgaaacggcgatggagctgcgcaagatcctgaacaaggatggcattgaatccgccattgccgagcagttgctggatatggacaacgatgccttgagcgaagaggcgaagaaagaactgctgcgtgaacagctcaagcgcgccaaacaacccaacctgagtttctttgccttcacggcgacgcccaagttcaagacccttgccgttttcaacgagcccggccccaacggcaaagcgccgttccaccactacagcatgcggcaagccatcgaggaaggcttcattcacgacgtgttggcccactacacctgttacaagcgctactacaagttgatccagaaggtggaggctgatccggaggtaccgcgccgcaaagccgcccgcgcactggcgcgtttcgtcgagtttcacgactacgagatagcgcagaaggtagaagtgatcgtggagcacttccgcacccatacccgccacaagattggcggcagggccaaagcgatggtggtgactggctcgcgtgaacacgccgtgcgctacaagctggggttcgacaagtacatcaaggacaagggatacaccgacgtgaaatcgcttgtggctttctccggcgaaatcacgctcaaagagttcgccgacaagaaattcaccgaagtgagcatgaacagcggcatcaaggaatctgagctgcctgagaagttcaacaccgaggaataccaagtcttgctggtggccgagaagtaccagacgggctttgaccagccactgttgcacagcatgtacgtcgacaagcgtttatccggcatccaggcggtacaaacactgtcgcgcctgaatcgcacgacacggggtaagaccgacactttcgtgctcgattttgtcaacgagcctgcggacatctacaccgccttcaagccctattacgagaaaacggacaagggcgacgacaccgatccgcaacaactcaacacgctggcacatagtctggctagctggaaaatttacacaggggcagaggtcagcgcttggtgcgagatttggttccgcaaccgcctgaaccctaccggtggcgagcacaagaaattgaatggcctgctcgatctggcgattgagcgattcaagaaactcggggaagaagaccagaacctgttcaaggggcagctggtcagcttccgcaatctgtacagctttgtttctcagatcgtcccttaccaagactccgatcacgagaagctgtacacctatgcccgtttcctactgaccaagctgccgcgcacgacggacaatcggacggtgcaggtcgacgatgaagtcgagctcaaatactaccgcctgcaaaaaatcagcgagggtgcaattgatctgaaagcaggcgaggcggacgctcttgaaggcccgagtgatgtgggttcaggccaagcggacgaggatgtgcagctctcaactttggtaggcaagctcaatgagcgcttcggcacagagttcaccccagcagaccaactcttcttcgatcaagtccgtgaaaccgccgtagccaatgagcagttacgacaggccgttatggcaaatagcatcgagaactttgagccagtgttcaacaagcagcttgagaacctgttcattgaacgcatggatggcaacgaggaaatctttgtacgtctaatgaacgatgaggcatttaggaatgttgctgcgagccatctgatgagggcggtgtatcaacagatacgaaggcctgaccaaaatgtttaa

SEQ ID NO: 341698 - DNA, 1413 bp, Pseudomonas aeruginosa
atggaaagctggggtaggggcaaaatccgatgggtcgactattacgcttcattcgaaaccgtcgtcagtgattccgaggcccccggtgatctcgccaccgtggtcattgacgctatacccaaatccgccgccacagccctcaagacgctcgagcgcgaaagggttgtcgaagatctggatcatcacttcccagttttcctgctgacggcaactctggagtcggagcgagccaaggccttggtggacagtcccggctgggtcgaactgtcgattggaaccgatcgctttggcgaagaagacagtttcgaagcctcggcgatttccttcgaaggggatgaagacggtgctcgaacgtcattttgggtgaaggtaaaatccacttcggtggcgaagcgcaatttgaatgcgctcgcagcgctcgctgagttgtcggccattgccgacgctaacgcttcgagcctggtcgtcttcgactgtggaggagaaattcgcggcgtagctgtctacgatgtggggcaggcgaacttctgcgccttggtagacgcgtttgagcatcccgttgttttcttcgatctcggttggccgctgtcctttaatggtaagtctcgtcgtctgcccgggccgttcaatccctttattccagctcgccgaggcagcggtccccagccagtcattctgtctcatctcgattgggaccactggggatttgcgttccactccggacgagctctgtttgacccacagcgtggccattggcgctcagtcgtcaagtacaaggatgaggcccttcgcaggccctggctgatgcggcgtccgcggtttcaccgacacaaactcggcccaagtcacatccacttcgttttgacgctgagccgcaccacccttttcgacggcagccccgctctgactttttggccggccaaacgagccaggctggatttcacccactacaccgtcgtacgttgcagcccgtcgcaacggcgcgagtccagcgcagcctacctgaggaacaatgaatcacttgccctcttggctaaactggaacaccgccctgaaaaggttctgcttaccggggatgccgattacccctccattcctgctaaccatctgcgtggcctgactggcattgttgccccccatcatggaggcgccatcacagaattttcgactcctgtagcgccccgcggcagccgaatgattcgctccacatacccaggctgttatcgcagtgtgccgtcagatgacgccgagacagaagctgagctcagtgggtgggaaattcacagcacgaatgtcagggtcaaatgccccagcatgtgctgtgtccatggaaacaagctcattccgttggatgtactcaaccccaagtgcgggtgtcgacaggtgtcgcgggcaggtctttgcctaagctga

SEQ ID NO: 341699 - DNA, 1287 bp, Pseudomonas aeruginosa
atggccaaggacaacgagaaatacatctgggactggcaaacacgcactttcccgataattgacccgcatagcaaggtcaagcaccagattatcagcgagtacctgcagtcttatgtccaggtcctgatgcggaatgctcttatcccagagctgcgtttgtccatcgtggacggcttctgcggtggtggtcagtaccatgacctcgacggcgaagcccattttggctctccgctgattgctctagaggcagtacgagccgcagaaacactgatcaacgtgaaccgaacgcaaccacgggtagttcgaactcagaatttttttgtcgatgtaaagcagagcaacatcgattgcctacgcgccgtattgaccgcgcagggccttgggcaacgtatcgatcgtgatgtatttctaacctgctcagactttacccaagcactgccggcaataacacagcgcattaaggactttggccacggtgggcgggcactgtttcttctggatcagtacgcctatggcgacgtgcctttttcgtccatcaagtcgatctttagccgtttcaagaatgcagaggtgctactgactttcaacgtcgatgcgctgatcacctaccttgccgatcgcaaaccaaaccggaaagcaattgccaacattaatctggaacaacacattccttggagtgagctggccgccctcaaggccacccagaagcacgagtggcagtacctgattcaacgctgcctctccaaaggaatcctgatcgaaagcggcgcgcagttcatgaccgttttcttcatcacaccgttgggcgccaacccacgcacctactggttcatccacttggcgaaccagtaccgggccaacgacgtcatgaagtcaatccattggcgccatggtaaccagttttcgcacttgctctcaccgtcgctgtttgtcggctatgacgccaaccgagatgtacaggtaacgcatcagcaagacttgctgctcggagaagagcaccactttgatggcgccacccacgagcgcatttgtaccgagctttccgagctgttgccgcagctcttatacaagcaacgtgagcagacgtttgaggcactgatgcacggcgtggcgaacttcaccatggccgacgaagaagtggtgaagcgctcattgaatgtcgccgtgtccaaccaagaccttgaagtgcgcgacaaggatggcaggtctaagcggcgaaaaggtgaaagcatcaaactcagcgacgtgatcaccgcaccggcgcaaagcaccttctttttcctctaa

SEQ ID NO: 341700 - DNA, 183 bp, Pseudomonas aeruginosa
atggattacctgcgccaagttccggcggccattcgcttgctccccacagccctccgactcgaagacttataccggctcgatctcactgacatccacagggggatcgtcggcggaaagtcagaaaacagagccagacaaatgaagcagaagtggaccgaaatcccgctgctgcagctcgcctga

SEQ ID NO: 341701 - DNA, 837 bp, Pseudomonas aeruginosa
atggttaagcattcgtttggtggtgagtggacgcgcattaaacttgagcggctggaaagctacctcaagatctacaccacagcactgaagaaccagccgtttactctgcactatgtcgatgcgtttgcggggacaggtcaacgtgatgacgacgacttgagctcggatcctcttttggagctggaggtactcaggggctcagtacggcgcgcgctcgactgcaaggatgtgttccatgagtaccacttcaacgacttgaagcttgagcatgtgcaagcgctcgaagagcttcgcgccgagtaccctgacaaggtgatccatattacccagctcgacgccaatgagtttgtcacccgcttctgccgaagactgagggggcgagatcgggcagtcatctttcttgacccttacagtactgcggtcaattggagcacgcttgaggtcattgcaagtacacagaaagtggatctatggatgctgtttccgatctcaacgttgctgcgccttctacctcaagatggtcctagagaggagtggaggccgtgcattgagcggttgttggggacttcggagtggaaaaatgcatgctatgccccaagccagcctctggtagacgatctctttggtgagcaagaagttcgttcacaacgctcggattacgaggcgataatccaatttgtgacaatgcgtctaagggagatcttcgcgcatgtcgaagagcccacgcggcttactcggaacgcaggagtgttgttccttttttacttttcagtctccaacccaaaagcgaaagcgctggcagccaagctggctcgggtcactcagccgaaacggtag

SEQ ID NO: 341702 - DNA, 753 bp, Pseudomonas aeruginosa
atgagcagctactcagccattgaatggacagagcaaacatggaacccggtgactggctgcaccaaggtatcccccggctgcaagcattgctatgccgaagtgatggcggcgcgcttacaggcgatgggcgcggccggttatgaagatggctttgcactgcgcctgatgcctgagcgcctagagcagccattgcgcaggaagaagccgacactctacttcgtcaactcgatgagcgacctcttccatgaagaggtcccggacagcttcatcgaccaggtgatggatacgatcacccgaacaccacagcattcctaccagatactaaccaagcgagcttccagattaccggagtactttggtagccgaccggtaccgagcaacatctggttaggggtatcggtcgaagaccgtaagtacggtttgccgcgtattgatgaacttcgcaaggttgaggcgactatccgcttcttatccgttgagccactgctcgaggatcttggcgagatgaatctttctggcatggactgggttatcgtcggcggcgaatccggagcgagggcgcggcccatgaagccggaatgggcgatcaacgtcaaacggcagtgcgccgaggccgaggtggctttctttttcaagcaatggggcggatggggcgcggacggcgtcaagcgtaacaagaaagccaacggccgtttgctcaatggccgtctctatgacgagtacccgattatccctaccgtttcggctgagtga

SEQ ID NO: 341703 - DNA, 1086 bp, Pseudomonas aeruginosa
atgcttgacctgctccggcagtcccttacagaggctttcggcggtgcacaggtagaagccagatccacgatcatcacctctggtcggctcaacggccttctcgagatttacgggtatggagagcccatatctgttgccgttgaggtcatccgaacggcctatccccgggatgtccatcgggtgatttggcacctcgatgaactagagctgtgccggggaaaggctaagtcaggacatctcataaagttgatcgcagcagagcatctcagccccggagcgaagtcgacactcaaagataagggctacgccttcttcgaacgcagcggcagcctttttctgcgcacaaaaaaaatgctcatcaatatcgagcgaccatccaagtcaccatcccgcgtacgctcaattgatttgttcacagaagcccgtgaaggggcagtgcatggactgctcaagaatgcctttcaatggatggcaggcgcagacctcgcagaacaatcacagacgtctacatacacctgctcagttgttttacaggagctggagcgccgagagtggtgcgaaactcaaggcgcaggtagaaccaagcggcgcaggctcgttcagcctggaaagctactggatgactgggctgaacattggcaacagagaagcatgagcagaagccgttggtacgttttcatcgagaatcctcacctgctgatcgatcggcttgcctgcttggtgaaagagtctggcgtcgattttccttgggcctttactggggccgcggcagcaaacatctatgcccctttgctcaccagtgttgattcagctgaaatcatcgttccatctgggtatgcggccattctgggaacgtcccttaatatgaaacctgctcaaaagggcagcaacgtcacgatcatcgagcgtgaaggcaccagtctgcagtttcgagagttccatgccttgcatcccgcctgcttcgccagtccgtacatccagtacctcgatctgctcgatgggcgtgggagaaataaagaattggcgctccatctcagagagcaactagagcaaaagtgggggcagtctaaaacttcatcccgctga

SEQ ID NO: 341704 - DNA, 867 bp, Pseudomonas aeruginosa
atgcatatcgaaggtccgaaaaatccgtcgcttcaagccatcctcgacaaaatcgaacagacccgtaactacacgccgaaagttggtattttcggaaattccggtgtaggtaaatcaagtctgtgcaatgcgctcttcgggaagaacgttgcaaagatcagcgacgttgaagcttgcacccgtgagccgcagagcattttcatcgggacagggaataacggcattgagctgatcgatttgccgggcattggcgaagacccagcacgtcagatggaatatgtagctctttatgagagccttgcgcccgagctggaccttgtgctttggaccatcaaagcagacgaccgcaactacgcctcgggcctcgaagcgtatcagcagatttttgggaagcgcgaaggcttgccagtggtttttgtaattactcaggtcgataaaaccaaccctcaccgtgattgggattggaataactttgtcccgagcgaaaagcagatatctaacatcgccattaaagagcgcgacgtatctcgtcgcttcgatatttccgcaaaaaatatcatctctgttgctgtaggcgaagaaaacccgaatgaaaaatacaacgtgattgaactcgttgatctgatcgtagaggttctacccaacgaaaaaaagttctcattcgctcgggaggcaaaagaggacaacgtaagcaacgagtcacgtcaaaaggccgaacgaggcgtatgggatagcatcaaagactttgcaggtgatgcgtgggacactgtgaaggatcaggttgtagataagctgattgagtcagcaccaaaaattttcgccgctgcagcagcatttgtgggcggcttattcaaaaaatggctctga

SEQ ID NO: 341705 - DNA, 141 bp, Pseudomonas aeruginosa
atgaaaaatatttttgcggttatcggcttcattgttgtcgccaagaaaggctacgagctgtatcgcgagtacagagagatgaagcacgagcgggaggagcgggaggagcgggcagcgaatcgggaacgccagccagagtag

SEQ ID NO: 341706 - DNA, 1098 bp, Pseudomonas aeruginosa
atgaatcgtctggacaggatcaagggctgcctgctgggtggagccgtcggagatgccttgggggctccggtggagtttctcgattgggcgaccattgagcggaagtttggctcgtcaggcatccgggatttcggtcaggcctatggcatcacaggagcgattaccgatgacacacagatgatgctgttcacggcagaaggactgttgcgcgcccatgtcagacaggcatcgcgtggtctctgccatccgccatcggtgatccaccacgcgctattgcgctggtacctcactcagggcggagaaccagccaccgaggtggcgaaagacggatggttgattcaggagcgggcgctctggtctcatcgagcccccggtatgacgtgtctatcggcactgcgtgcatgcaagtcattcggtgagcaagcacgtaacgacagcaagggctgtggtggtgtcatgagggtagcgccccatgccttcttccctgaacccttcgagctggcggctgagtctgctcatctcacccacgggcacccgaccgggtatctggcagccggcatgtttgctgacattctcgctcgcctcctggtgccctcctgctcgctggaggaggcgatccaggaaagcctccggctgtacggacatcgcgaaggcatgagcgagacacgcgagttcatcgaactggtgttggggctttatcagaagggaatccggccaacccccaaggtcattgcattgctaggcggcggatggacagccgaggaagcactagccatcggactgtggtgtgccttgatggccgacggcttcgagcagggcgtgacctgggccgtcaatcacagtggtgacagcgacagcacgggaatgatcgccggacatctgctcggcatccaactcggccacgccagcattcccgagcgttggctcgcatcgctggagttgcgcgaggtgatcgaacaggtcgccgtcgatatcgatgaggtgccgcgcgtttatggcggtgagtacggtgagtacggtgagtacggtgagtacggtgagtacggtgaggatcgcatccacgccgagcagatatgtcgacgatatccgggatggtga

SEQ ID NO: 341707 - DNA, 429 bp, Pseudomonas aeruginosa
gtgagtgctgtgggaggggggctggcggatatctcggtatgtatgaagctgcagatcgacatgaccatgtgccttgcggtagccattaacggcaagatgtccaacgaagatgccaagcacatgtcgtacatcattgcgctgtacggctccttggagcagatgggctcttctggcgccaccagaatagccagcaaggccggtgtgcgtatggtgcaccagtatttgaagggcccgacgcttcaggtcattaaggagttgttcgcgaagattggcatttcgttcactcagaaggccgtagcgaaagtgatcccgttagggatcggagtcatcatcggcggaacggcgaattacgcgctcaccacctacgtcggaaaaaccgcacgcgacactttccgcctgagtttgaaagaagaggagatagcggagtag

SEQ ID NO: 341708 - DNA, 648 bp, Pseudomonas aeruginosa
atgcagtaccaagccttgaaggagcgtcatcgcctggagcgagaccaacagcaccccaacctcagcctgcgtattcaccgtgccctcagttggctgaaccgcgccgagcaggccgatgatgccgatggccgtttcatcttcctgtggattgcttttaacgctgcctatgccacggatatcgacgaacaacgtcgactctccgagcaggaaaccttcaaagcctttctggaaaagctctgttcgctcgacgtttcgcgcagcatcgagaggcttgtctggtctgagttctccggaagcatccgtgtcttgctggataacccctttgtcttccaaagcttctgggaccatcaaaacggcaagatcagcgaggcagagtggaaagagcgcttcagtaacggtaagcgttctgctcagcaagcgcttgccagtcgcaacacgccagcggtgttgggggtactgtttaatcgcatctataccctgcgcaaccaactcatccacggcggcgccacgtggaacggtagcgtcaaccgcgatcaactgcgtgattgctgcagcctgctaggtaagctggtccccctgatcatccaactgatgctggacaacccggatactctttggggtgatgcctgttatccggtggtggactga

SEQ ID NO: 341709 - DNA, 648 bp, Pseudomonas aeruginosa
atgaacaagcccaccaccgtcaagactttggaagatttagggcgtgtaaagttgtccacccacttttacatgcgcgacttcctctattcggaaatcagccagatagaaggcatccccaatattccagactttccgaatcgcgccatcgaggcgggaaaacagctctgtgaacaattgctggagcccttgcaagaccgtttcggccggatcgttattcgctcggcctaccgttcgccagcggtgaatgccaagggagccgagaacaacaaccagtacagctgcgccgccaacgagaagaactacgcctcgcacatctgggattaccctgatgcagaaggttacctcggcgccacggcctgcatcgtagtgccggcattgctgccctggtatgaccagaccgatgactggaccccgttggcatggtggattcacgacaacctgccctatgccagccagttctggttccccaagctcgctgccttcaacctgcgctggagcgccaatccggacgctttgccgaacatcagcacttacgtcagcaatccgcacacaggtgacaagaaggcgttagtcaagaatggagtggctgcattgggggcagaagagcgcaagcgcatcgttgatccctggttggccagtatcgactga

SEQ ID NO: 341710 - DNA, 2346 bp, Pseudomonas aeruginosa
atggaatttctgaatcacttgttgcccaacttttccttgctgaaggggggcagtaccgaagccctgggtgtcgtgttctggctgatcatggcagcccttttcacctactcggtaatctcgttgatagtcagcgggcggagcttcaaggcgcgcatgcgagcgctgaacagcctgatcgccgggcagagccgtgaaaacttggcggtgaatcgtcgagagacattgcagaaagcactcgggctcaaggtcaaactaatcggtgcgctatggcatgagttcgacgacagcttggtcagctccagtgatcacaagaagctgttcaataccctagatgccgagcattttttcaacgcgcgaacgcttgcgcctggcctgagcggaagccgcttcttcggttctctgcctggtttgctggtaggcctgggcgtgctggcgacgttcgtgggcctgaccataggcctgcagaatttgaagctggagagtagcgcgggtgtcgatcagttgcgggcaggcatctccgtgatgatccagggtgcagcagttgctttcatggcgtcggtatggggtgtgggattcagcctgctactgaacctgatcgagaagatcaccgagcgctgggcgttagggcgcatacaggatctgcagcaccggatcgatgcgctgtatccgctgatccccgccgagcagtcgctggtgcacatcgccgactacagtcgcgagagcaaagtggccctgcaggagttgcacgaacgtatcggcgagcgcctgcaggaaagtctcgtgggcatgaacgaggcgatgcagacagcactcaccgatgcgttgaacaacatcatggcacctgccattcagacgcttgtcagcaccgccggtcagcaatccacccaggtgctggaacaactggtgagcaacttcacgcagggcctgacctcggcagggcgcgagcaaggcaatctgatgcaacaggccgccgcagatgtgaacgccgccgtgggcggcatgacggagcggcttaatcagctgttccataccctgagtgatcaacaggggcgtcaacaggaggctgcccgccagcagagcggcgagtttcaggcccagatggagcgactttctacttcgtcagatcagcgtcagcagcagctggagacgcgattcggcgagctaatgagcggattgactggccaactggatacacagcttagctccgcacaaagacgggatgaggagcgccaggcgatgttcgagcgcacgctggccgaggctggcgcgagtcagtccgcgatgctggagaagttcgccagtgccagccgtgagcagctgcaggccatggcggaggccggcaatgaacgacacggcaatctggagaaagtgttctcccgattgatgatgacgctgaactcccagctggattcgcagatgggggcggcagaaacgcgggagcaagaacgcgcccagcgccacgagcaacaacaggccgccgcgctggcccagcagcagcaattgatcggcagccttgggcaggccagccagcagcagattggtgccatcgccgaagctgccgccgcgcagcagagggccttggaggagtcggtcggcaagttgctgggcagcttcaatgagcagatggcgggtcatggtcagcaagcggagcagcgcgagcagtcgcggcaacaacgcttcaatgagcaactggagaacatggccgcgcagcagcaggtgcttctggaaggcattgccacggctgtgcagacgactcagcaacagagccggcagatggctgagcagcatcagcaactgatgggccgcctgcagcaagccagcgacgcggccgccgccagcagccgacatatggacagcagcgccaaccaactcggcctgctctcgaccaacgttcgccaggcggccgaattgctcggtcagcgtctggagagcgtgacgcagcgcatcgagtccgcaggtgagcagaatgctcagctggctagccaattgcacagccaggcctctgccttggcgcaacttcaaggtgctctgttggatggcgcacagcgcttcgaacaggccgccagtgaggcacgcaacgggtttggcgagatgaggagtcaccagcaggagttcctcgcaggcgtgcgtagcgagttcaccgccctgggtgaggccctgcgtagccaagtgcaaggcgtcgagcagcaagccgagcagtggctgcgtacctactctagtgaggtgcgcgatcaagtgcatgagcgcatggaccagtggaacaaagagaccatgagcttcgccaaccagatgcatgcggcagtgcaggcaatcagcaatgtggtcgatgaactggaggcccgttga

SEQ ID NO: 341711 - DNA, 1989 bp, Pseudomonas aeruginosa
atgaatctgccgccaatcgataaccgccctggtgattggtcgcctgcggtcatcgagggttgggtgcgactggtggaaaaggccaaccgcatgaaggccaaggtgggtggtagtgatgcgttcgaacgaatgctcgcgcgatttcgcgacatggccagcagcgggcgtttcgacgggctcaaggagttgcttgggcgccggcttggcgcgagggcgctgacttggctgtggctgcatgacgaggttatcggctcccggctgttcaatgagcgaatgctcgatgcgctgatcgaacaccagcagccgcgccttagccgactgacgatgatccagctgattcaactgtacttccgccatttcgatcgcctggacgagcgcgacaaacaggtggagagcagcttacgtggtcgactggaactgcatctgttggaccagctccagcgtttgccggcgcgacgccaggcactcggcaccgacccgctcgcaaccctgaaccgggaaggggagtggctactgacgctggatggccctctgatcctggcgaagacagtgcgtgagcagggtagtgaactggccaagaccttcgaagcctttggtttgagtgggttcgatgttgggcgctatggcgatatttgtcgcgctcacttctatctcgaagtgctacgccaactgcagcccggggaatgggatgaggtgctcgacgaactgctcaagccctcggtgagcaaggctccctatgagggcgataagcgcatcggtcatgtcgcactggagatcatgatcgaccgcgcaggggacgaacccggcaatgtctggcaagacttcattctcagtctggctggcgatccgcgcatcgccagctcagcgcagaacttccgcgaatggtggaagccgctgggcgaggagcgcatcagcaaggtgcgtggctggctgtccaaggaagatttgcggttgttcctacaggcggttgaacagtacggcattgagtctcgaaatgacgatctccagcgcatgttccctgcgcgcaagcggttcctggagggcttgttcaaactgaagctgatccgcaatacccgactgttgctgggggcgcgggccaagcattcggtgaagcgcattctcggtacggaggtgaagaccagcttcgccagcatggacggacagatgagcgacaaggccgtcatctacctcgattgcggcgactttcacctggtggagggctcccacagcttcaaaatctgggtttatctggcggcgccgggcgagtcgctgcgcacctatgagcgcaacaacttcagtcacttcgacctgatcaacacgattccggcgacttacgagaagctgtatccggggctgccttacgatgcttttgtgcatacgccgtacacctggcagaacaaagtattcgccttcctggctgataacggcattgaggtggatgtcgagcaactgctgagccgggaggactatcagttacagttgcgcaggttcggtattcctgtggtcaaggccaagcgcacagtggtgccttccccagtgagtccgagggctgtgcagactgccttctccagttcgactgttgcgcgtggagatcgggactcaagagcaccacgatctgtcccagctgaacctgtatcggaaagagctgaatcggtcgatagtccggttggcgacaaggttttggctgcctccacagcaacgcctgcgacgattaatcagtcgccacggaatgaggcttcgaccgttagtgacggtatcaagcgaattgccagtctcaagccttccgctctgaaggtcctgcgctactttgccgataacccgggcgataaggttcgctatgccgcaaacgttctggaggtcgaggcacgggaaatcaatcagatcctctatgggcctctcaaagggatgtgtgtccaggattcaaacttcggatggcacctgacgaagactgcacaaaaagaccttgaggtctacgaccaacaacagtga

SEQ ID NO: 341712 - DNA, 3042 bp, Pseudomonas aeruginosa
atgctcctcctactggattttctcaagtcattcatcggcgagcgcgacgtagccctcagtgctctcgatggtttcctggctacaccagactccaacggggtgaacttctacttgcccgtgcaaagcttcaaggcgttgcatgaggggaagggcaacgccctgcagaagatccagctgatcgcattgaacatgctggctgagcaggggatcgcggagccgaccgccaatggctttcatatcggtgctgaagacgtcgccggtatggatctcgagcaggccgaaattctgcggttgcccagacgcttccctggccgctttctgacttccatcagcgggcgcactggcaacagcagctttcgggtaggtatcactgccgagatgtcggagggagtggcggcgttcaaccgcaagggcccttatctctatctcaccagtaccgagtgctattggctcacgccggccgagttgatggggatgatggcctgggaacggcatgagtcaatggcgccaaagctgcgtggtgaggccgctaatcttagactgatggcagagcttcagactgcggcgcgcagcggcatgcgaatcgatctgagccattttgaacggttggatgtggtggtgccggacaaagtaggcgtgacggctacgcgtttacctgatggcagtctgatgctttgccccagcttgggtgatggctccacgcctgatcaactggaaaagcgctgggcgcagctggagctgaatggcgacggtggcgtcatgcgaatcgacaacagggtagtcctgttggatcaggccagaatggcgggaattcgcgaggtgctgggcaacaaacgtatccctgcggagcgtgtggccgagttcattgcctcgccaagtgctttcctggacgctgcgctggtcaatctcgatgtgggcttttccgtgcgggtggcaggcatcggtaagttgcagcacatggactttggcagcctggatgccaacaagaacgactggttcgccctggataagcgaccggcaccgccggagatcatcagcaagctgatccagtccccggaggagctgcagcgctttgaggaagtgctgcgggccgccaaagaacacggggcctcgagtctaagtttcgcaggggaggtcatcgatattgcggatgcctcacacgtagatcagcaactcaaccaggtgcgtaaaaacctggagaattcggcggcggttgagccaggtacgccggacgaaacaggtttcgaagagcccaaggagaaggtcggcgtcatcctgaaggatgctgacgagatcaacgtggccttgttgcagaaggcgaaccgggcggcattgcctcaggcacctgactgggccgcctatgccaggcagccatttccgcaccagcgggaggggatcgagtggatgctcaagttgctgagggtggccttgcaggatgatcatggtgacctctatcgcttgcaagggagtcttctggccgatgacatgggattgggcaagacctacatgtcgctggtcaccgtaggcgagtacctagcaggacagcgctcggcagacaaacctcagaagccgatactggttgtcgcaccgctcagtttgcttgagaactgggaggacgaagtgggcaagaccttcaatagcattccattccgtgatgtcgtggtgctgcaatcggggcgtgatctgggccgcttccgggttcaaggcgccgagcgtgaatcggtacagctgacttcgcttgccgatgaaaacggcatgatggatgagcagagcatccgctatgcactgactatcgggcctgaagcgggtgtccatcgtctcgatatggatcgacgtctggttctgaccacttaccagaccttgcgcgactaccagttttctctgtgccgaatcgactgggggatggtgatctttgatgaggcacagaacatcaaaaaacccaacgcgctccagacgcgagcagccaaaggcctcaaggctgacttcaaattgttggccacgggtacgccggtggaaaacagtctgggtgacttctggtgcctgatggatactgctcagccggggctgctgggcagttgggagacgtatcgggatacctggatcaagcccattcttgcggctgaggagcatgagcgcgatgaggttcgttcgcgcctgggcgagcagctccgcaaggcggtgggtactttcatgctgcgccgcgtgaaagaagatcagcttaagggtttgccgagcaagaccatccgcagtggtgtggagcaggtgaatcgagggcttcagcactttgctccagagctgggtaccgctatgcggggcctgcaattgcagacctacgacgaggtactcaacgattatcgtgcccgtcgtgccagtgccgaagacatgcgcggaacggctttggccgctttgacgcaattgcgctcgatctctctacacccccgtctcgatgatgaggcatcgctctatagcagagatgctcagcatgcccgtcagttgatgatggagtcaggaaagctggctgtgatgttgggtcagttggatacgattcgtggcaagggcgagaaggtcatcctgttcatgatgaccaaacgcctgcagcgtgttctgaagctgtggctcgatcagatctatggcttggatgtggccatcatcaacggtgacaccaaggctgtggccactaaggccgaagatatgactcgtaaaaagctgattgcggcttttgaggcacgatcaggcttcaatctgctgatcatgtcgccagtggccgctggggtcgggttgaccgttgtgggcgccaaccatgtggtgcatctggagcgccattggaatccggctaaagaggcgcaggcctctgaccgggtctatcggatcgggcagcagaaggatgtattcattcacctgcccgcagttacgcacccgcagttcgattcgtttgatgtgcaccttgatcgcctgttacggggcaagttgatgctcaaggatgctgtggtgacacctgaagcggtcagcgaaagcgagatgattcattccatggggctttga

SEQ ID NO: 341713 - DNA, 486 bp, Pseudomonas aeruginosa
atggcggaactgaccaaggagcggggcatgtttgagctgacgctgctgaatgcagaagtcagtcgagaacaattggatgatgtgctggtgatcgggcttaactgcggaattccgcccgagataatgacccgtctcgaaagcgtgtggggaatgaccaggacgatcgccggagaggttgtggctatcggcaaaattgtcgtggtgaagattttcgagttcttgaaggctaatcccaatctcaccatcggaatcgcgcttggtgctgcggtgggtgcgctgattgcgggtatccctttccttggggcaatgctggcgccgctttctaccgtgctttccatgacgtatggggcagcggttggcgccactattgatgcggggggaatcccatccgacccctatgtcgcggtagcccacctggccaagaagttcttcgagctgatccaggagatcttcctgtcggtcaaagactacttcctcgttggttga

SEQ ID NO: 341714 - DNA, 888 bp, Pseudomonas aeruginosa
atgacgaacgactcgtacctcgaccgcatcaaaaaggcgcgtcagattactcaagagcgcctggtggcggagttgccaagagcgaagttgctcctagaaaaaacggcggagaccacctcggcattgacaacaaaggcagcggcctcggttgctgagggttgtgccagtgcagtcgaaaaaaccaagcaatccctggaaagtgaagagattcagcaggtggggagacgcttgagggaagctggcacgaccagccaaaaagcgatcatcgaggcaaggcagaaggcgcaagcgctactgagaggaactgtattttcagaagccaaaccggatgctgacgcaccggacgaggcggcgatcaagcaggctatcgaaaaaatgcatgggcgggacaggctcgggctggcaggtgaacacctagctgcagctggaggcgcagcggctggtgtggcagctgcgggttccattgcaagtgcggcgggagctaccacgttgcttggttcaacgacactggccagcatgctgggtggcgtcttcgtcaccacgacacctgtggggtgggtgatcggctcggccgccgtgatgggcgcggccggctacggaatcgcgaagttggttcgctccggaagcgagcaggaccggctgcgcaaggcattcatcgagcggcagacccaacgcctcatggagctggagaccgtgtgtgcaccgctagatgagaaagtcgagctgagtcaactgatagccctaaccttggccgcaggtgtattggagcaagacgcagcgaggcgaatggtggacttggtcaatgccggaaagcttccgacatcgctggccttggagcgcgtgcgagcaattgccttggcgacggagttgatcgagcagaaggagtaa

SEQ ID NO: 341715 - DNA, 819 bp, Pseudomonas aeruginosa
atgagccagcaccaatccattagcgacactcgcgttgccgtattggtcgactgcgataacgtttcccctgaagttctcgaacatgcactacgagtagtagcgcaatttggtcgcgtcgttctccgccgtggctacggcaaccccgcaacgctgggaagtcgctggcaggacgcactcgtgcgccaggcgtttacgccttgcctgcagtaccaatacgccgctggtaagaacactgccgatatcgcgctagcgcttgatgcattggaagcgctattcgatcgacgggcggacaccttctgcctcgtcaccagcgactccgattttgcctacctttgtcggaagctacgcgagcgtggcgcaacggtctgtattgttggtgagcccaagacgcctgatgctttgcgcaacgcaagcgaccagttttttgagtggattcgtcctgcggcggcggattcctccactgttgcagcaggaagagctgtcaccaggtcggggacctgcgtgaagcccgagccagcaaggcaggacccgccgaagtcaccagtgaagcgcagacctcgtttcgtagtcgaggcagtatcgttacttgccagcgacaccagtgaaggaaaggtggcattgggtgcattggggcaatacctcaagcgcacggaccctgcgttttcacccaagacgtacggccactccggcttgctcgacatgatcaaaacctacgacctgctcgtgtctatacaggagccgggagggcattggtcagttgcattggctccgagggaggagcaggtcggtgaatccgtggccgacatgatgatggggtga

SEQ ID NO: 341716 - DNA, 690 bp, Pseudomonas aeruginosa
atgaacaccatgctcgtgagcccattgctaaaggtttcgccaaaaggaccggtttcgtctgagggtggtgctcggattcatttgcgtcagggcgaactggatggggcttgtggtccctactgcatgatttctgcgctgattacccttgggttgatgaatcgggacgatgttctggagaacatgcacaggtggaagggcagctcgcgaaatgggcgctttcgtgatgcgctttatgcgtttggtgtactgaatggcgaaggtacggacggtagcgacctgctatggctgacggaacattacaagagcgttggtttgcaggcctgtcatgtcgaggggacgaagaagcaagtcttcgagattgtggcgggtggcattgaaatgggagacctgccgattgtgggcgtccagtggcagggcggtggcgcccactggatgttggtggtgggctaccagggaaaggaaagtgaagatgactttcagttgactcatctgctctgcctggatccgggccaagaagctcccagggccagcctttggaatgccgtgctggaggtgttcgacggagacggggcgtcggtcaatttggggcgtatgtcgtccaatttctggggcatggatggaagaccgactaagtgtcagatcaaggatacggtgattctttccttgtcagacgggcgtaaggcatcgtga

SEQ ID NO: 341717 - DNA, 1788 bp, Pseudomonas aeruginosa
gtggcgacccaaacaatcgagcagttcttcaccggcaagacactggtgattccggcttaccagcgcgactatgcctggacaaccaccaacatcgatgacctgttcgaggacatcgaagaggcgatggagctcggcggtgggcactacctgggcaccttcattctttcgcaaacggaaaaggtggcgccggtgagtgtggtcgatggccagcagcgcctgacgaccctgaccatgctgctggacgccttggtggatgcggtagatgagcctgcaatcaaggagcattaccgcggaacatatatttttcacccggtgtacggtcccaagttcacggtgctcggtgtcaatcaggcgttcttcacagcgctgctcaatgatgagagtcccgaaccggaatccgatggtcagcaacggttgttgacggcctatcaatggattcgtcatcgggttgccgcgatcagggggcagcaggggcaggaggcggtaaggaactggctcttggcgatcagtcaccttgaggtgctggagttcacagaggccaatgaaggcaaggcaatccgcatgttccagtcggtcaatgaccgcggtgtgccgctggccaagatggatatcgccaagagcctgttgatttattactccaaccgctttctcgacggcgaactggactcgatggtttccgacagtttcggagaggctttccgctgcttcagcagactgaaaaaacttgcggctgaaccgggctaccagatccgcttgatcaaccgcgatccattccgtgaagacgatgtgctgcgttatcactatttcgcgtttgatggtgaaaagcatgatgtggtggccggcgcggattacaacgccacctcggaaaccgtactggagtccttcctcaagccggtcctgaagcgcatgcgcagtgatagggagcgcttgtcggctttcatcacggcgtacgtaagagaccttgagcacttcttcagggggctgctcgcattggcggaagccactcgtagcaaccgggagctgtatctgctgttggtggtgcaggatctggccgcaaccctgtacccgctgttggtaagcctattcaacggaaaactgctggagacgcgggttcctgagcacctgaactactcgatgttgaagctcgtcgagctgacggatttgcgggtgttcaagctgcagggcactaacccgcaagcggatatggctgcgctgatgcgcgatttcagtcggctaagtccgctgcaaatcgccgagcgactcatcaatttctgtcagcgctttatgccgagtgccagattccaagcaaaactggccaatgaggacatgttcagaaatccggggctgccgcgcatcttgcttgaggctgaaggcgctgctcgggaggcggctggtgagtctcggctggagatcgacgatctggtgaagctcaacaccgatggtttgactattgagcatgtcctgccccaagaggcttcttttggtgtgcgcctgtacggcttccacagtgcggagtcctatctggagcatatccatctgcttggcaatctggcgccattggagaagcgcatcaacagcgcttgtggcaactgttcggccgagagaaaaacgagtgagtccaagctttacaggagctctcagttcaatctgatccagaacttggccgctgggagtgccaacgtcagcccggcctttaccaaggatgctctgcttaagcgcagtgccgagctggcgcggttctcggtgacgaggtggccgttgtttgaaactgatctgatcgagtcgtaa

SEQ ID NO: 341718 - DNA, 6333 bp, Pseudomonas aeruginosa
atgcagccactgattgtttcccagcaggtcacccaaggcgtcgcagactttctgcgcactgcatttccctccaccacgcccggattcgagggcctgctggagcgcttcctggctgagcgcagcaatattttcaaggggccgtatctgacggttccgcttccgtttcgcaagcatcagggcggtagcgcgccggtttattcctggttgccgacgggctttgtgccacacgctcaccaggccaaggcgtttactcggctctcaggtgagtctgcccagtccacgctggtggccactggcacgggctcgggcaagaccgagtgctttttgcttccaattctggagcattgccggcaggcgcgtgccgaagggcgtcccggcattaaggcgattatcctgtacccgatgaacgccctggccagtgaccaggccaaccgggtggccaaggagatcgtcaagaccgccgccctgtcaggggtacgggccggtttgtatgttggcgatgcgccggctgttgagtcgcaaacggtgactcagctggaagatggcagctattcggtcatcactgatcgtgatgcgttgcgtgccaatccaccggacattctgctgaccaactacaagatgctggatttcctgctgatccgtgcggcagatacaccgctgtgggctcagcagcagccggatactctgcgctacctggtggtagacgagttgcacacgttcgacggtgctcaggggaccgatctggcctgtctgattcgccgtctcaaggggcgcctcaatgcgccgccggggcagctggtgtgcgtgggtacatcggcaaccctgggtgacgatggtgccgatgacttgctggcgttcgcgggcgatattttcggggaggtcttggatgccgctgcggtgatcgctgaggaccgcgagtcggtgggagactacctggccgaagcgctggtggagtttacccagtgtccgcagcctgctgatctggcggttttggcgcctgagcagtatggcgacttgcacgcttacctggccgcacaagtacctctatggtttggtcagccatgttccgccgagcaggtgtccgacgtcgcctggcgctgttcgttgggcgagcgcttgaagtgccatttcgccttccagaatcttttgcgggatctggagcggttagggccaaagtctgtcctgcttgaggacttgctgtccctgctgcatcgacgccttcccgcctgcgacgacgagcgttttgccttgctgtggttgtctagtttgctatcgctggttgcccatgcacgtaagcccggacatcaggacttcttcttacaggtgaaggtcgagatttggctgcgtgagctgcgccgcatggtagctgtgctagatgaggagccgcagctacgtcaccacgatgacctacgcaaggcagatctgacgcgcttacatctgccggtaattcattgccgagagtgccatgccacggggtggggcgcgacggtacaaaagaccagccctaatcagctggggcatgaccttcaagggttttacagtgcgttctttgccgaggatgtttcgacgcgcttcgtattcccggccaccgaggacgtggacctaaaagtcttcgagcacaaacgggtgtgcccaagctgcggcactttacacccaccctcgcaaaccgaatgttcgcagtgtgaggatcagcctttggtggctgtgcatgttgccaacaacctgcgcgaggcgacccgcaatggcgcgaagttcatcaaggcccatcacgattgcccctattgcgccgggtacaagactctgacgattgtcggctctcaggcggccagtttggcggcggtgatggtagggcagttgtttgccacccgcttcaatgctgacaagaagctgattgccttctccgactccgttcaggatgccgcgcaccgggcggggttcctggccgcgcggacctggcgtttgaatctgcgtccggctatggcccaggtgatcgcagaagcctgcgcgcacggaaatgccctgactctggccgagttgcccgcggcgttcgatcagcattggcgcggcaagttgggtgacgaactgtacgttgccaacttccttccgccgcagatgcagtggctacgtgactatgaaacgctaatgtcggaggggcagctaccgccaggcagcaatctactgcaagaactggccaaactgctgccttggatcatcaaggcagaattcggccaggatgcctacatcggtcgaacgctggtggctactgccacggcgagcgtggtgccttacagaggggggctgaatgaggcgacacaatggatgttgccgaggttgcgcgacaccctggagccgctggctgctacttcattcgatgaattgatcatattcctgcgcggcttgatcgaggccatgcagcgagtgggtgcctggcgtgatgctgaattggatttttatgcccggatgggcagcagcccctgggcgtacaaaaagaatccgagccaattcaagctgctgtcggggccgcggccacctcgtttcattaccttgaccgaatttcagcgttgcgcggcggttaatggcagtcacgcggctttgttccgctcctgggctttccgcgctttgcccgcgctgcgtgatttggcactgggtgccgatcagctgcttcagccgatctatcgcctggcgttcgaggcactcgggcatgtcggattggcaaggtatgaggacgctgacggtaaggctgatgtccgggtttgggctcttgagcctgccggcttccatgtcttggtgggcgggcgtggctggcgctgtgactcctgtcgtaccaccctcatgtccggtccggaggaagatctggccggtgagccctgccgacgcaaggagtgttggggccatctgcaagacgcgacggccaacggcgactactaccgcaagttgtatctgcatgcggatattcggcgggtggtggcccacgaacacactggcttgctaccccgagaaacccgcgaggcggtggagcggaacttcaagtcgaaggtagaaaggcccggcagcatcaacgtgctgtctgcgactccgacgctcgaaatgggtatcgacatcggtgacctgtcgagcgtgctgcagtgctcggtgcctccgcagcaggccaactatatccagcgtgcggggcgtgcaggtcgaagtacgggtaatgcgttgctgatgagcctggctaccagcaagccgcatgatctgtacttctgggaagatcccaagtccatgatcgccggctcggtccaggcgcccggggtctttctcaatgcctccgcggtcctggagcggcagctcacggccttcactctggattgctgggtgcatcagagtgggcgcagtgctcagattccggcggaaatccgagctgtgttcagcgcggtggtcaaccagagcacgacgcgattcccttacccctggctgagctatgtagagcagaactgtgcgctcctgcttgagcgctttttgaaactgttcaatcaaggcgcgtacacgcccctaagtgagggtacccaagcctggctcgagcggtttattcagggggacggagagcagggcagtcccctggcctacaagatcgtcaatcgactgcagggtattgcttcggatgtcgagagcatcaagcgcaagcgagatgccacggtcaaggaaatcgagaagctgcaggcattgcctgttcgcggtgaggagcaggaggacgagcttacgaggctggtccaggatcgcactgcgctctcgcgtctgatcggtagtatcgaaggtaaggccaccctgaatgtgctgaccgatgaagggttgctgccgaactacgcctttcctgaacagggcgttttactgcgctcgatcatcgttcgtgatccgaaaccgggtacttcagcaccagattcggaaacctttgagtacgaacgaccgggctcgacagcaatcaccgagttggcgccaaacaacaccttctatgctgaagggcgccgggttgtggtcaaccaggtggatgtatcgaaggtcaagccggagcactggcgtttctgtcgccagtgctcctacaccgagccactggcttcgggtgacccgcatccgaactgtccgcgctgtggagacgggttatggaaagacagtggacgagtgcacgaaatgctgcgcctgaccactgtatttgctcgtacgcttgatcgagacagtcgtattgccgatgactcggacgagcgccagcgcggcttctatgtccgccaggcattggtcgatagccctcctgatgccgtgcgccaggcctttgcgattgacgagcagacattccccttcggctttgaattcttggaccgagtgaccttccgggaagtgaactttggtgagcagtcggagcagggcgctccaatggaaatcgggggtaaggaactgaatcgccccggcttcagcatctgtagcgaatgcggcactttgcagcgtaagcggaaagcggaggagctctaccgcaaccatgcaacctggtgttccaggcgcaagagtcccgaggcgaatacgcagcaatgcgtgtttctctatcgtgagttcaccagtgagggcatcaggcttttcctgcctgaagttggtttcgccgataccaatgaggccttgctgagctttgtcgctgcattggagttggggctggccaaacgcttccgaggtgcggtggatcatctacgcattgccttggatatgcgcatggccgctgggtcggatattccgcgctgctatctggttatctatgacagcgtgccgggtggtactggctatctgaaggaactgatgcgcgcaccggagccattgctggaggttttcggcattgctctgcaggcgctgaatagctgcacctgcaatcagaatgctgaaaccgatggctgttatcgctgtgtctaccgataccacaacagccatgatcgggagtcgatttcacgtagcactgcgcagaagttgctgggagaggtggtacagcacaagggcgcgctcaagccggtaacccatctggctgatgtgcagccagtcaaccatcttatggacagcatgctcgagaagcgctttgtcgaagcgctgcgccgtgagcattccggtctcaagttcaagctcagcgagctgttgttcaagggcaaggctggctatcagcttcaggccggtgctcgtcgttggaagattgaactgcaggtgagtctgggccatggcgatggggttgtgattccgtgcaagccggacttcgtattttggccggacgatagggcggatgatctgccgattgctgtctttgtggatggctggcaataccacaaagaaatcatctcgaccgatctggccaagcgaatggcagtcgccaagagcggcaaattctcggtttggacactgacgtgggatgacatcgagtgcgccttgcagggcaagtctttgtccgttgccgcaccttggcccaccctggtgccggtcgcggcagctccgatggtgcagaaactgtgcgatgcgcagggggtgtctgccctgggaacactgacggcaatttcgcccttcatgcagctccatcagcgcttggcgggggggagtcatgatgatctgcgcaagctctcagttgcgctttcggtgggtatgctcatgccgccgggtgagccctccgtgctggataagctgaaggggggggcgttctggaaacgcttggacgatctagggttgattgtcgacctcaacgggcatcgtcaaggtgcccgtcagttgggagccactctgggtgtgatcgcttccatgcatccagaccaactcaaacaggtcatgacggggaatggttcaattgagtctgagcctgttgtaatcggtgagtggcaggacacgggagcgcccgaggaagagctgaagcagcgctggcagcagctatggcaagtaatgaatctgttgctgcctttgcgccatttgtggctgggaactgccgacatgccaggacttcctgcgctgcaagatggcccggtgctaaagaccggcttgggcggcgtttccgaggcttggcaggaagcaatggagatcgccgctcaagaggtgcaggtgtggtgtttggtgctggctaaggcaggagttgccgagccggagcccggctatgagcttctggacggcaagggccgagttgtcgctgaagcggagatcgcctggccatcagtccaggtcgccatcttcctgccagacaccctggaggcagcgactgtgtttgcatctcagggctggcactgttttgcagctgaatcgggtgagttaccccaagagctgaggagtttattgatggagacactggcatga

SEQ ID NO: 341719 - DNA, 606 bp, Pseudomonas aeruginosa
atggacaaaaccctggaaaccatcctgtgctcacggtaccccaagcttctccctgcgcaggggcacggatgccttcagttattcggcttcgagtgccaggacggctggttcgcactgatctacgccgcctgcgaactgatacaacggcacactgacaacagcgactcagcgcaagtcgtcgctgtgcaggtgaaggagaagtttggtgggctgcgcttctactaccgcggtggtgatgactatgtggcggtcgtgattgacctgctggaacggctgtcggaatccatctgcgaactatgcggagccccagggcgcatccacgagcgcaatggctggctcagtgctcgttgccaggtccatgaggaagaaactggaacgccatcgcgggaaacgagcgaatggatcagtcagggggattcgatggcagcaatgctggaggccgcactcagactcttcgcctccaacgcaaccgaaacatcgcgctggttgacatcgcctgcaagagcccttggcatgaaagccccgctcgagcatctgcaagagcacaacgaccatcgtgatgtaatgaacctgattggacagatcgaatatggggtagtcccctag

SEQ ID NO: 341720 - DNA, 351 bp, Pseudomonas aeruginosa
atgagcgtggtattgattgcgctagcaaagacctttgttgaaggccggcgaagcagcgaggagtttgcggagcagtattttgatatctggcggcaagagcgcaattccggtaagtcgcgagaggatgacgatgtgcttgctgagtgtgtcagtgatctgttttgcctcgcggactgcttcaaagccgccccaaagctcaacgacttcgatctgaacgaaatcgagctacggcagaaggtcgaggaaacgctgagaaaatacggattcatccaactcagccgaaagcatgacgtccgcttctggccgatttctgcctgttgccaacggcagcaatgggtagatgtcttctga

SEQ ID NO: 341721 - DNA, 1245 bp, Pseudomonas aeruginosa
atgcacaacaacgacaagaagtggaatgcgcgctacgaatatgcggctgtcgccatgctcgccctgggcttcggcctggtcggtctggaccgcttcatcatcctaccgctgttcccggtgatgatgagtgagctgcacctggactaccaggacctgggcaatatctcggcgatccttgcgatcgcctgggggatttcctcgatcttcatggggcgcctgtctgatcgtatcgggcgacgcaaggtgctgatcccggcagtgctgctgttctccctgctggccggcctgtccgggctggccaacggcgtcgccgcgctgctgctgatccgtgctgtgatgggcgtttccgagggcgctttcacgccgacggccatcgccgccacggcggagtcctcgcacccctcacggcgcggcttgaacattggcatccagcaggccttcttcccgatcctcggcctgggccttgcaccgattctggcgacccagttgctgctggtgctgccatcctggcgctgggtgttcgcggtggtctcgctgcctggcttcctgctcgcctggttcatgtaccgcaacctacgcgagacgcgtgtgccgagcgcctctgcggcatcggaggagaagggccagtggctcgatgcgctgtgctaccgcaacgtgccgctgaacatcctcggcatgttctgcatgctcaccagcctgttcgtgctcagtgtgatgatgcccaactacctcaccgactacctgcacctggaactgcagcagatgggctttgttatgtccgccatcgggctgggcggcttcatcggccagttggtgctgccggggctgtccgaccggctgggacgcaagccggtggtgctgggcagcttcgttgccaccggcacctgcatctggctgctgatgcataccggggccgagccgctgacgctgttcgtgctgctgtttttcaccaccttcttcaacttcagcatgatctgcatgaccgtcggcccgctcaccggcgagtccgtgccgctgcccctggtgtccaccgcgaccggcttagtggtggggatcggtgaggtgttcggcggtggggtggcgccggcgctggctggctacatcgcccagcaccagggcatccagtacaccctctatctcgccttgggtggtgtggcgctggggttgctggtcgcctgtctgctgcgagagacggcgccgctgcgcagcaaggtgacgaccgggcagagcggtgaaaccgcctga

SEQ ID NO: 341722 - DNA, 1353 bp, Pseudomonas aeruginosa
atgcacaacatcaaggtgaaaacgcttggtgcggttctggccgccctggcgattgtggaatgcaatgcagccgaggctccggcgccgggagagggtagcctgttcaagaggctcttcggcgacagcctggagcgcgattacggcattaccgtttccggtctgttcgacaccgcctatgtgcgcaacaaccgctctacccacgatgagcgcagcgatggactgagcaacctgccgcttaccggcatgtccgacgagggactggagtggggtggtctgcacctgttcgtcgacaaggcgctcaagggcaccttcgtccctcgcgtcacgccgttgccgggccccaagccggaagacttcgccttcggtttcaccttcgaggccaactacggacgtaatgcccagttcgcccgcacctatggctgggatatgcactggaacatgaacgaagaggacaacctccgggcgcagaaggacaaggatcgcttcctcgccgtccccaacatcgccgccaccgcgtacgtgccctacgggccgggcttcaacttcatggccggcgtgttcggccccgcgctgggctacgagattccgccgaatatccggcaggcgcgcaaccccttcgcgagcaagacctacgccttcgtcagcgagcccgggacggtttccggcgtgctgggaggcgtgcgtctgctcgatggcgagcccggcatcctcggcttggaactgggtgtagtgcagggctggaacaacctgcgcgacaacaacgacggcaagtcggtaatgggtgcgctgcgctggcgcacgacggacatgaacacctgggtcgactacgaattcatcgtcggtgatgagcagaacgacagcgcctctgacgtgcaggcaccgccggcgcgactgatcgccgacagtggccagctcaagcaacagcactcgctcaatggctggcacaagttcgacgagcactggtcgataggcgccgaggtggtctatggccaccaggccggcgacggcaaggccagtaccgtggatgtgctcaccggccccggtttcgacggtgcgcactggtggggcgccaacgcggtgctgacctaccagtaccgcccggacctgtccttctccctgcgtggcgagcatttcagtgatcccgatggcttcatcctgttccccaccagcaccgcccgcggcgacttcaatgccctcaccaccggcctgcgctgggacgtgacgggcaacctctcgctgcgcccggagctgcgttacgactggttcgacggccgcgaccacggcagcccctacggcaacggccgtgatcgtacgcaactcaccaccatggtcgaagcgctcctctacttctga

SEQ ID NO: 341723 - DNA, 1632 bp, Pseudomonas aeruginosa
atgaacgaaaacaagatccatgacgtggccatcgttggctacggccccgtcggccagaccctcgccatcctcctgggcaacctgggctacagcgttgccgtgtacgagcgctggcagtccctctatccgctgccgcgcgcagtgttccacgatcacgagattcgtcgtgtgttccgcatgatgggcctggaggaagaactgcaggagatttcccagccttccgcctgctaccagtggttcaacgccgactggaaggtgctggtggagatcgactggtcggccgaatccatcagcgacgggccgttcggctacctgttcaaccagcccggactggaggccatcctcgaccgtcgggccaaggccatcggcaacgtcgaggtgcaccagggctgggaaatgctcgggctgagccaggacgagcagggctgcgagctgcgcctgcagcgtacccagcgcggtgagcagacatcggcggacagcgaacgcaccgtgcgcgcccgctatgtgatcggcgcggacggcgccaacagcgcagtccgccgcgagtgcggcatcgactggcaggacctcggcttccaggaagactggctggtggtcgacctgcagcccaggaccggcgtcgaactggacgtgccggacatcggccagtggtgcaacccggtgcggcccaccaccatggtgcccggtggccccggctaccggcgctgggagttcatgcgcctgccccacgagacgctggatgacctgcagagtaccgacaaagtctgggagctgctgtcgccctgggtgacgccggacaccgcgaccctggttcgccacgccgtctaccagttccgctcgcgcatcgcgcaaacctggcgccacggccgcgtgctgttggccggagacgccgcgcacctgatgccgccgttcatggggcagggcatgtgctcgggtattcgcgatgcctggaacctctcctggcgcctggacctgatcttcaagggcatctgttccgagacgctgctcgacagctacaccctggagcgcaagccacagattcgtgcggtgatcgatgcctcggtggagatgggcaaggtggtctgcgtagccgatccgcagaaggctgccgagcgtgacgcggctttcctgtccggccaggtgccgccgctgccgccgttcccaggcctagtggatggcgtggtgcacaaggacgaacgcaacggccgagccctgggtccggccggctgcctcggcgtacacggcgagatcgagtacgaaggacgccgccagcgctacgacgacgccttcggtcgtggcttccacctgctgagcatcggcgacgatccgctgttctcattgagcagcgcacacaaggcgctgctggaacggttgcaggtgacggtcgtgcgcctgagccaggacggcgcccccggaacctgccgcgacctgtcgggcaagtaccaccagttcctccgtgctgcgggcctgcaggcagtgctggttcgccccgacttctatgtctacggcggcatcacccatgccggcgaactgccccagttgctcgatgccctgaaccgcgacctcgacctgccgtccgctcggggcggagcagtgcaggagggacgtcgtcccctcgccgcgcagctgtag

SEQ ID NO: 341724 - DNA, 921 bp, Pseudomonas aeruginosa
atggctatcaccccgcgtggtgtgcattcgatcgatcattacgcgctcttcgtcccttcgctggacgacgcgcgccgcttcttcgcgagcttcggcctggatgtcagcgacacccccggcggtctcgaactgcgggctgccgacggccactgctgggcgcgagtactgccagggcagggcaagagccttgcctacctgagcttcaactgctttgccgaggactattcggcgctgcgccaacaggtcgaggccagcggcgctcgtttcgaggaacacgacggcgaaggcttctggttccgcgaccccgacgacaatctgctgcaggtgaaggttggccccaaacgcatgcccgaccacaagcctgcagtagcgcctgccagggctgcggtgcggggtgtcggcacgcgtgacgcggttccacaggtgcggccgcggcgattgtcccatgtgctgctgttcagccccgacgtattccgtgctgtcgagttcttcgaacaggccttggggctgcgcttgtcggaccattcccaggacatcatcgcgttcacccacgctccgcacggctgcgaccaccacctggtggccttctgcaagagcgctgcgaaggggttccaccacgcagcctgggaggtcgacagcgtcgacgacgtcggcaacggcgccgagcaaatggccaacgcgggatttcgcgagggctggggcaccggccggcattgcctgggctccaactacttccactatgtccgcgacccctggggttcgttctgcgaatactcggcggacatggatttcatcgaggccggtagccagtggccggcgggcgacttcccacccgagaactcgctgtacctctggggccccagcgtccccgagtatttcgtcctcaacaccgaggccgacagcgcgccggccaaaagctag

SEQ ID NO: 341725 - DNA, 834 bp, Pseudomonas aeruginosa
atgcgttatgtccgcttctctcatcaaggccgcccggtgctgggcgttcgtactgccgaaggcgtcagggttctcggcgaggtaaccctggagtcgctgctggaacgcggcgaggacctggccgtattcggcgccgatgcgcagggcccgctagtggagatcggcgagcaggattatctgccgctgatgaagacgcccggcaagatcatctgcgtcggcctgaactatgccgaccacaccaaggaatcgccctacgcccaaccggactacccgaccctgttcccgcgcttcaacagcagcctcatcgcccacaacaaacccctggtgcgcccgcgcatttcggacaccctggattacgagggcgaaatggccgtggtgctcaagagcggtggccggcacatccccaaggaccaggcgctgcagcatgtcgccgggtatgcgctgttcaacgaaggctcggtgcgcgagtaccagttcaagtcgccgcagtggacggtgggcaagaacttcgatgacaccggcgcgttcggcccggacctggtgaccgccgacgaactgcccgccggcggcaagggcctgctgctgcagacccgcgtcaacggcaaggtggtgcaatcggccaacaccgaggacatgctgttcgacgtggctaccatcatctcgaccctgagcgaggcggtgacgctggaggcgggggatgtgatcgtcagcggcaccccggccggcgtcggtttcggcatggatccgaaggtctatctgaaggccggcgacgtggtggaagtgtccatcgaaggcatcggcaccctggtcaatccggttgtggacgaagcctga

SEQ ID NO: 341726 - DNA, 705 bp, Pseudomonas aeruginosa
atgaaccaagccgaacgctggtcgcagcagcccgaggcgccggaaaagcgcaccatggcttcgcagctggagtccagagtccgtgaagacatcatcaacggtcgcctggcgccgggcagccgcctgcgcctgaaggagctagccgagcattacgacgccggtgtcatcccgttgcgtgaggccttgtcccgtctggccgccagcggcttcgtcagctccgaggaccagaagggcttcagcgtcggccgcatctccgccgaggagatccgcgacatcaccgctacccgccagctcatcgagtgccaggcgctggcagaatccatccgcaacggcgatctggaatgggaaagccgcttgatcgccgcgcaccaccgcctggaccgcctgcccatcgtcgaaggtccggaacggctgatgaagccggactgggaacaggctcacgagacgttccatcaggtactcatcgccaactgccgttcgccctggctgttgcgcctgtcgcacctgctgcgcgaccagaccgcgcgctatcgcatgctctcggtgcactacaacgacaacggtgcccgcgacgttccaggcgaacaccgcgctctgctcgatgctgcgctggctcgggacgtcgacaaggcctgcgcgctgttggccgagcactacgagaccactacccgcagtgtgctcgcccatgaggccctgaagggctga

SEQ ID NO: 341727 - DNA, 915 bp, Pseudomonas aeruginosa; identical to SEQ ID NO: 322466

SEQ ID NO: 341728 - DNA, 2379 bp, Pseudomonas aeruginosa
atgcagaaacgacagcaagaccaaagccagatcaagtgggtcgccgatttcatctggaatatcgctgacgaccgtctgcgcgacgtctacgttcgtggcaagtaccgcgatgtgatcctgccctttaccgtgctacggcggatcgatgcagtgctggaaccgaccaaacaggcagtcttggaacgcaagaagctgctggacagcgccaaagtggcgaatcagaacggcgcgctccaggccgctgccggacaagccttctacaacgtttccgagttcaccttggccaagctcaaggccagtgctgccgggcagcggctgcgcgaggacttcatcgcttatctggacggtttctcgcccaacgtgcaggaagttctcaccaagttcaatttccgcaaccagatccagaagctggtggatgcccatatcctcggctacctgatcgaagacttcctcgatcccgaggtcaatctctcgccgctgccggtcaaggatgccgacgggcgcaccaagctgcccgcgctcgacaaccatggcatgggtacggtgttcgaggagttgatccgccgcttcaacgaagagaacaacgaagaggccggtgagcacttcaccccgcgcgacgtcgttcaactcatggccaagctgctgttcctaccagtggccgaccggatcgagtccagcacctattcgctgtacgacggctcttgtggcacgggcggcatgctcacagtggccgaggaagccttgaaggaactggctgagcagcacggcaaggacgtctccatccatctgttcgggcaggaaatcagtgatgaaacctacgccatctgcaaggccgacctactgctgaaaggcgaaggggcggaagcggagaacatcgtcggcggggcggataaatccacgctatccgccgatcagttccgttcgcgcgaattcgacttcatgatttccaatccgccctacggcaagagttggaagaccgatctggagcgcatgggcggcaagaaggagttcagcgacccgcgctttatcgtcaatcacggcggcgatgccgagttcaagctcatcactcgctccagcgacgggcagctcatgttccaggtgaacaagctgtccaagatgaaacatgacaccgcgctcggcagccgcatcgccctcgtccacaacggctcggcgctattcactggcgacgctggccaaggcgaaagcaatatccgccgctgggtactggagaacgactggctggaagccatcatcgccctgccgctcaacattttctacaacactgggatcgccacctatatatgggtgctggccaacaaaaaagctgagcatcgcaagggcagggtgcagttgatcgacgcgagccagtggttcgcgccactgcgccgcaatcttggcaagaagaactgtgagctggcagagggcgacatccggcgcattctcgacctgtatttgggcgaagcgcaggaaaccgactccagcaccgatcaaagcaaatggttcgacacgcaggacttcggctactggaagatcacggtcgaacgcccactgcgcctgaagagccagttgaaaaccagcgccattgataccctgcgtttcgccagtggcgacgaggagttgcgcaccgagatctacgccgagcatggtgacaagctctacaccagctttgccaaactgaagcccgaaatcgaagcttggctcaagggtggcagcgaggacgatgatgatgccgaggacggcgacgaagaaggcacacacgcgaagaaagccgtgccagaaaagcgtcgcaagaggctgctcgatgccacgacctggcaacgcgacaaggggctgctcgatctggcgctgctggcgcagaaggttttgggtgacgccgtattcgatgaccacaatgtctttcgggcggaattcgatatagcgatgaaggcacatgacaaaaagctcactgcggcagacaaaaaagccatcttcaaggcggtgagctggcgtgacgacaccgcgccgccagtggtggccaagcggcacaagctgaaagccagcgacgccttcattccgagtttcgatggccgctacttcatcgaaacgggcaagcaccgcgaagtcgtctggtatgaaccggatgccgatctgcgcgacaccgagcaagtgccgttgaaggaacttggtggcatcgacgccttcttcgagcgcgaagtgctgccgcacgcgccggatgcgtggatcgacggcgagaagacccagatcggctacgaaatctccttcgcccgctacttctataagccgacgccgctgcgtccgctggacgacatccgcgccgatatcctgaagctggagcagcagacggaaggtttgttgcacaagatcgtggggacagcttga

SEQ ID NO: 341729 - DNA, 1374 bp, Pseudomonas aeruginosa
atgacagccacgagcagatatcccagctaccgtgtatccggcctcccttgggtcccgcaggtacccgaaggttggcaggtgctgcgtaatggacggttgtttggccatcgcgtggaaaccggctttcctgatctgcctattctggaagtgtcgctgcgcaccggtgtgcgggtgcgcgatatggacaacctgaagcgcaagcaggtcatgagccagaaggagaagtacaagcgtgccgtcaagggtgacattgcctacaacatgatgcgcatgtggcagggcgcggtcggccccgtgccggaggatggcttggtcagccctgcttatgtcgtagtcaagccctatgcagaagccaacagcacctatttcagctacttgttccgcactgcggcttacatgcaagaggtgaacaagttctctcgtggcatcgtggctgaccgcaaccgtctgtattgggaatccttcaagcagatgccatcgctggttccgccgcgccctgagcaagaccagatcgtcacctacctgcgtacgcaggacgcgcatatcgcctgcttcatcagggccaagcgcgatctcattgcgctgctgaccgaacagaagctgcgcatcatcgaccacgccgtcacgcgtgggctagatgcgtcggtcaagctcaaaccttccgatatcgagtggctaggcgaggtgccagcacattgggaagtgaagcgtctgaagttccttgccggcaacatcaccagccagaccacgacgaaggcggatgacgaaatttatctcgcattggagcacgtccaaagctggacgggtgtggcgcgaccgctcggcggcgaagtcgaatttgcgagcacggtgaagcggtttgttgcagacgatgtactgttcggcaagctccgtccgtacttggcgaaggtaacgcgagtggtttgtgctggtgtatgcgtaagtgagtttctcgtactacgttctcgccaagaactcatcttgcccgcatatcttgaacaactactgcgctgcaagcgtgtcattgacctaatcagcagttcgacggcgggtgcgaagatgccacgcgccgattggaacttcatcggcaatgttcggcttccgattcctcgcaaagatgaacaggaagcgatcctgtcgcacatagggcgcgagacgaaagacttggacgaaaccatcgcccgcgccgaggacgagatcaagctcatccgcgaataccgcgaccgcctgatcgccgatgccgtcaccggtcaagtagacctgcgcggctggcagcccggcccggacgatgtggtgagcgacgacgaccttgccgcgttgggagatgatgacgcaggtagtagcgatgacgaggaagccgatgctgaagactga

SEQ ID NO: 341730 - DNA, 282 bp, Pseudomonas aeruginosa
atgaaaaaggccgatacaacgacgcaaaccgcgctggtgcgctcctcagcggcggaatacctgacgttcattgcggccaccgggcagggcggcgtggaggccgtgtacgccgacgaaaacgtctggctgacgcaaaaaatgatggctcagctctacgacgtggatgtgcgcaccgtcaactaccacctgaagaaagtgttttccgacagcgagttgcaggcggaagctacgacacccagcactacaacctcgcggccatcatcgccgtgggctacaaggtga

SEQ ID NO: 341731 - DNA, 528 bp, Pseudomonas aeruginosa
gtgacggcgcaagccaccaaacgcttcttcgccacggtgcagaacaagctgcacagggccatccacgggcagacggcagcagaagtcgtccatacccgcgccgacgccaacaagcagcatatgggactgaccacgtggacggatgcgtcattaggaaaaatccagaagttcgatgtggcggtcgccaagaactatttgaccgaagacgaaatggcgcaactttcccggctggtgaacgcgtatctggatgtggctgaaagcatggcgctgcgcaagatccccatgaccatgcaggattgggaaacgcgcctgaaccgcttcatcgaagcgactgaccgcgaggtgctgcaggacgcgggccgagtcaccgccgaaatcgccagggcgcacgccgaaagcgaattcgagaaataccgcatcgtgcaggacaggctgttcgaaagcgatttcgatcgtctgctcaagcagatcgaaccgccgcaccaactcgacaataagccgggcaagaagaagggagacgacgcatga

SEQ ID NO: 341732 - DNA, 3441 bp, Pseudomonas aeruginosa
atgaaacccaccgataccagcgagaaggcactggagcaattgatcgtgcgccacctggcgggtatcagcgagcatgcttccgttcctccaaatgccgtacagagtccgggggccatctatgcactgggcggctacgtactgggccgagcgacggatttcaaccgcgatgtggcgctggataccgtgcaactgctggcctttctgcaagccacgcagcctgatgcggtggaaacgctggagttggcgcacgagggcatcaagcgcacacagttcctgcatcgcctgcaaggcgagatcaccaagcgcggtgtggtggatgtgctgcgcaagggcgtaagccatgggccggtgagggtcgatctctacaggctgctgcccacgccgggcaacaccaacgccgccgaggcctttggccggaacatcttcagcatcacccggcaggtacgctacagtcacgactccggcaacgaactcgacctggtgatcttcgtcaacggcctgccggtgctgaccttcgagttgaagaactcgctgaccaagcagaccgtggccgatgccatcgtccagtaccagagcacacgcagcccgcaggagctgctgttccagccggggcgctgcatcgcgcacttcgcggtagacgatgccgaggtgtatttctgcacggagctgaagggcaaggcgtcgtggttcctgccattcaaccagggctggaacaacggtgcgggcaacccgcccaaccccaacggcttgaagaccgattacctgtggaagcaggtgctggccaaggaatcgctggccaacatcatcgaaagcttcgcgcaggtggtggaggagcaggaaaccgacgccaccacagggcggaagaagaaaaagcgcaagccggtgtttccccgcttccaccagttgcgcaccgtgcgcgccctgctgcgccgcactcgcagcgacggtgtgggcaagcgttacctgatccagcactcggcaggtagcggcaagagcaacaccattgcttggctggcgcaccagttggtggagttgcgcagcgtagccgaccctttgatgccgcagttcgattccatcatcgtcatcaccgaccggcgtgcgctggatacgcagatcgcgcgcaccatcaagggctacgaccatgtggcttcgattttcggccattccgacaacgcgcaggaactgcgcgactacctgcgccggggccggaagatcatcgtgaccacggtgcagaagtttcccttcatcctcgaagaaatcggcgacctgtcgggcaggacgttcgcgctattgatcgacgaggcgcactccagccagggcggcaagaccacggccaggatgcatgaagccctttccggcaagaccgacgaggaggctttcgaggaagacgcgacgcaggacgcggtgaacaccgagatcgagaagcgcattcagtcgcgtcggatgctgtccaacgccagctacttcgccttcaccgccacgcccaagaacaggacactggaactgttcggcgagaagaccgtggtggacgacaaggtggaattccgctcgccagaggaactgacctacaccaccaaacaggcgatacaggagggtttcatcctcgacgtgattgcccactacaccacgctggacagtttctaccaggtcgccaagacggtggagaacgatccggacttcgacaaggccagggccttgaaaaagatccgccactacgtcgaatcccacgacaaggccatccggcgcaaggcggagatcatggttgatcacttcgtcgcacaggtgatgggcgccaagaagatcggtggcaaggcgcgggcaatgatcgtctgcaatggcattgcacgggccatcgactactggcgcgaggtgtcggattatctcgaacagatcaagagcccgtacaaagccatcgtcgcgtactcgggcgagttcgagattggcggcgaaaagaagaccgaggccgacctcaacgatttcccgagcaaggagattccggacaggctcaggcaagacccgtatcgctttctgatcgtcgccaacaaattcgtcaccggcttcgatgagccgctgctgcatacgatgtatgtggacaagaagctggcgggcgtacaggcggtgcagacgctatcgcgcctgaaccgagcgcacccgcaaaagcatgacaccttcgtgctggacttcgccgacaacgccgaagctgtgaagaaggcgttccaggactactaccgcgctacgatccagaccggtgaaaccgatgccaacaagctgcatgacctgaaagccgatctggatgacaagcagatctacagctggccgcaggtagaggacttggtggcgctgtatctcagtggtgccgaccgcgacaaactcgatcccatcctcgatcactgcgtcgagcaataccaagccaatctggacgaggacaaccaggtcgagttcaagggcaaggccaaagcctttgtacgcagctacggcttcctcgccgcgatcctgagctacggccatccggcatgggagaagttgtcgatcttcctgaatttcctgatcccgaagctgcccgcgccgaaggaagaggatctgtcgaagggtgtactcgaatccatcgacatcgacagttaccgtgttgaagcacgggctgcactcaagatggcgatggacgataccgacgccacagtcgaagtggctccggtcggtggcggtggcggcaagggcgagccggatatcgacaagctgtcgaacatcctcaaaaccttcaacgatcttttcggcaacatcgactggaaggatgccgacaaaatcggcaaggtcatcgccgaggaaattccggtgcgcgtggcgcaggacaaagcgtatcagaacgcgcaggtcaactccgaccgccagaacgccaagttggagcacgacaaggcactcaaccgggttgtgctggagctgctgtccgaccacacagaattgttcaagcagttcagcgacaacccgaatttcaaacgctggctgacggacatggtgttcgatgtgacgtaccagcagaaccctgcccatggggtagaggatgtccgtatgcgtgcgttggacattgttcgagacagattcgatgctgcggtggtctggtcacaagccgtggatatgctactggatagattggcagcgggaggaaggaacagtctgggtattgccgatctcgccctcatcgaagaaaccagcgggttgtcggtaagccatgttctgtttcccgttctgaatctgttatcggcccacgatgtcggaatcctgaatcgagagtttgtccgtgtaggcagcacggatactccacagacgatgagtttcgacgaagtgcgcttattggcgcagaaagatccggagggcgacgactgggccgaatgcctgtcgattcgttgggcgcttcaagatgcacagaggattgcgcatgggcgatag

SEQ ID NO: 341733 - DNA, 606 bp, Pseudomonas aeruginosa
atgcacagaggattgcgcatgggcgatagtctgaaaacactgttgggctggtttccagtgctgcgaaaattattccaagccagaacggcggaggagttcgacgattttcttgaccgtcatttcgaggattgtgttcagcgcatggaagcggaagcccatcacttaactgctgacagcgaagaaaagctatccgcgttcctagcggcagctttgaggatgccgggccttgctgtgacgcgtgagggatacagcaatgggcgggtcgatctaacgatcagggctgagagcatgatgtttccagagcagcggctggctgaggcgaagatctatgcaggacccacgtatcacgcgcaggcgatcgaacagttggtttcccgctactccactgggcggcaaggccgtggctatgtcgtcgagtacttcaagaagcctggcattgctgaactagtgctcagactgcgtaaaaaggcagatgccgatcttcccgcgtatcaacatggagcgacattcgatcacccgatgaaatgggcttatgtcagcgatcacaggcatgtgagcgcagagctgatccatgtcgtgcatgtcaatgtgaatcttcaccggtga

SEQ ID NO: 341734 - DNA, 954 bp, Pseudomonas aeruginosa
gtggcgctgaatctctcaaaagcggtagtgggctatttgcaggtacggcccgaggaaaaattcactgccaggcagatcgccgagtgggtgttcgctacttaccccgcggagtgccaagaaaaacgggccaatagtcgaggcgactacatcaagtcggatgcggatttggtgcagcagcttgtcgcggaaatcagctcgcagcgaccccgtatgcaaatgaagcatccagcgttgaaaaccaccgaagggcgcccgcgcaagtattactactcggaaaaatcggacagtgccgaagtggccgccgccgagggtgagggcgctacggcagcagcagatattggtacttcgatgcttgacgaacacgcattgtacccactgctctctcagtacctctgggaagagttcggcgtcttttccaaacgcatcaacgagaagcgctcatcgaacaaacgcgggccgaatggaaatcgatggctatacccggacatggtcggcatgcaggacttgggtgcagattggcaccgggaggtacgtgactgtgtgaagcagtattccgataagcgcaccaaactttggtcttttgaagtcaagttgctgatcaatcgctcgaatatacgcgaatgctttttccaagcggtatcgaattcgtcgtggagtaattttggctacttggttgcggcggaagtcagtgggcaggaaacactgaaagagttacgaatgctctttgctgcgcatggtattggcttcatcagactagatgtagataaccccgctgacagtcaagtgctgattcccgcgcgtgagcgtgacgcaattgactgggatatggcaaaccggttggccacagagaatcgagatttcctaaattacgttaaacaggtcaaacagttttaccagactggcgaggcgcgctttaaggattgggacgtacctgaggaatactcaatccagtaa

SEQ ID NO: 341735 - DNA, 444 bp, Pseudomonas aeruginosa
atggccctcgtcctgactatcctttcgcgtctcttcatcggtgtcgttgccgtacccgcaaccatcatcgcgctgatcctgctggccgctttcggcgggtccgttgaggacggggcgcgggcctactacaacaacgtctacgatctcgccacacacccggccgccgctcccggcagcctgaggatcctcctccccaactgcataccggccacgaaactccccccagacctggcagaacgccccatgagctgtgaactcaagcgccaggatcgctcgatcgaggccctgtctacggagatggccaacctaatcaagtttgcctggatgctcatcgccaccctaggcactgtcgccgcgctgctttggcccggcctttggcgccgacaggatacctacgccgaatgcactcccgtttcccccaaccgcactgatctggaggcctga

SEQ ID NO: 341736 - DNA, 660 bp, Pseudomonas aeruginosa
atgaaaaccatgatcgttagcgcactcgcggccgcactcgcactctccagtgccactgcatctgcagtcgagcaccagaaccccaccttgatcgtcgctcagtcgagcaaagctgaagatgtgcttcccaaagagcagcacctgctgatggtctacctcgtcgcgctgtacgaagtcgatacggcgtcccatgcgaacctcgacattcagccgggcgagacgctcgatggcttcaccaaccgactgtcgacgctgggtcctgtgaatgttaagtcccaggacttcgtcagcacgctggagaacaagcccggctatggcgccaattggcacgagttcggtattcctgttcgaactggtacgaatggggaaggcctttccagcgttcgagcacgtaccggtcacggcttggtcgtaacgcccatgatggccgaggacaccccgaagagcgcgatcccagcaaccgggatcacgaccaaaattgacttccagctcaatttgccgaccggagacctccaacccccttccgagaaaagtctcaccttcaccgaagtgttcaaggaaggccaggcttacacccgctcctgggaacagcaagggaaacactacgtcctggtcgttcgcatgaccgcagccgacccgatcagctatcccaagatctga

SEQ ID NO: 341737 - DNA, 684 bp, Pseudomonas aeruginosa
atgcgactctcctttcaaataggtcggggcatcgctgcactagcgattgccgggctctctgttgtcgcacaggcacatggcggcaccttccccgcccgcttcgaggttctcgtcctcagcacccccaatgaccaagaacaagttgggcacatccttcagtcgtccggccaacagctcgacgatggtcgcagcagcgtgctggatgctcctgttgaaggggatacgttgcagcagatccaaagcaacctcccccagcttcacctctcgcagatcgccgactaccaactggcagtcagccccgctaggcctgaagcggtggacttctactaccgcacggctgaatcacctgacgtccgtgccctggcaatcaaggtaaagctgatccccgcggaagccgatggcgttcgcgcgctcatcaaggtggtaaccacggcccccgacctgtccatcccgcccttgttgatggacgtcgagctcacgttgcaccaggtcctagtcaccagcgccgaccgaagcaagatgatcgccattcgccccaccagcttcactccagcttcacccacgtcgttcgacgcacaaatcgaccgccatcccccccccgaagagcaaccagcctccaaaaatccagaggtctggaccttcgaaaacccaggcgttaatccgccaccgcaaccggagaattga

SEQ ID NO: 341738 - DNA, 132 bp, Pseudomonas aeruginosa
atgcttctcctgcgcgatttcttgaacggcgccggcctcgccggcgtcaccaccacgcataacccgaacccgaatcggctgatccttttccgggagcgacagcgtgtagaaaaacacgagggctgcctgtaa

SEQ ID NO: 341739 - DNA, 150 bp, Pseudomonas aeruginosa
atgcgaaaggctagtaaggcggatgagttcatccaggccatgcgagttcaccgcggtatcgagtttgcgcggattggcatgatggtcgaggtcaacgatgacgaatgctgggtcctgcggccccaggcggaggcttgctcctatgggtga

SEQ ID NO: 341740 - DNA, 453 bp, Pseudomonas aeruginosa
atgagcaacgctgagaagttggtacgtatcccgctctgcatcgggcagcagccactggtggggaactactacaccgccgagtgcacgctctgcgggtgggtagttagctcggaagtgcttaccgacgactgccagtgcactcagaatgccggtgaccgcctttgcttgggtgatactgaagagatcggcaccgaccgcttgctcgaaattgtccaggccatggatctgcgccatggcgattcgacacaggcttatcaacgcctgatcgagcacaccaacgaaaccgagcagtacctggacaacgcagccgaactgctgggcgaaatcgtccagagcggccaggcctaccgcgaatgtaccgacaagggcagtgcgaccggcctgcaggtggctgctgtgcttgagtatgtcgcccagttccaggcggagccccacccggcagtgctggaatag

SEQ ID NO: 341741 - DNA, 258 bp, Pseudomonas aeruginosa
atggccatcttgttggaactccagtgcatcaaccaggacgatccctcgactgaggactgctacagcctcaatgagaagtcggtttacgagtctgctgatgacacccaggccgacctcattcgggccttcaagctggttcaggacatggcggagcggaacggctggaaaaaggccaagctcgcgcaaggaaataaagggatgctctgccccagctgcgtcaagctctacgaggcgcagaccgggcacacgctgagttga

SEQ ID NO: 341742 - DNA, 492 bp, Pseudomonas aeruginosa
atggggtaccgatggatacctgtattggcctgtgcgggcctactcctgtccggctgcgcgaccaagccgcaaccgcaaccgctgacgagcgatcccgctgtgaaaatgctggccgaagccgcgcgcctcgcgcaacaggaccttggccgcctgtcccgggcagaagacgctatcgctgagtccagccggtcgcagctggatcgcactcgggaggcccgtgctcaagctgtggttcccccgggctgggatcgaacgacaacagaggtcttcaccctgccttatgaccgcgccctggagcggctggctagcttggccgggtatcgcttgtacccaactggaaaaattcctgcgaacccggtgatggtcagcgtgaaaggcgaagggcgacggctggtggatgtgatgcgtgatatcaccgcccaaatgccaaccgacatgaccgtcttcctgtacccagccactcgctcagtcgttctggcgccgaagaaatag

SEQ ID NO: 341743 - DNA, 1275 bp, Pseudomonas aeruginosa
atgatctacaatagatggaaatttaaaaaatccccattccaaacaacatccctcccagcaacagaactaggcgacaagctacttgtcggcagagaaacagaagtagactccttaattagaaaaattgcttcccctcccaagcttgccacactagaaggtttaaatggcgtaggcaaaacaagtatagttaacattgcatcataccggcttttcagagattacattgaaagcggaaaagggacactctacattccatgcagaaagatattccagctttcagcagaacaggattcggagtcctttattgatcaggttctgatggaagtagcacagactttaatagagaaagcgcaagaactaaaagaaaaaggagttaccatccaaacaaaggccctggacaaatggctgaactcaccccagattaacacgtatcaaggcggagtatggttagtccaaggtggcatgcagtccgagaccaacacatcgacaggattcgaaagaagcggtttccgaaaaatagttctctcatggctagagcaaatatttgaaaatgaaggtggggtcgtctgtactatcgacaacatggagctattacaatcatcagatgccgcaagagatattctagagaaactgcgagacgaattacttaatgttaatgggttacgttgggttttgtgcggagcgcttggcatcgtatacggagtcgtggcatctccaaggttagaaggatacttgcataaacctatagagattaagagtattaatgatcagcacgccggagatattcttaccagccgaattcaagcatactctaatgatccagaatattacctccctttgcaggcggaggaatttacatctctctacgaaacactacaaggaaatttaagaagcgtccttagttattctgatgacttttgccaatgggttgctgatagacatatccccataacaaacgaagaaaaaacctcatgctttaatgaatggatcatggaacaggcgaagtcagcacatgatgccgtcctacaggaattacgacctaaagctgttgaggtatttaaaaatgcaattgctttgggcggaattttctcaccaagtgattttgaccgcttcggcttcaatagcatcccagcattcagacctcatattcgcgatcttgaggcagtaggagtgcttgtaagcacacaagatgatggtgataagcgaaggaaaaccattcaagtcacgcccaagggctggatggttgattactacataaaaaaaaccaaagcataa

SEQ ID NO: 341744 - DNA, 312 bp, Pseudomonas aeruginosa
atgctcgatcaatccgttcagatcggccgcgaaggcgtcgacgagctcctgcaccgtctcgtcggagaacatatcggggctgaaggtccaagtcaggccgagttgcccctgatagacctgcccttcgacagagagccagtttgcaagcggcgcacgttcgtcctgtgcactgccggaacgctccgcggctggcacccacagggcctcgtcggcgaactgatggtcgaactggccgagataattgaaggttatgcgtggttgcggcgaccgagccagaacttcaccgcaagcagggtctgccaggtagcgtaa

SEQ ID NO: 341745 - DNA, 258 bp, Pseudomonas aeruginosa
atgacgaacgaaaccaagacagaccgccagcgccgcctggcgcgggaacgccaacgggcgaagcgcgagcgcgatgccctgcgccgcgctgcgctgggcggccgccgcttcaacatggacatgtaccagggaacggctgatgcactcgatctgatctgcgcggccggtggcttcgcgagccggccgaggtggtcaccttgctcctacacaacgttgccgaaattgctgagcgtgacgcgtcacgttttgccgaattga

SEQ ID NO: 341746 - DNA, 2226 bp, Pseudomonas aeruginosa
atgtacgacttccgaacgctttcaccgatcgacttcgaactgctggtacgcgacctgctgcaggcggagttcagcatcacgatggaaagttttggcccaggcaaagacggcggaatcgacttccgctttgctgtggcagatcaaggtgtcgtggtacaggtcaaacatcatgctgagggcgggagcaggagtctggttcgggctgccgccaaggaggatccgaaggttctgaaattggctccaggccggtacatccttgcaacatcaatatcacttacgccggtgctgaaagacaaaatcgtacaagccatgccatccgcgcccataagcgttggcgacgtgataggtcgcgaggacttgaacaacctcttggtcaagcatccccatgtattgcgccagcattttaagctttggttgaccaatacagatgttctcgatcgcatcttacacagcgcggtctacaacaggacggacgcggagctcgcgcgtattaaacaactggttcccaagttcgttcacaacgcgagcttgggtgaggccgagaagatcctacaagaccggggagcgctgatcattgcaggcgagccaggtgtcggaaagacaacgcttggacgcatgttgctttggttgcatatggagcagaactggaaagtttttgtcgtagacgaccttcaagaggcgatggcggtcagtacggccggtgaaaagcggctcatcttcttcgacgattttctgggtcagattagcctgaccaacgagctgctcggcaaggtagatcagcgactaccggtttttctggatagacttcggaacaacaaagatttgcgtttcattctgacgaccaggtcgtaccttctaaaccaagcgcagattcagtcggataagctttcctcacctcgcgtgactgcgagcgaaatggtgctgaacgtcggagtctatacccgcagcatcaaggcaaaaattgtcttcaaccacatctacttctcggatttggtcgacgaggagaaggccagtctcctgggcgatgacttctttcttaagatgattgatcaccggaactttagtcctcgcctgatagagctgctgacatcagcagactattactcggtgcgggaggagcctattcagacaaccgtgctaggtgtattggagaatccggcggagctctgggggaggccgtatcgagcgcacttgagcgcggatgcgaggtacctgatgtgggcaatctttttctctggcccgtatgtaggaatcaactcttgcttgcagatgttcaagcacgtcagtgcaagtgcgggttatcagatcgctccatcggaggcagccgcacggttccgcaatgggctgaaggagttgagcggttcgttcgtggaggtcaaagagcaggagatttcgtttgccaaccccggcattcgcgacttccttagcaaggtggtcaccgacgatcaccttcttccagttgttgtgcaagccgtaacgacgatctacgaatttcgcagtgcatggaatttcttcaaacttcatatcacgacatgtcagagccaattcagcgataaaggcctatgggtcgaggctatggatcgcattcagaaccatggaagcactacagcaattgcatccctccggcacatccttgaaatgtgcgagcatttgccagggcttcagatccagttgattcttgacagagcaacgaacgacttgatgacacaaggagttgaaggtaaggattattacgattgcctgttttcactgcgacagttgaaccggctgcagtatcagacgggcgacctacttgatcgaactcgtgacgtgttgacggaagcctccgcaaacatgctcgccaacattggcgaagacttggcgattgacgacatcacgagcattgccgacgcactagctcaattagctgactcaaatgtggtacgtaacgcagcggccgatgcgttacgaggattcattttcggcatcgacgacaaacttgccgatgtttcttccagccaagagctcagcacctttcacgaagaacttgtcatcgcggcaagagcatacggcgttagcgtcgacgaggcgctcacccgagacattgagagtcgccgcgaagcactcgaagagcgtgagaatgaagctgacgaaactccctatcagcacaccggtccgcaagctgggctaggagacatctcagactctgaaatcaagtctatgttttcgatgatgaagggtatgtag

SEQ ID NO: 341747 - DNA, 2265 bp, Pseudomonas aeruginosa
atgcttaagagcattgagaaaataaaagggcttggggtttatcaaaactacaacaagcctgcgggcacccaagagttcggaatcaagaacctcatttacggctggaactattctgggaagacaaccctctcccggctgttcgcccagcttgaggcaaagacagccaatccagacttgtcgggatgcgagttctcctttggtaccggcaatgatgcgatcaccgaaaagaacttcactcggagcaacatctcagttcgcgttttcaattccgattttgtaaaagccaacctgcacttcgatggcggaagtttcaaccccatccttctgctcggcaaagaatccgaggaagcacagcggaagatcgacaaactgggggagcggattaaacgttctgattcagttcagcgcaagctgaatggtgaggtcgaggctctgaaactacgcattgcccaggctaagacagagacggcaaagttcatccgccaacgcttaaaggttgatccctatacagccgcacatttggggcaagatgtgctggccgtgagtattctcgactcccagcttttgatggagaaagagctctccgatgccattgaattggcattgacgcctgactccaagagaccaaacactgttgatgagcttcaggcatctcccgcgattgaggagttgcacaaagaggccgtgacggtgcttgcagcaacgccaagcttttccagcaccctgaatcatcttgtagagaaccctgctattgagcgctgggtgcaaagtggcttgcatctacaccccaccgctggggcgtgtgagttctgcggtaacgagctatcaccggctcgtcttgaggcattacgcgctcatttctcaaaagatttggcagaccaccaagagaaagttgacggattgcttgagcgagtgaaagcggcagagttcagattgacatggccgaaagctgcggaactcaacccgcaatttcgagacagctacaacctcgcaatcgatgtattaccggctgccataaatgcactcaaccaagcgatcaagagactcgctggtgaagttcaatgcaaggccgatgactcacgcaaagctatgaagcccagcccattggcccaaggcctagaggtggagatcaaggacgcagtagcagcggtcaatgcaatcattaaacaaaacaatgaactggcctcgaacttcaccaaggccaaagctgactccctacggaaggcaaagtatcactacgtacagcagtttcttgatgagcagaatgctgccggtctggaggtgaagaaggatcggcaggtcaagcggtgcgaccggctgaagacctatgtcgccaagctccagccagaaatcgacaggctccaagccgagatcagtcaagctcaacaaggcagggagaaaatcaatgaacgcttggcttcgatgatggggagcgaggctgttcagataaaggtcgtcaaagacccagcaggccaagatcgatttcaaatgattcgaaagggcggggccgtcgcaaagaatctgagcgacggggagcgaaccgccattgccttctcatacttccttacgaaactgcaggagatcaagcctgcagagttcaaagagaccatcgtctatatcgacgatccgatttcaagcttggacgctaaccatatttttcaggtgactgctgctatacgggcgctgttcttcacgcagcaggacaggaacgcaccgtggcaaacgacgtgcaagcagctcttcgtctccacacacaattttgagttcttcaacctactcagggaaattaagcctgtagcaaacaaacagggggcacggctctttctgattaggcggattgctgagaaatcgtcaatgctggaagacatgccggcgtcactggcacgctatcaatccgaataccacttcctgttcgaagtcattcatcggttcaaccaggcacccgacaaaactgcacatgaagtgctgatgttgcttccgaatgctatgagacgcttcgtcgaactctatacctactccaggcttcctggcccgaaggacgcagagcaggtggacgagcgcgctgaggctctgtttggcgtcgagcgagcgaagcgaatcctcaagattttccactacttcagccacggcaacacacttgatcggcttgcaggcaacaacgagctgatctttgatctggagcatgccgtcagagacctgatcgatgccatcaccgaaagagacaagccgcacatggacgccctgattgcagcgatacaggcctga

SEQ ID NO: 341748 - DNA, 615 bp, Pseudomonas aeruginosa
gtgcgttcgagcagctcgccggccaccaggttgtcgtccgccaccagcagccgcagcggttctccggccccggggcaggccgcacgcagcggttggtcgtgggcgacgtcgaggtccaggtcgaaccagaaccggctaccgctgcccggcgcgctctcgacccgcaattcaccgcccatcaggtcgaccaggcgtttgcatatgaacaggccgaggccggtgccgccgaagcgtcgcgaggtggacgcctcggcctgggtgaaaccttcgaagatgcgctgctgctgttccgcgctgatgccgatgccggtgtccgccaccagcacccgcaggcgcaccaggtgggcgtcgtgcgccagacgccgcaagctcaccaggacgtgcccgcgggcggtgaacttcagtgcgttgccggccaggttgatgaggatctgctgcaggcgcaggcggtcgccgaccaccgcgctgggcagctcgggatcgatgtcgaagatcacctcgacgtccttgtcgccctggttgccggagagcaccacggccaggtcctgcatcagcggctccagctcgaaggggagcatttccaggaccagtttgccggcctcgatcttcgagtag

SEQ ID NO: 341749 - DNA, 2163 bp, Pseudomonas aeruginosa
atgcaggcggctgcgccaatgctcgtagaccaggccgccgtcgcgcaacgccagcggctggccatacagctcgcacatgcgctcgttccactgcaggctgtcgtcggccaggttccagcgccagatgcccaggcgcgccacgtcggcggccatttgcaactggtcgcgcgccgcggccatctcgcgctcggcgttgcgccattcggtgacatcgacggcgatgcccaggtagccgttgatcgccccagcctcgtcgcgcaggacggtaaccgaaagcgtcacgctgagcggcgagccgtccttgcgcagataggtccattcgcgggtctcggcgccctcctgttcggcccgcgccaccagcacgcggaaaccctcctcgcccagctcctggccgcgggcgagcaactcccgctcgctgtgcagcagggtcggcgaggccttgccgaccacctcgtcggcgcggtagccgagcatccgctcggcaccgagattgaagccgctgatgatgccatcgcggtcgagggtgatgatcgacacctcggacgccgcctgcagcacgctgccgagcagtacgttcaaccgacgcagttcggcggtacgctcggcgatctggtgctccaggccggtattgagctcgcggatgcgggcctcggcggccttcttcgcggagatgtcgcgtacggtcttcgaggcgccgaccacgccgccgtccggaccgaggatcggcgagacggtcaccgccacgtcgagcaggtggccatcctggtgccggcgcacggtatcgaagctgaccacctgttctttacgggcgatgcgggcgaggatgtcgagttcctcgttctccttggatggcggcaccagcaggtccaccacccgccgcccgaccgcctgctcctcgcggtagccgaacaacgcctcggccccgcgattccagtcgctgatgacgccgtcgaggccgacgccgatgatgccgtccgccgaattgccgacgatcgccgccagccgcgcctgggtcgccgcctcccgacgccggcgcaggcggccgagggcgctggcgttgaccagcgccgccagcaacaggctgaccaggctgccggccaggaacaggatgcgcggcgaaggctggtgcaggcgctggacgaacagcggcagtgcgctgaacgccatctgccagtgccgaccgtagatctcccgccgcagcatgtggccgaacaggcgttgagccggcgccgcggcgccgttgacgaagaagggcacggcagcgccgtcgccggtgacgtcgctgagttcgaggtggatcgccgcgttgtcgatgggcaacccggccagcacctcgccggtcagcagcggcgcatagctccagccgaagccttcgagttcgcgctggggccccggcggtggagtgatgccgctgcggtagatcggcatcaggatgaggaacgattgctggcgcaagccgctggcctggaccagggtgatcggccccgtcaggcgcacctgcccggtctccagggcggcgcgggcggcctcccggcgattggcttccgaggcgatgtccaggcccaacgcctggccgttgcgcgccaccggctcgatgtactggatgacgtagcgctcgccatcgtgcggagtcagttgctggatgcggaactccggctggccgtcggcccgcgcctggcgcaggaacccggcctcgtcggcggccgccacccggcgtatgaagccgaagccgcgggcgccgggaaactcgcggtcgatgtcgcgggtcaggctgtagcggcggaacagttcgcggtcgatgtgcgcctcgcccgccgtcagcaaggcaccgcgcaccccgcgcaagccatactggtagagttccacgcggcgggtcaccgcctcggccagcagttccgcctcgcgttccagcgccatccgcgcctgttgctcgttgaccagcgccagcccccaggcgcccagcccggacagcagcagtccgagcgccagtgtcgcgcccgcccagcggctcagcctgaacttgctctgttgtacgttcacccgatattccgtccctgcgccggcccggcgcggggcaatcccgcactccctgcgccttttcgtcccagaagactagatcaagcgggcggattcctccgccgaatcatccgaccccaggtatga

SEQ ID NO: 341750 - DNA, 948 bp, Pseudomonas aeruginosa; identical to SEQ ID NO: 319565

SEQ ID NO: 341751 - DNA, 174 bp, Pseudomonas aeruginosa
atggtaggatttagacgcccagccgggttagctcagggagagctagtggcgcccggctgggcttacagcaaccgtctgatcattaattttcttataaatcatgtgcttatgtgtgatagcactaagaaaatgagtaagaccgtcggcaacccgagcagcatggtcttcatgtag

SEQ ID NO: 341752 - DNA, 348 bp, Pseudomonas aeruginosa
atgaacgaccgcgaactactcgaactggcggcgcgggcggcgggggttggatacacgtggtccgagttctgggaaactatggcgcgccctctgaacgatggaagcggctgggataaccgggccacctggaaccctctgaaggacgacggcgacgcgctgaggctggctgtgaagcgcggacttgtagtcactccggaccgagaaaaccaatggaccctggtatcgaaccaagcaggtcacgaatactgcgcgatctattgggaaaagctaggcgagatggcagcgacaaggctggcaatcaccgaagccgccgcagagatcggcaagtcgatgggaggtggggaatga

SEQ ID NO: 341753 - DNA, 408 bp, Pseudomonas aeruginosa
atgaacgaccgcacactactcgaactggcggcgcgggcgcgcgacaaaggcgactggtacaaggcctcatccgtagatgctttcccggagttccacgttgatcaggagttcatggtggcgacctctccggatgttgttctctggctgattgccgaggttgagcggctggaggcagagcttagtcaatgcgcaagcgccctccccggtacctactacatggaccctccagacggcggcaatgtcagcattccagagcagattcggcgcatggcgaaggatgctgcgcggtatcgcgcattgcggcagaaggagcgcggagttgtggtggttcgtaaccgcacatcgcatctattcggagaacacctcgacgctgcaatcgacgcagccatagaaggagccaagaaatga

SEQ ID NO: 341754 - DNA, 300 bp, Pseudomonas aeruginosa
atgaccgtgcaaccgatcagtgatgaggagttggcggagttggaagggtattcgcagcataccgcctaccttggcgacgaagacgcagcaatcaccatgggagaactgcgcggtcttatcgcccgcctgcgcgctgctgaggtcgacgctaagcgctggcgtcatgcgcgcgacatcctaactgtcgaggcgattgagttggctcaatctgacttcatcaacttcggtttgccacctgatgaaagagaaagcatccgcgcagatcaggccatcgattccgcaatggagcgcacgccatga

SEQ ID NO: 341755 - DNA, 258 bp, Pseudomonas aeruginosa
atgatgcgcttaggaaatctgaccatagaacagatggaacaacgttcaggcgttcagttccccgctgaactgaaagaattcttgatctaccgccatcaggcacaggcaagcaacatcgggaccgggaagtggcactgttttgatctgccattccagattgtttgtggcgatatggacactgcacagacggtgtatgaccaccttgcccctcttgcagcacagttcaaagagcagttgcagatcggagtgcagtcatga

SEQ ID NO: 341756 - DNA, 207 bp, Pseudomonas aeruginosa; identical to SEQ ID NO: 324746

SEQ ID NO: 341757 - DNA, 207 bp, Pseudomonas aeruginosa
atgaatgaaaaatccttacttgctgtacgccaggaacttcggatcctccgaaaggagaaagacgatcgcgaggcgcgcattgagtaccacgaaacggttggaatgctgcgcggcctgtactacggcggtgagatcgattcgatggagctagttgcgctcacgcaactcgcaggaaacgcatacatcaacgctgggaaaccctggtaa

SEQ ID NO: 341758 - DNA, 222 bp, Pseudomonas aeruginosa
atgagcaacatccgcaacctccagtggaacgaaggggcgcctgatgaggttcagcgcgggatgcttatcgaatattgccatacagcatggcttgtcggagacggccagtttccgagtatcaccagagagaaaatcgcgcgctgggcatggctgatcaagccccacgaactcgcctggctcgaagacatggcaaacaagcacaaagcgagggcgcggggatga

SEQ ID NO: 341759 - DNA, 243 bp, Pseudomonas aeruginosa
atgagcgttcgtaccgagctggatgcgttggcctacatgaccgaatgcacgctggcgacagtggagcgtttggggatgatcaagtcgcgcaagaagagcgagtttgagcgccagattggcatcgctcagaaggggatcgactggatcaagatgttcggcggttattcttcgggccgtgtcggatcagtcatcgctagcggtctgagtgtgcacgcctgggcacacaaggatctggtgaaatga

SEQ ID NO: 341760 - DNA, 288 bp, Pseudomonas aeruginosa
atggggccgaaaatgtggactcttccggttttttctgatttggggagtgaagttgtggaaatcgagattaaagacgacataaaccacccacagcactacaagctgttccccgacatggaagccttcgacgtgatcaaggcatccctgagccctgccgagcttcgcggctacctcaagggtaatgtcctgaagtatcgccttcgtgctggagagaaagggcctgcggagaagtgcatcgccaatgctgaatggtacaaagcccgtctgtttgagcaggagagcgcctga

SEQ ID NO: 341761 - DNA, 399 bp, Pseudomonas aeruginosa
atgaacaaaaaacggggagcgctttgggataccgaatacatgctcgagcaatggggctggtggcgaatgagcggaatggggattcctcgctacgtctcgccgagcttcgcgctcatgcgtgacaacgtacagcagcacagcagcatcagcttcagcattaccgacgaacttgcaatgagcgtggatagcgctgttgcccgtctaaccgcaagggagaagcagcacggcgtcaatgggccatttatgggagactgcctgtggctttacttcggcgcaaaatggacggctgtccgcgtcggcaagcaccatggcatcagcgaagccaaggctcgcgaactgatcaaggccggcgtagcatgggtggatagcgctctagagagcatgagggaggcggcatga

SEQ ID NO: 341762 - DNA, 1776 bp, Pseudomonas aeruginosa
atggcgacgacactcaaaccggtggacgcggtggtggtcggcttcggctggaccggagcgatcctggccaaggagctgaccgaggccgggctcaacgtggtggcgctggagcgcggcgagaaccgcgatacctatcccgacggcgcctacccgaacaccctcgacgagctgacctacaacacccgcggcaagctgttccagaatctctccaagagcaccgtgagcatccgccacgggatcaacgacaccgcgctgccctaccgccagctctccgccttccttcccggcgacggcgtcggtggcgccggcctgcactggtccggcgtgcatttccggatcatgcccgaggaactgcgcctgcgcagccattacgaggaacgctacggcaagaaattcatccccgaaggcatgaccatccaggactacggggtcagctacgaagagctggagccgcacttcgatttcgccgagaaggtcttcggcacctccggcaccgcgcatacggtcaagggccaggtggtcggcaagggcaatccgttcgccgccgaccgctcggacgacttcccgctgccggcactgcgccaggtgtactccgcgcaactgttccgcaaggccgccgaggaactcggcctgcacccctacgacctgccggcggccaacgcttcggggccctggaccaacccctacggggtgcagatggggccgtgcaacttctgcggcttctgcagcggctacgcctgctacatgtattccaaggcctcgccgaacctgaacatcctgccggcgctgcgccagaccccgctgttcgaactgcgcgccaactgcaacgtgctcaaggtcaacctcgacagcgacggcaggcaggccaccggcgtgacctacgtcgacgcccaggggcgcgagatcgtgcagccggcgaagctggtgatcatcagcgccttccagttccacaacgtgcgcctgctgctgctctccggcatcggcaagccctacgacccgcgcaccggcgagggcgtggtggggaagaacttcgcctaccagaacatggccaccatcaaggcgttcttcgacaaggacgtgcataccaaccccttcgtcggcaccggcggcggcggcgtggcggtggacgacttcaacgccgacaacttcgaccacggaccgctgggcttcgtcggcggctcgccgatgtgggtcaaccaggccggctccaagccgatcggcggcctcgccgtgccgcccggcacgccgagctggggcagcggctggaaacaggcggtcaaggacgcctacacgcacaccgtgtcgatggacgcccacggcagcaacatgacctaccgcgacaactacctcgacctcgacccgacctacaaggacgcctacggccagccgctgctgcgcatgaccttcgactggaaggacaacgagatccgcatgagccgctacgtcaccgaacacatgcgcaagatcgccgaggcgatgaacccgaaggccatctcggtgagcgtcaagaacttcggcgaccacttcaatacacgggtctaccagaccacccacctgctcggcggggcgatcatgggcagcgatccgaagaccagcgtgctcaaccgctacctgcagagctgggacgtgcacaatgtcttcgtcatgggcgcctcggccttcccccagggcaccggctacaaccccactgggctggtggcggcgctggcctactggtcggccaaggcgatccgcgagcaatacctgaagaaccccggtccgctggtgcaggcatga

SEQ ID NO: 341763 - DNA, 471 bp, Pseudomonas aeruginosa
  misc_feature (336)..(345): n is a, c, g, or t
atggctgacttcgagatcctctgcttcggcgagaccatggccatgttcgtcgccgaacagcccggcgaactggaccgcgtcgagcagttcggcaagcgcatcgccggcgccgacagcaacgtcgccatcggcctcgcccgcctcggcttcgcggtggcctggctgagccgggtcggcgacgactcgctcggccgtttcgtactcgacagcctgacccgcgagggtctcgactgccgcttcgtcgaggtcgacgcgcaagcgcccaccgggttccagatgaagtcccgcgaggtcgatggcgccgacccgcgggtcgagtacttccgccgcggctcnnnnnnnnnngctcggcggccagccggctgggcctcgcccatatccgcgaagaaatgctcggcgcccgccacctgcacgccaccggcattccgccggcactctcggcgagtgcctgcgaactgtcccacgaactga

SEQ ID NO: 341764 - DNA, 783 bp, Pseudomonas aeruginosa
atgtcccttcaccctgtctccatcagtctttccagctacggcgcggacctcgttcgcagtcgcggccaggccagcttcctgcccctgctggggatggccggcgcgcagcgcgtggaactgcgcgaggaactcttcgccggcccgccggataccgaagcgctgaccgccgccatccagttgcaggggctggaatgcgtgttctcctcgcccctcgagctgtggcgcgaagacggccagttgaaccccgagctggagccgaccctgcgccgcgccgaagcctgcggggccggctggctcaaggtctcgctcggtcatctgccggaacagcccgacctcgctgccctcgcccggcgcctggcgcgccacggcttgcaactgctggtggagaacgaccagacgccccagggcggccggatcgaggtgctggaacgcttcttccgcctcgccgagcgccagcaactggacctggcgatgaccttcgacatcggcaactggcgctggcaggagcaggcggtggacgatgccgccctgcgcctgggccgctacgtcggctacgtgcactgcaaggcggtgatccgcaaccgcgacggcaagctggtcgcggtaccgccgtcggccgccgacctgcagtactggcagcgcctgctgcagcatttcccggaaggcgtggcgcgggccatcgaatacccgctgcagggcgacgacctgctcagtctcagccgccggcacatcgccgccctcgcccgcctcggccatccccaggaggaacgccagcatggctga

SEQ ID NO: 341765 - DNA, 234 bp, Pseudomonas aeruginosa
gtggccctgctcgttgatgaaacccatgatctcaatggtcataccttgaccggtctgaagcgactgctcgaactggccgaagacgacagcggccggcgacgcttgtccattgtcctggctggccatcccaagctgtgtaacgatctgcgccgccccacgatggaagaaattggttaccgcaccgacattttcgagttgcaggaaaagatgcaaagtgccggattaccggtatga

SEQ ID NO: 341766 - DNA, 1083 bp, Pseudomonas aeruginosa
atgtcgccgtcggacctcaagcatattgagcatccgcggtggatcgatcccgccaagggcgaacccaccctgatgctgttcagcgtggtggatgaccgcagcggtgtggcctaccaggaataccactgcgtttatggtgaggatgcggagacggcacttcgttttctgttcaactcgatggcgccgaaagcggacccgagttttccctttcagggccggcccaagctgatctatctggacaacggtccggtggccaagcgtcgcgttttccagagcgtcatgcgggcgctgggcatcgagtggcagacacacatccctgccagcaaggatggaacgcgcaccacggcccgctcgaaaggcaaggtcgaacgtcctttccgcacagtgaaggaagcccacgagaccctgtaccacttccacaagccggaaaccgaagcccaggccaacgagtggctgttgcgctacctagtgcgcacctacaaccagcagacacatcgtgccgaacccctttcacggatcgaggactggatcacccatgtgccaacagaggggatccgtgaaatgtgctcatgggatcagttctgccgctttgctcgggagcccgagcggcgcaaagtcgggcctgatgcccgaatcaccaccgacggtaccgcgtacgagcttgagccagagatggccggcgactacgtcgtgctgctctgggggctgttcgacgatgagctgcatgccgagttcgatggcgagcggttcggtcctcactacccggtgtccggccccattccgcagcaccgctaccgggctttcaagcgcagcaaggcagacgagcgctcggctcgtatccgatctctcgcggaccagttggggctgccgatcgcggcgctttccggggaagatgtacgactagagcccggttctgctgactcgacgctccccatccagcccttcgttttcgagccccaggaatcccgcattgcggccaagctggctatcgccgaggaactggcaatgccgctggccaagctttcaatggatgaccgcgccttcatcgaccaggtgctgagcgagaccctggctacggactga

SEQ ID NO: 341767 - DNA, 978 bp, Pseudomonas aeruginosa; identical to SEQ ID NO: 336088

SEQ ID NO: 341768 - DNA, 1146 bp, Pseudomonas aeruginosa
atgtcgccctccgacctcaagcatatcgagcagccgcgctggatcgatcccgccaagggcgaacccaccctgatgctgttcagcgtggtggatgaccgcagtggcgtggcctaccaggaataccactgcgtctatggtgaggatgcggagacggcgcttcgttttctgttcaatgcgatggcgccgaaagcggacccgagctttccctttcagggccggcccaagctgatctatctggacaatggtccggtggccaagcgccgcgttttccagaacgtcatgcgggcgctgggcatcgagtggcagacacacatccctgccggcaaggatggaacgcgcaccacggcccgctcgaaaggcaaggtcgagcggccctttcgcaccgtgaaggaagcccacgagaccctgtaccacttccacaagccggaaaccgaagcccaagccaacgagtggctgttgcgctacctggtgcgcacctacaaccagcaggcgcatcgtgccgagccccattcacggatcgaggactggatcgcccatgtgccaacagagggaatccgtgaaatgtgctcatgggaccagttctgccgctttgctcgggagcccgagcggcgcaaggtcgggcctgatgctcggatcaccatcgacggtaccgcgtacgagctggagcccgagatggccggcgactacgtcgtgctgctctgggggctgttcgacgatgagcttcatgccgaattcgatggcgagcggttcggtccttactacccggtgtccggacccattccattgcaccgctaccgggctttcaagcgcagcaaggcagacgagcgttcagctcgtatccgtaccctcgcggaccagttggggctgccgatcgcggcgctttccggggaggatgtacgactagagcccagttctgccacctcgacgctccccatccggcccttcgatttcgagccccaggaatcccgcattgcggccaagctggctatcgccgaggaactggcaatgccgctggccaagctttcaatggatgaccgcgcctacatcgaccaggtgctgagcgagaccctggcgcggcgggtggtactggagcgcgtacgggactatttccgtcaccggaaaccaggagaagagcatgcgagctga

SEQ ID NO: 341769 - DNA, 753 bp, Pseudomonas aeruginosa
atggctatcgagaaagagacgtacgtgatcggcggctggcttaaggcacgcgaggcagggactacagggcctttcaagaaggtaggtctggtatccaccattcagcagaccatcgagagcagtgagatcacgctacccgacaccaccactccgcagggcggcgagtacgactcggtatcgcgcatctcctcggtcggcctggggatcaacttccgcgaactgcatacctcgatgctggcggccctgatgtggggcgacgccaccaacgttccctctgccacccacaccgacgaagcgcacaccgccgttccgggaggcacgatcgcgctcgacttcatgccgctggagatcaccagcgtgaagagcgatgacggcaccactacctacgaagagttcgacgactggaacatgaccggagctggcctcgaaatcgttgaagggggtgcgatctctgcggccacaccgatcaaggtgacctacaagtccgccaccgtcgatgtgatcgaggcgctgaccaacagcggcaagacgttcgagttcctcttcgagggcgagaacgccgctggtacccagcggcgcatccaggcgcgctacttcctctgccgcttaaacccgtcgagccagcaggattggatcaacaccgaagacttcctggccgccgaggccactgccaaggtgctgatggacccaaccaaggtcggtgctggaaagtcgaagtacttcaacatcaagaaggaactggcgacggtgtga

SEQ ID NO: 341770 - DNA, 753 bp, Pseudomonas aeruginosa
atggctatcgagaaagagacgtatgtgatcggcggacccttcaagatccgcgagtccggcgctaccacccccttccagttcgctggcctggtgtccactatccagcagaccatcgagaccaacgagatcactttgccggataccaccacccctcagggcggtgagtacgatgccgtttcgcgcatcacttcggtcgggttgtcgatcaacttccgcgaactcaagaccagcatcctggctgccttggtgtggggggacgccaccaacgttccttctgccacccataccgacgaagcgcataccgccgttccgggaggcacgatcgcgctcgacttcatgccgctggagatcaccagcgtgaagagcgaggacggcaccacgacctacgaagagttcgacgactggaacatgaccggagccggcctcgaaaccgttgaagggggcgcgatctctgcggccacaccgatcaaggtgacctacaagtctgccgccgtcgatgtgatcgaggcgctgaccaacagcggcaagacgtttgagttcctcttcgagggcgagaacgccgccggtacccagcgccgtatccaggcgcgctatttccggtgccgcctgaacccgtcgagccaacaggactggctcaataccgaagacttcctcgctgccgaggccactgccaaggtgctgatggacccgaccaaggtcggcgcaggaaagtcgaagtacttcaacatcaagaaggaactggcgacggtgtga

SEQ ID NO: 341771 - DNA, 189 bp, Pseudomonas aeruginosa; identical to SEQ ID NO: 336175

SEQ ID NO: 341772 - DNA, 279 bp, Pseudomonas aeruginosa
atgagggccactatgggtatcagcttccgggcgactgcgccggtcgatctttcgacgggagatcagaaaacgaatgtcctgtgcgtgatggatgacattgatgccgacctcgcgctggacagcgcagtcggcctgctcgacgcgattcaaggcgggctcctcgacatcctcgacgagccgagtgttagtcgtcgcgtagtcctacttcttcatgcggccgagacagccactgccctggtccgtgcggccctggagggtggggaggtgtccaatgactag

SEQ ID NO: 341773 - DNA, 255 bp, Pseudomonas aeruginosa
atgagctttgatgaaggcgattttctaaagaaaatccagggttttgccgaacagggcaaggagcgaattgccctggaaaaggggcgtgaagctttggagcgggtagggggcgagcttgatgatcgggtgaacttccggatcaactctgtgctgaagaatgagttcgagaaggtgtgtaagcagaaccacacaacgataagccgcgagataaagcggttcatgactgaagtggtgaaggcccaacgtacgttttaa

SEQ ID NO: 341774 - DNA, 351 bp, Pseudomonas aeruginosa
atgctcgctctcatcggcctgtgccagggctattactccgaaacccgcaccatcaacggccaaaacggccagacccaaatcaccgagcactctgtgctgctccaggtcgagcagccgaacaagttcgggttgatcgaacagaagatcatcgccgtccgcctctcgaagaagcacatggaaggcggcttgaacaacgcctggaaccagcagaaaggcaaggtcgtgtccatgccggtcttcgtccaggcctgggcgagcagggcggggaatgctggctacgactactggctgtccggcgatggccttccgctcaacctccaggctgtccagccggttaaagcggcctcctga

SEQ ID NO: 341775 - DNA, 888 bp, Pseudomonas aeruginosa
atgatcacctcagcgaccgaaagcagcggccagacgttgttctatgcgacctggtatccacttccgcccacgggcgtctactgcaatccgccggcggcatggagaaatgacttcaccgagctgctgctcggcggaaattggatagctggccggcgctgggtgcagtccgtcacagagcgctaccggctggtcatggaagttcagccgagcgttgcggcgaccggtccgattgtcggtcggcagcgtgcctcgttcgagatcgagtcggacaaggccgagcgctgggaaagcgacccgatcaccggcggcagcaccggccacgacgacgagaaggatggcaaccggcgtttgtctgcgctgaactgcttgttggcccagggcgccacgacgctcattgctgcgcaccgcggcacgaccgtgacctgggatgtgccgacgtccatggtcctgccgatcgatcttgtacatacgctccgcctcgatgatcagggcgcgcgtgcggtgggcaagtgtcgacgcattgtcgaccggctcgacctcgcatccggaagcgcgctgaccacgatctctatcgctgtgatgcgaggcggcggtggcgcagaagacccccttgttcctcctgctggctcgtcagatcccgtcagcccgccgtcgggcggggggcagctctcgacgcagcttggaggccgcaacggcagtcccgcgtatgacgatgaggcggatggtttctcaggcaactggagcaatcgcgatcccggcgccgaactgttcccgcggcgcttctcgttgaccgcgaaagacattccggagacctaccgggacgagcatgcgccggagcttgcggccacctaccgggtatccgtgcctgacgacttactggagatgtag

SEQ ID NO: 341776 - DNA, 1011 bp, Pseudomonas aeruginosa
gtgtttcaccagtccctgggcaagcgcctgatgcccggcgtagagctgaaagccagcccggcgaagttgctccaggggcacaacgtgttcggtccgacctgtatccagaagggggccgaggtgatgttcaagtgtctagccggaagctacccggacctcttcgcgaagctcgatgtgtcagcgacgcaggtctacgccctggactgcacgtactccagcaggctgccggacgagcgcacggcgctccaggtcatccaggcgctgaccaatgtcagcaacggccacaccaagagtcgcggcgacaactatcagacgtccgcctactggggagcgaaagagtcccgtctgaagcgcctgaaggcgtatctcaaacacaccgagtttcaggcccagttggacgaattgaagcgggcagggcgggccgatctgtcggccgctcggtctgctcgggtcatgtctgacccacggttgcaggagtgggtgcgctacctgctccgcatggaagccacggtgatgcaccggtggctggaacgccggggcattccgtctcggcttgttgatctgatcgcctaccagcagcggctccaggaagaggggcgctgcctgattcaggagtgctggcaagcggttacagcggaccttttcgcggcctttgagggtatccagatgcgtgtgattgatgatgaaaaagtgctggccgcactgactgagcgacacctgaagtacgaccggaagggcaagcccaacgatagccacgctcggaacctgtttcggacgtaccgcagtctcaaggactacgggtggcaggaaacgatggagtcaatggcgcgccggactttctacaagcatgtgaacgatatctgcgaggccgggctgtcgaaagccgccctgcagaagctccacgaagccgaccgggcgaacaacgtcgtaccgctgctgcggttcgtccaggttgatttcagcgcccagcgccccggctggtacgtcgagccgaccgtggaggccgcgtga

SEQ ID NO: 341777 - DNA, 333 bp, Pseudomonas aeruginosa
atgaaacggattttccttctcccccttctccccctcgcgctgggcgcagcgacggtcgacaagacacaagcgatggccaaagccatacaggcgaaggacgaccaggaggcgctggagtggtgcaaaaaagccgctccgaacgactatcagtggatcctggaacagtgcatgcagatccgcgccgacagcatcagccaagccgatgacatggtgctccaggagaagttgatgaagcgccttaacgagatcgagcagaccctgacgcagtatcccgagactgagcgccgaaaactcgccctggaacaactccagcgcgaagcacagaccccgtaa

SEQ ID NO: 341778 - DNA, 468 bp, Pseudomonas aeruginosa; identical to SEQ ID NO: 336171

SEQ ID NO: 341779 - DNA, 405 bp, Pseudomonas aeruginosa
gtggtggtctggcggctggaccggcttggccgctcgatcaaggacctgatctacctggtcgagcaattggaggatgccggcgtgggtctgaagagcctccaggagaacatcgacaccacatccaccggagggcgtttggttttccacctctttgccgcgctagccgagttcgagcgcaacctgatccgtgaatgcacccatgcgagactatctgcagcacgtgctcgcggtcggctgggcggccgcaagaaacgcctggatcccgccaagcgcaaagtcgccctgaagctctatcacgagcgccaatacaccgtggtggagatctgtcggatgatgggaatcggccgctcgacgctctacaactacatcaccgaggcagaacggaatgcccgccagcaggcgtaa

SEQ ID NO: 341780 - DNA, 162 bp, Pseudomonas aeruginosa
atgcaccgggtccgcacgcccttccaccccgagcagttcgatgtgctcaaggcggaacgggacgaacaggtgcagtttgtcgagcaaagcagaatcctcgatccgctgagggaatcacgtgttgaaaaatcacaaatgattgttgggcgctttatagcttaa

SEQ ID NO: 341781 - DNA, 192 bp, Pseudomonas aeruginosa
atggcgaagacctaccgtctgcgagacgaggccgtcgaagcactgaacgcgaagaggatcaagctgatcgtcgagcgcaaggaggatgtgaaggagagcgatctactaggcgcgctgatctggaagcacctgtccaccctcaccgcccaggatgtgaaggcctaccgagaacaggtcttgggcaaagattga

SEQ ID NO: 341782 - DNA, 282 bp, Pseudomonas aeruginosa
atggccgtcctccagacccacaaggtcgtcgcgcaactgcctgccgcgctggagccgaacgcgatctacttcgtccggcggagcaccggatacgaccagttcgtcaccaacggcgccggggtggtggtggcctatccgatgaacgtccgcatccccgcggctcttcctgggtatctcgccgatggctcgatgcttcggctcacgatgaaccctgacggccaactgccggcctataccgcaggcggcgcaactctcaacctacaggtgcttttcaatggctga

SEQ ID NO: 341783 - DNA, 282 bp, Pseudomonas aeruginosa
atggctgcgctccagacccacaaggtcgtcgcgcagttgcctgcggtgctggagccgaacgcgatctacttcgtccggcgcagcaccggatacgaccagttcgtgaccaacggcgcgggcgtcgtggtggcatacccgatgaacgtccgcatccccgcggctgttcctgggtatctcgccgatggttccatgcttcggctcacgatgaaccctgacggccaattgccggcctataccgccggcggcgcaactctcaacctacaggtgctgttcaatggctga

SEQ ID NO: 341784 - DNA, 777 bp, Pseudomonas aeruginosa
atgaccctgcacgaccggcgcccgcgggcgccccttttccaaccgctgccggccgcgctgcgacgcgccctgtcctggcgcctgggcttcgtcgccgccgcgctagcctgcgtcctgctgctggcactgctgtccgaggctcgcgccgcgggcggcgcctaccgggtcgacgacggcgagatcgatcccgtcggcgaatgcaacctggacgcctggcaccagcgcgaacgccaccacggcaaccgctaccagtcggtgctgtcgccagcctgcaccttctccgccctaccatcggtgcagctcggcgcggcgctggtgcgcgagggcgacgcaggcgatcggcacagccgcctcagccccgagctgaagacaccgctgctggcccgcgacgacctcggcctggcgttggccttcgcgctctcggcggatctctacctggaccgccggcacgccttcgaaggcgccggcttcaacctgccgctgagctaccagccgttcgaggccctgcgcctgaacgccggggtcggcctggggcatgcctacgccgagggcgagcgccggcatcgctggaactggggcgtgggcatggaataccgggtcggccagccgttgaccctgatcgccgaacgcttcggcgagtcggtcggcgacagcggctggcaggccggaccgcggctgcacctgggcgaacggctggacctcgatctgctggtcggcggccacctgcgcggcgagcgcgagcgatggctggtctcgggagcgaccttgcgtttctga

SEQ ID NO: 341785 - DNA, 498 bp, Pseudomonas aeruginosa
atgaacctccagaaccgcaacaacctcatcctgagcctgatcgccgagacccagttcgacgcctacgtgcaaggctacatggccaaagcaggcgctgccgccggtgcttccgagaatctgcaaatcgaggctgaaggtgctgcgatgctgcagggccttgtcgctccggttcgcgctcagcagcgtgcctgtggacagcccctgcagaacgtcctgctccaaatcgcccacgacctactgttgcagacgaagtcgcaactggccatcgcggccaatgccagctcgatccacgtgatccagcgggacatgaacagggctatctggaatatcgcgactgccatcgatcacctggccgaattcgcccaaccctcccaggacaccgtgaaggtcatcgaacggctgatgctcttcgtcggcagctcgcctagcccggaaggtcagcaactggccgcagaggcaagtgcagtgcttggcatgagcgagggggggctggcatga

SEQ ID NO: 341786 - DNA, 711 bp, Pseudomonas aeruginosa
atgaagccaatggacaagcaaaaagtcctcgccaaggtcgagaagctgatggccctggcgaatgccaagggggccacaccgaacgaggcggaaaccgcattgcgccaggccgcgatcctgaagcgccagttcgacctcagcgatgcggagatctcggcccacacggtggaaaccgcgtgcgttcccactcgaaccaggcgctctcctgccccatggctgcatgaactggccgggatctgcgccagttccttcggctgcgactacctggcggcatacgcgatgccagcgggctggacgttcaagttcatgggccgaggaatcggccctgagctggccgctcacgcctactctacgctccaccaccaactggtggcggcgcgctcgggtcatgtcgcccaacagaagcgctgcaagctgtcgaccaagcgccgtcgcagcaagctcttcgtcgaaggctggcttctcgcagtgcgttcgttggtacgtgactttgccggcaggccggacgagtcgactcaagcagccatcaaggcctacctcgaactacaccatccggagctgaaactcctgcagccggcagcgccgacgaagcccctggcctatgaccaggcttcgctgcacgcaggctgggagcacggcaaaaacactcgcctgcaccgcggcgtcagccggcgagttcagggcgcgctcgagcagggaggttcccgatga

SEQ ID NO: 341787 - DNA, 126 bp, Pseudomonas aeruginosa; identical to SEQ ID NO: 326417

SEQ ID NO: 341788 - DNA, 141 bp, Pseudomonas aeruginosa
atgttccggcagaaccgctggctggtcctggccatcgtctccagcgccctgttcctcatcatcatcgacatgaccgtgctctacacggccctgccgcgcctgacccacgacctcggtgcgacggccgcggagaagctctga

SEQ ID NO: 341789 - DNA, 645 bp, Pseudomonas aeruginosa
atgacgccctctacccatcagcgtaaaaccaggaagtgccagaaccctgcatgcagccaggagttcacccctcgcttcagcagcacgcaaaaggtctgctccccagcctgcgccctggccatcaaggacaagcacgccaagccggcgcggaaggccatcgctgaccgcgagcggagggagatcaaggttcggaaggagcggttgaagacgcacagcgaccacatcaaagatgcagagaaggccgttcgggactaccggcgaacctacgaactttccatcggcagcggctgcataagctgcggcaagtctcaggccgaggtactggccgaacaaggctggaagactggaggtgcattcgacgcagggcattttctcggcaagggggcaaggcccgagcaccgcctggagccatccaacatatggcttcaatgcaaggcctgtaacgcgggctcaagcaagtacgccaggaaggggcttaccgtttcccagggcttccgtgagggcttgatcgaacgcatcggcctggaagctgtggaggctctggaaaccgatcaccgtccccgcaagtacaccaacgacgaactgaaggcgatcaccgccgagtaccgcgccaagctgcgcgaactgaagagggcaacggcatga

SEQ ID NO: 341790 - DNA, 744 bp, Pseudomonas aeruginosa
atgcaccttctctatctcgatgagtccggaagcgtagccgacccaaaccagcgtttctttgtgcttggcggcgtcagcgtctttgagaggcagtcgcattggatagagactgagctgaacaaaattgccgaaagattcaacgccgaatctccatacgacattgagttgcacggctccccgatgcgatctggaagggatgggtggaaacaccatcccttgagcgcccggattcaggcgatcaaggatgcgctggcagttagccttaccagcaagaatgttcgtcttttcgccgcagttatcgacaagcgcgtatttgcaggcgcagaccctgtagagcacgcattcgagaagctatcgatgcgcttcgacctctttttgcggaggctctacaccaagcatggagatgcgcagagaggaatcatgctgttcgacaagagcagcactgagcgaaggattcaaacgcttgcccgcgagttcaaacacactgggcacagccagggccaaacgaagaattatgctgaggttcctgttttcctggactccaaagcttcccggctgatccagcttgccgacctggtagcttttgctctattccgaaaattcgagcacgctgacgatcagttctttgatgtcatcaaggaaaacttcgatgatgatggcgggatacagcacggcctttacctcagaactcaaagcggggcgccccctgcagtaatcgcgcaggtccaaccggcaaggatctag

SEQ ID NO: 341791 - DNA, 189 bp, Pseudomonas aeruginosa
atgacaatcattcacgaatgcgaccggtgcaacgcgcccggtcgcgtgatcgagacgtccgacggattccgctgcgagggttgctacgaggaggcgcaggagcaggtgcgcagcgaggcgagctgccccgagtgtgggcgcctgggggtgacggctacaggaatttgttacgcctgcgagaacacttga

SEQ ID NO: 341792 - DNA, 441 bp, Pseudomonas aeruginosa
atgaaagaactcggatacgaggaaggctctatctgcaaccgcgatggctgcgagggcgtgattgagctggagaaggtaagcaactgtagctgccatatcagcgcaccttgttgggcacatgagaacgctgacatgtgctgcaaggaatgtgggtggcgagcggcggatgaccctctctgtgtgcgcgagattcacacgatcagcctagacattggtggatatggggcattcctcgaaagcaagcctcgggtgcttgatccaaccaaaatcgactggacatgggaaccgcattcgggcgcgtcaatgatcaagaagggagttttccccatcggcacttcgcgcgccgaggttgaaaaagccgtgatcgggacgtttggcggccgcttcgagtacttcaacgatgagaaaggccagttcaagtacatcgcctacaccgactga

SEQ ID NO: 341793 - DNA, 222 bp, Pseudomonas aeruginosa
atggccttcgtcgaagtaagcaaagccgagttcttcggcatcatcggcccgcgcaatatacatccccgccctgagcgtgattgctcgatatgggaggacgtgagcacgcgggaggtgattggccgtaccgagcctgggtatctgcgccgccttggcaggccggaaaggtactggatcgcagacaaatacgccgcacctcagccggcgaaggagggggtgtga

SEQ ID NO: 341794 - DNA, 336 bp, Pseudomonas aeruginosa
atgaacgacgcaaagcttctgaatatcttgcactccacaaagaccttcgctccagtattaacagttggggaagatggatgggggcgagacgttcgctatgccgaaatgaaggaggatatgggtgcaaacggcttgtgggttagatacggagacttccgcaacctggcgattgagacagttaaaagccaggaagaaaatcagatgctccgttcggtacttgaggccttcgtgctgcgcgctgaagcatacattgaggcagggcgtggcatgcctgacgtatctatggaggcagtgctggaaaaggccagaacagccttggagggagccgggaaatga

SEQ ID NO: 341795 - DNA, 720 bp, Pseudomonas aeruginosa
atggatatagtgcttgagtgctttgttggagttttgcggagtgaagcgtttttttctttgttaactgctttgatcggcgccttggtggggggatggtttactagaaatgcaactctaaaggcacacaggcttagcacaacttctgcgcaaattgaaaatcataccaatacaaaaaactcactcactctgataaaggctgagattaaagcagcgtggagtatctacaatcaagagtatgtgcgtggtcttctcaatcttcctgatggtgatccatatctggttgcttgggcggtcggaaaggacagttttgtgatatttgacacgatgtcgcagtgtctcagtgaaatttctactgatgtttctgggatggttgttacggtatatatgcggctaaaaggggttgtcgcaatggttgagcagaataatgaatatgctgggttggcatctggtgttggtgtaaggcgacatgatgagatattggccccttttatagaaagtggtagggagatgtcaggtgaagagttgaagaagcatcaggaatatttggaaaaatatattaagtggcaggcaataagaatcgggatgggtgagcatgcggacgctctgaagaagcttactcaggatctcattgttgatgtggatgctgttttcgaagggttggatgcggaaattagtaaatttgatgagaaagtggctcgcttgcgttctagtctagagtaa

SEQ ID NO: 341796 - DNA, 999 bp, Pseudomonas aeruginosa
atgggctatatcactacagatctatcgttagatacaaaaatcaggcggtatatgtcattgcctaagctagagtctcttttgaactcgcagagtatttattttgcccggtttgacaggttcgaagatcgtttggaaggagggatagggccgaacaactactctgatgttagtaatgcttatgaaattcttgatattgctcttaatggcctagggcggttatctggttctggtggcgtagattcgctagctgtagatgtttttaatgaggcttttcctactatatttggggagataaaaaaagttgatggggactcatacctgcagggcgtccggtcttggctgtatgccagttgttggacgcacttgcctcatgagtgtcaggccatgtggcagttgtatggtagttctggggcgaactgtcgacatgaagttggttgtaacgaatgtcagaagagtttgggtatgtctatttgtttagagacaaccttgggggctgtgcttgagaatatagaactaaatgatggatacaacttgatagtgaggaagattgagtatttggatcatgagaagatgcgctttgatgaacgcgatatggttctaagaccttttttctctaaagcgctacattttagttatgagaatgagttgaggtttatgttatttccagatcgcaaggatataaagttctcttataaatacaatcagagtgaagttaatgaggttggtagtgtggctgtgtcggtaaagaatatgaaaggtttggtcaataaaattatattgtctccgttgccttttaaaaaacaagagcagattgaacgcatccacatggaacgatacgaaactgcactcggtttaccggccgctctggcaaatgaaacgctgagggcgagggtgcacgctctttgcaaaaagcataatctagagcccgtgatagtggattctgcattaaataacgtcggagcgagggatatctatagctccatgcctacgaaaggttga

SEQ ID NO: 341797 - DNA, 1122 bp, Pseudomonas aeruginosa
atgaacgacccactctggatctggcagcagcccgactggccgcagttcaactggcaagccgaagcgcttgcaccactgctgcgctcctgtagccaggctcagggtcgtttgttaggaatgctcggtgccgtggggagtgacaccgaagtgcagagcagcctggatgccatgctgcagaacatcgtcacctcttcagccattgagggagagcaactgaatgtcggttcggtgcgctcatcactggcacggcgactgggattgcacgaagaaggtcgaaccacctctcgctccgaaggcctggcggaactgctgctcgatgccacccacgcacatcaagagccgctagacgaacagcgactgttcacctggcaccgttggttattccccaccgatgagcaactgctgactcgaccgctacacatcggtgcactgcgtggcgaagagcccatgcaggtggtttccggtcgcatcgaccgcccgacagtccatttcgaagcccctccccgcgcggggctggaagcgcaactggcggactttctcgcctggttcgaaagcagccgcagcgatgccagcctcgacccgtttctgcgcgccggtatcgcacatttctggttcgtgaccctgcaccccttcgacgacggcaacggtcgcctcacccgcgctatcaccgatctagcattggctcagggcgagcagcaagccattcgcttctacgccatgtctgcgagcatcctcgacgaccgcgccggctattaccgcatcctagaagccagtcagaaaggcgggctggatatcaccaagtggctgcagtggtttctcgaaaccttgctcaagagcctggagcaggcccttgcccgtatagaccgcgtgctggtcaaggcgcgcttctggcaggcacaccgcagccaaacgctatcggcggagcagatcaaagtgcttaaccgcctgctcgatcgcggcgaaagggggttcgaggacggcatcagtgcggcgcaataccaagctgtggccaaggtttccaaagccaccgcgacccgccacctgagcgacctgctggaaaagggctgcattgagcgactgcccggcggagggcgtagcacccgttaccagatagcacgctga

SEQ ID NO: 341798 - DNA, 252 bp, Pseudomonas aeruginosa
atgtcctccccaaccccgcccagcttcccgccgggaacgccgattctcgtgcagccagaagggttcgacctgatcagcggaaaatactatgtggccaagcactcggatggcgaaaccacgttcaagcagtacgtctacgacgcaggggtcaagtacttggtcccgctgaacaaggcctacaggacactggagatggatgacgactgggagatcattggtcgggtgatagatgcaaaagtacccggcctataa

SEQ ID NO: 341799 - DNA, 234 bp, Pseudomonas aeruginosa
atgactagccgcatcggagcgaaagcgctcggtgaccagctctacagctacatcggcgccatccaggacttggctaccgcagttcgcgaagacttggctttcgaaggtttcgagccgggcccgcgcctgaccgccgaccaggtggatgcgatccatctgtcgattatcaccatcgccgggctggctggcgaggacttgatccaactgctgaccgagctggaggtgccggcatga

SEQ ID NO: 341800 - DNA, 1338 bp, Pseudomonas aeruginosa
atggcgaaatttatatttacaagaagatcactacaagagtcaataaatagtctagaggaagttctagacctgagtcagatcaagtctctggtagaccggataaataaaccgggagaacgtagcctacataccatgtgggagatagctgtcctagatgcgctgtccaagtgcggaaagcttagtcatgaaaaagaaatcaataacggcaaaaagcctgacatagagcttgtgctggactttgaagatgactcatctatatgcattgtaggggacataaccacaatatcggataacggcttgcattctcaaaatcctataaaatacttgagagacgaaataagaaggctgtgcgggaagttcggcttaagctctgagaaaatagcactagatgttcgaggaaggacagagggaaacgcgagaagcgagaaggtaagattaaaaatccctggacaaaattcattaaaagatctaataaataatgatatagccacatggttaaaaagcgtaaaggcaaacgccagccatccaaatagaattgaatttaacgaaaatgatcaagaatttagcttgtcgtacaatccaagctggactggcggagaattcacaagccatgcaagctatactgtggctctatctattaacaagaaccccatatacaactctttaaagaaaaaactagagcagctaaaaagagcaccaccaaattcacttagaataatttttgcttgcgatggagggtgcgatttatttcggcgcaatgggttttctcaatcatcatttagtgccgcagatatcgcgcgcgagttccttagaaataatagcagcatagatgccgtagttctattgacagtatttgaggaaagaaaattttcctctgtagagattagttattatttaaagtaccagattgtattgggagagtcaccccggctgacgtcgacgaataaaaccaggcttgaagttctgactaagaagatgatgtcatttatgtcaagcccggtaaattctgcttacaatgctgctgtagcctgtctcgactcaaggtactcatttggaatggcaggagggtatcagttgaacggtaaaaatattagcatttcatcaaaagcactacacagacttctttccggggaaattacactgcaaaatttttttgacatgcatggttggagtaacgaagatgccttcgggaacccgtttgcaagaaacttaaaaaacggtttttcaataaaaaatatagaaatccttgagataaaggataaggaagatgaatggcttgagtttaaatttggcggtccggatgcatcaatttctccttttcgggtaaacaaaaaataa

SEQ ID NO: 341801 - DNA, 264 bp, Pseudomonas aeruginosa
atgacgatcgtgtacgagccgcatccggttacgccggagcgcaaggctgaactgcgggcgatggggtaccgaatcattgatgttgcttttgcccccctgggtagcgatgccaagggtgggcaggagccgcccgccattggcgacgaattggaagccatggacgccgaacaactgcacgcactggccaaggcccgcggcgtcaacgtccatcgcaatgccgggtctgagaaggtgaggaaagcgttacgcgaggcttccgaatga

SEQ ID NO: 341802 - DNA, 1323 bp, Pseudomonas aeruginosa
gtgtcccgactaccccgtacctatgacccgccggtgaagctgacgcctaagcaggcgaacatctacgtttggggctttcagcccgaggcgcgttttcgtgatgcggtgtgcgggcgtcgattcggcaaaaccttcctcggcaaggcagagatgcgccgcgcggcccggctggctgcggagtggggcgtgagcgtcgaggacgagatctggtatggcgcgccgacgttcaagcaggccaagcgggtcttctggcgccggctgaagcaggccatcccagaagcctggcgcgcagctcgaccgaacgagaccgagtgctcgatcacactcaagtccggccacatcatgcgtgtggtcggcctggacaattacgacaacttgcggggttccggtctgttcttcgttctggtggacgaatgggcagactgcccgtgggcggcctgggaggaagtgctcaggccaatgctttccacttgccagtacacgatcccccagaccggagagtcgagaaagggcgggcacgcgctgcggatcggcaccccaaagggcttcaaccactgctacgacacctaccgcgacgggcagccgggcggtgagcctgatcacaagagctggcagtacacatcgctgcagggcggcaatgtcccggcagatgagctggatgccgcccggcgcaagatggacccacgcacgttccgccaggagtacgaggccgggttcgagaactatgccggggtggtttattacaccttcgaccgcgccgagtgccgcaccagtgagcgcatcaagccaggcgaggcgctgcacatcggcatggacttcaacgtcatgaagatggccgcggtggtctatgtagtccgcgatggcctgcccttggccctggatgagttccactcggttcgtgacacgccggagatgatcgagaaaatcaaggcgcgcttcccagggcacggcatagcggtctatcccgacgccagtggccagaacaccagtagcaagaacgccagcgagtccgacctgtctctactgcgcaaggctggcttcacggtgattgtggatagccagaacccaagcgttaaagaccgggtgaattcggtcaacgccatgctgatgaacgcctacggcgagcgccgtctcaaggtcaacatcgaccagtgcccgcatctgaccctgtgcctagagcggcagacttacaacgacaagggcgagccagataaagacccgaagaaggggtacgaccacatgaacgacgccgcaggctacttcattgccaagcggtatccgataaacgctcgcccagtccaatcgacaccactcaggatgtaa

SEQ ID NO: 341803 - DNA, 477 bp, Pseudomonas aeruginosa
atggcagtcctgagcagcgaggtgaaagccttcatcgttcaggccctggcctgtttcgatactcccgcacaggtggcggcatctgtccgagaagaattcggcatagaggtgagccgccaacagtgcgaatcgcatgacccgaccaagagcgcaggccgagacctggccaaacgctggcggaccctgttcgaggacacccgagcgcgctttcgcgaagagacagcagagatacccatcgccaaccgagcctaccgcctccgggcgctggggaggatggccgagaaggtcgaaggcatgcgcaactacggcctggctctccagatccttgagcaggcagccaaagaagttggcgacgtgtatgtgaatcgcaagatcgaacccgacaagcccctgggctcccaggcggaccagcagcacgcagttgctgagtacaagctggagccagacgaaggtgtcccgactaccccgtacctatga

SEQ ID NO: 341804 - DNA, 198 bp, Pseudomonas aeruginosa
atgacttcagagcaatttgcatactggctgcaaggcttcgtcgagttgaacggggcgccgccaaacgaaacccagtgggtgcagatcaaagaccacctgaagctggtcttcgagaagcggactccggcatacccggcttatcagtcaccacccattggtatccctcgggatttcaaattacctacggttacctgctaa

SEQ ID NO: 341805 - DNA, 186 bp, Pseudomonas aeruginosa
atgaagtacaacgagttccggcgatggctggtagcccaaggggtgaagttctcgaagtcagcaagcggcagccacttcaagatcacctacaagggccgacagacgatcttcccgaaccacggcgccaaggaaatcggcgaaggactcaggaaggacataatcaaacagctaggcctcaaggactga

SEQ ID NO: 341806 - DNA, 468 bp, Pseudomonas aeruginosa
atgtacacctacaaaatcatcgcccatgaggaaaacggtcatttctggtcatcgtgcccggatattcccgaggcacacagcgctggcgattcactcgaagaacttcttgaaaacgctgtcgagggaatcaccctggcgctttcgatctatgtagatcgccgtcaggagattccaaaggcttccgggaaagggcaacaccccattcatcttcctggggtcacgaccgctaagattatcctttggaaccagatgcttaaagctggcatgtccaaggcctcgcttgcggatcggctgggcgtatcccccaccgctgccgctcggcttgtcgacttcgagcactcatctcgactggagtcgcttgaagatgccctcaaacatttcgggataggcgtcaaggtctcagaatgggcgatataccctttggcaaaggagcaagcgaccggttctgaacccggcacagtcatatga

SEQ ID NO: 341807 - DNA, 303 bp, Pseudomonas aeruginosa
atgcatgaggttctggcgttcctcagcgcattgcgcgagcttcaccccgacatgaatcgttgggggctgcatggtggctgcttccgagtgtacctggtgctcaagaaccggttccccgaggccgagccctggtatgacggggaccacgtcctgacgcggatcgctgagcgtttctacgacatccgcggcgaagtacaaccgaacaaccaccagaggatggatccgctggtgttcaaccgcgcctacgactggcaccagccagcgctcagtgcagagcaggccgcgcaggagcagcacgcatga

SEQ ID NO: 341808 - DNA, 207 bp, Pseudomonas aeruginosa
atgaacactcaagctcaagcattccacctcatgatcgaagtcaaatatggcgatagcccgtcctattggcatccggctttcgaagctgagacccaagaggaagcaaacgagttgatccagcacttcccgcaggcctacggtgaaatttcccgtcgcatcgtggtaggcgccccttccatggactgcacagaattgcggccctgctga

SEQ ID NO: 341809 - DNA, 372 bp, Pseudomonas aeruginosa
atgctgaccctcacccgccgagtcggcgaaaccctgcacattggcgacgacatcaccgtgaccgtcgtcgagaacagaggcggccagatccgcctcggaatcgttgctccggaagcgatggccattcatcgcgccgagatctacgcccgggttggcgcagtccggcccgcctcacccaaagacctggttgaagagtggaatcgcatgcatccgaatccggtggccgttgagtaccgtccgctccgcgacggcatccccatccgcaccagaacgctcactcaagccaaagtttccgcctccggcatggcggtgatctggctagaaggccaggccacgccggtgctgctgcgcaactgcaccgctgtttcctga

SEQ ID NO: 341810 - DNA, 1206 bp, Pseudomonas aeruginosa
gtgcgtggcgacggcgagtccggctcgatccgggtcagcgtggaaaagatcgacagcctgatcaacctggtcggcgaactggtgatcacccaggccatgctcggccagctcggcgagcagctcgacccgagccgccacgagcgcctgcagcacgccctggcccagctcgaacacaacacccgcgacctgcaggaatcggtgatgtcgatccgcatgctgccgatcaacttcatcttcagccgcttccccaggctggtgcgcgacaccgccacgcgcctgggcaagcaggtcgagctgcacctgcacggcgagcacaccgaactggacaagagcgtgatcgagaaactcagcgatccgctcacccacatcgtccgcaacagcatcgaccacggcatcgaaacgcccgccgaacgcctcgccgccggcaagccggcgagcggcacggtgaagctcgccgccagccaccagggcggcagcgtggtggtggaggtttccgacgacggtcgcggcctgtcgcgtccgcgtatcctcgccaaggcccgcgagcgcaacctgccggtgcatgacgggatgagcgacgccgaggtctggcaactggtgttcatgcccggcttctccaccgccgaggcggtcaccgagctgtccggacgcggcgtcggcatggacgtggtgaagcgcaacatcggtgccatgggcgggcgcatcgacatcgactcggcgcccggcatgggcactcgcatcggcatccgcctgccgctgaccctggcgatcctcgacggcctgatcgtcgccgtcgaagcggtcaactacgtgattccgctgacctacatcgtcgagtcgctgcaggcgcgcagcgacgacgtgcgcggcctcggcggcgaagacaacgcgatgatccgcgtacgcggcgagtacctgccgctgttcagcctgcacgagctgttgcgcatcggcggcgaagcgccggcgccggagcagggcatcgtggtgatcctcgagtccgaggggcgcagcttcgccctgcaggtggacgaactggtcggccagcagcaggtggtgatcaagagcctggaacagaatttccgccgcgtggagggtatcgccggcgccaccatcatgggcgacggcagcgtcgccctgattctcgacgtcgatgcgctgccacgcctggcggcgcgggaggacaccgccgatgaacggcactga

SEQ ID NO: 341811 - DNA, 732 bp, Pseudomonas aeruginosa
atgaaacggatcgatatctccgggcttcgctatgggcgtcttttggtggtcgcctacgactctcccgggaaaaatggaggatctgtctggctctgccggtgtgagtgcggagccgaggtcaaagtgaagtcgtcgaacctgcgaagcggctcgacacgttcgtgcggatgcctcgccagcgaatgggcttcagcacttggctcaaatagggaattcgtcaggaagcgtgcagccaaagtcaccgcgcacggacacagccgtcgagggttgaaaaccccggagtacagaacctggctaggcatgaaacgcaggtgctacgacgagaagtacaaggacttccctaactggggcggtcgcggtatcaaggtctgcgaacgttggaaagagtcgttcgaggctttcctcaaagacatgggtcctcggcctgctgggaggtacagcatcgatcgaatcgacccagacggtgactactgtcctgaaaactgccgatgggccacgatccagcagcaagcgtccgagaaccagcgacgcctgacccgagtcgagatcgacggcactcagttcaccagcatcgcccaggcctgcgcccatttcggagtcaacgtctctaccgcccaccagcgcatcaaagccggaataccggtcgatattgcggtgcggaccagcggtcggctcgccgctcggcgggaaagggagtcttacctgcgcagggatcggcgaggtactgcgtga

SEQ ID NO: 341812 - DNA, 327 bp, Pseudomonas aeruginosa
atgcctttgaagcagttttccagtgcactcgttctcgcggccctgctcgccggttgcagcagcaacggcgacggcccgtccaccgaaggcgccagcgcgcccgcggccaccccggcagcggacggccgttgcgacgccaatgcggtgcaggcctatgtcggcaagcaggcttccgcggccatcgtcgaggaggcccgccgcgccgccggagcggaagtcgcccgggcgctgcgcccgcacgatgcggtgaccatggactacaacccgcgccggctgaacatcgatgtcgacgacacgctggtgatcaagcgcctgtcctgcggctga

SEQ ID NO: 341813 - DNA, 630 bp, Pseudomonas aeruginosa
atgaccttttcaagctgcctcattaaccagagagctgccctcgtcctggatgccagcgtaattataaatttgttggcgacggggcatgcgaacgcgatcctgcaagcattggctgttcctctctatgtaaccgacaatgtcgtgcgcgaaattgagcaaggcgcagtaaatggccgtccagaaccagcgttactggctgagctaatcagcaaccaagccttgatagtcaaggagcttacaggaaccgccttggaagatttctttgggatggtatccggacatacctcaggctcacttggcgacggcgaggcggctactttagccctcgcatacagaaatgggttatctgccgccattgacgaaaagaaagctacccggatcgctgctgagcgctttgagaccctgaggctcgtcacaaccgtcgatattcttgcgtccccacttgtgcagcaatccctgggaaatgaagcactcaccggcgcaacgcttcaagcgctacgacgcgcaagaatgcaagttagagagcaccaatttgattggatagccaaactgattgggatggaaaacgtgaggacgtgcccgagcttaaaacgacacgtaaaacgaaatcaacctgcgttaagcctttaa

SEQ ID NO: 341814 - DNA, 1155 bp, Pseudomonas aeruginosa
atgaatatcgagactttgaaacctggttggcgtcgggtgaggttcggggatgtggttaaactctcgaaggcgcgtagccaagatccgctggctgatggttttgaacgttatgtcggtttggagcatttggagcccggcgatttgcgcattcgcagctggggcaatgtcgcagatggtgtgacctttaccagtgtgtttcagcctgggcaggtgctgttcggcaagcgccgcgcctaccagcgcaaggtggccgtagcgggtttctctggcgtgtgttccggtgatatttacgtactggagaccaaggatgcacagaccttgctgccggagttgctgccatttatttgtcagaccgacgctttcttcgatcacgcggtaggcacatcggcgggatcgcttagcccgcgtactaactggacaagcttggcggatttcaagtttgcgatgccacccgtagaagagcagcagcgggtagtccacttcctttcgaccgtggaagaacagtcggaggctgttctgcaagcacttacggctgcgacaaaattaaggaagtcgctagccctggaggcattctcaagaagtgagtatccaatagtcaaaatgggtacggtggcagagataaggaacggctcaacaccgcgtcgagcaattgatgactactggaagggagacattccttggcttccgacggggaaggtgaatgagcgggtgattcgaactgctgatgagttcatcacccggaaagcattgtcggaatgctcgctagcattgatccccgcaggcgcaacgttggttgccatgattggtgaagggcaaacacgtgggcgtgcagcaatgctagcgattgactcctgcattaaccaaaacttcggcgcagtcattcctggcggctcgcttgacccttggtatctgttttatctgctggagtctaactatgaggctcttcggcattggtcgcagggtacgaaccagcgtgcgctgagttgcggcttgctgaaaaattacccgatcccagttcctccactcgacgtgcagcaggaactggtgggccagctcaaggaaattgaggcgacagaaagtcagttggcattgcggcttggtatggttcatgagatgcgccgtgctgcccatctaacagcgttgtcaatggagtag

SEQ ID NO: 341815 - DNA, 708 bp, Pseudomonas aeruginosa
gtgaaggcagattgggacgacgcaccacaacatctgtactcccccaaaaaagctagaagctttggtaaatggctaggcttcggactcttaggggttgcaataactattgctcttttatatgtaaccgggactcagttttcacttgtacgaagccctgtccctgccgaaaattccgagaagcctattgaagtttcgcaaaactcttttgagtttgaagagaaagataaaggtcagtccgctgcggaggaaatgttctgggcgaacataaagcagaaggaggcagagcgccggagccaagctaaacaaactgattataatgatagtaattacaccccgagaactccggacaatatagttagcatgagaggtgtaagggagtcgtccgcatatcaaaacccagttcaacgaaaaaatacgagccataaagctatcgaaaaatatagagtatggattaagagctgggacggagggacacgctatcatgccgcatggacagtaattaataattatatagatggagggtccgtatgcgggaatcacagaagaggatcaatagagtatagggagtgtcggaaaggcgctaaacaacactttaaaaacgaatgtcgcttatggagtgatcgctggcaaagtagccgagaggtgcgaagtgatcgcatgaagcagaggtactgttcagcagcagacagctttagccccatgggataa

SEQ ID NO: 341816 - DNA, 600 bp, Pseudomonas aeruginosa; identical to SEQ ID NO: 330050

SEQ ID NO: 341817 - DNA, 459 bp, Pseudomonas aeruginosa
atgatcgacccagcagacaagcaaacccaagccctccccctggagcagccgaagcgcgggcgcggtcggccagccaccggcaaagcgctgtccgacgcagagcgggcgcggcgctaccgggcgaacaagaaaaatcgtgacgcccaaccgtcacgaaaagaggccccatcgatccccactgatggcgtaaaggaaatcctcgacggctggcagcgcacccaagaggaactcgaccaggcactgcaacgaattgccgagctggaagccgaattagcgtcacgcgtcacgaaaaaagaagaagccgaggcgaaaacttgggcaattcaagagcgcaagggcaaagcgcgctggcagaccatcagcaagggcctgacccggaaggccggcgagcgccagttcgacaagctgctgtcgggcctgacagatccgcgctacacctaccgcatgattgaagaataa

SEQ ID NO: 341818 - DNA, 330 bp, Pseudomonas aeruginosa
atgacccttgcagcaaacctgaaaaaatttcgggccgcccgaggcttgacacagcagcaggtgtacgaggccgcaggcgtgagcaagtcaagctatacgggatacgaagcgggccatggaatgccgtccgcagacaaagccctggccatggccaaggtgttgggcgtgaccacagacgaactcttgatggacgagagcgaactactgatatctgacgacatgcgtccgatattgcggagattcgaagccttgccggcagagatcaggaatcaagcaaggatagccctgaaaggcgtgctgttcgggtacgagcaagaagcactacgctag

SEQ ID NO: 341819 - DNA, 1137 bp, Pseudomonas aeruginosa
atgttcatcgactggcttagcgtttcacaagaacaccctcacgaccttccggtcgtgtgcgacgtgtttacgctcacagtcgatgccagtacccatgaggttctgagtacccgtcagccgtggttcaagcatgagggtagttactccacgtcgatcaagatcagtgtccagggtcgcaaggttcgtgttgaggggaatcccagccgaattgaccgtcaggacaacctttttggctacgtcaccatcgagcagtgcatcgccgtctataaccagcttctggctgagtacggccttcccgctttcacccggtgtactgcaatccatctccgtgacggagcctccggcgctcgccctggtgattgggttgctgatggatgcgttatcgaccgcatcgacctgacgacgaatgtttccgtaggggagggcaacgtgctcgcctacctgcgcggcctgtctacccagcgtattggccattccgttggctacctgtatccgaatggccggactgtcgattggactgctgccggcaaaaggaaaggtggtgtccgcctccagtatcgaaaggcgtacgacaaagcctttgaaatgggcgagcaccttcgcccgcgcgttctgcgcatgttcggcgatgaatcgccagagctggcctacgtggaccagctgatttcgtactgcaaccagcatggcgttgtgcggcaagaacaggaactgaaacaggagttcctgagccgcgagggtcttcgctactggggccttttcaacgaaaaccgtctccgcgatatacacgatgaatttctggcggtggacaagaaactgaaggtaacggccatggaccttgcgaccatttcccagcaactgattgccgaaggtgttgttaccagcacctatgcggccaacatgaccgcgatggtcgctatcaattggagcaacgggcagcctttcgacaagaacaaccggtccctccaaaagcatcgcgcacgtcttcgccagatcggtatcgacatcgctaacccttgcgataccagccgcttcacgcccgttatcgtgcgccaggctcgcgaggtcaccaagacttacgaccttccgattccggactggtatcgccgtcctgtcggtcatctgcggttggtggcctga

SEQ ID NO: 341820 - DNA, 249 bp, Pseudomonas aeruginosa
atgggcgcgctcatgagaacggtcagcttccagggcgcgaccctctctgccagcgaacgccgctcgcttgagcttcgccggcgagccatggcggcggtgaatcagtccgtgctgcaacagcaggttgcggccacgctccaggcgctggaacagcacaaagagcagggcggcaagcccgaaaaggtctggtccacgatctctaacgaaaagggcacgccgttcctgggcgacgtgttcgggtggccgtga

SEQ ID NO: 341821 - DNA, 309 bp, Pseudomonas aeruginosa
atgcccttcgtctatctcggcctgacccgcgacgccggaacctcgaaaaagaccggcaacgcctacgacatcgcggtcgttcacttcgccgtcgatgccacgcaatcgactcgcgccgatcgcaagtttgccctcggtctggagcctcagaacctgccgatcgcgccggaagcggtgagccaattccagcgcgttgaaccgctgtcgtcggtgaacttcgagttcgagccggaccctcggaacatgcagcgcaaccgtatttgtggcgtgaaaccgctgtcgaaagctactgctcaggcggcgagttaa

SEQ ID NO: 341822 - DNA, 486 bp, Pseudomonas aeruginosa
atgcgcgggcgcaggcagtacgcgcgcaagggacggcggcatgggaagggagccatctggctcctttccctgggtctgccgatgttcgcgtcggccatgcccctcgaccaggcggtcagggcagggctggcgatccacccggaagtacgatccgcgatggccgaagcggaccgtgcaggcaccgaggtggagatggccaaaggggggtactacccctccgtgacgatgtccggggggccgcaggagttcgacttcggcgagatcgtctacgatctcaccgcgtcgcagatgctgtacgactggggtcgggtgacgagcaaggtcgacagcgccagcgcgacccagcgcaagctgtccgaggcggtgctggtggcgcgcgacgatgcggcgctggatatcgtcgagacctacctcgatgtgcttgcctcggagcgccgggtggaggcggtgcgcgaacacatccagcgcctcgacggcatccgctag

SEQ ID NO: 341823 - DNA, 390 bp, Pseudomonas aeruginosa
atgtccaagcaatccaccagcttcgaaatcggctttgccctcggcagtgttgtgcgtgagttccgcagagcgctcagtcgccctccggtcgtagtgcaagcacaagcgccggttgcgttgagcgtccggcgcatcgaccctgccttcctggccggcccgaccgctggcgagctagaacacatcagcgacatcccagccatcgtccggctgaagaaggtcaacctgaatgactggtatctagccaatacgcgcgaggtgcaaaagcccaagcgcgcacgcaaacccaagccggccaaggcgaccgcccaagctgaaacgccagtcaggaaggagctcaagatgggttccctcgatcaactgatcgccccggttgatccgctgacctgctga

SEQ ID NO: 341824 - DNA, 366 bp, Pseudomonas aeruginosa
gtgatcaaggccctggacatggcctacgaacagcgcggcaggccacagcaggtgctgttccattcagaccagggcagccagtacgccagccgcctgtttcggcaacggctctggcgctatcggatgcagcagagcatgagccgtcgggggaattgctgggataactcgccgatggagcgcctgttccgcagtctgaagtcggagtgggtcccgtcaacgggttacctgacggcgcaggaggcccaacgggacatcagtcattacttgatgcaccgctacaactggatcaggccgcatcaattcaacgacgggttaccacctgcggtggccgaagaaaaactcaacccactgtccgggatgggttga

SEQ ID NO: 341825 - DNA, 198 bp, Pseudomonas aeruginosa
atgtgtgactcgatcgtgtatgcccccatggatgaactcgaattcgagcggctgctagggctggcaaccctattcaacgacaacgatgaatggcctatcgactttacggagctgcaggaactgagcgagctgctcggcaagctcaaaagttgcgtcgacgtagcgatagacaatgcccctgaggcggccaagagctga

SEQ ID NO: 341826 - DNA, 339 bp, Pseudomonas aeruginosa
atgctgatcaaacttcccgactttgacgacgatctggccgaacggctgaagaatcgcactggccagaacactggctccaaggctgtgctgcgtgctgctgaggagtatttgcctcttctgctgaagctggaacatcgcgaccggcagattgccgagcttgaagagcggttgcgagtggcaagtcaggtgatcgagggcgctcgctcggctgctgcgctgctgcttgaaaagaccgctcagggcgatctgctcgccgctccggcatcgagcaagccgcgcatgaccggtgaagagatgttgaacgaactgcgccgcggtgcgggcttgcgtcagcgttga

SEQ ID NO: 341827 - DNA, 180 bp, Pseudomonas aeruginosa
atgcccaccaaacacatcgacgaggccacctggcgcaaggtggaaaaagagaccgtcaaggcagtgatccaccttcaggcatcggttaaagacaccgaggtcctacgctggctgatcctgaaagggctggaagaaatcactcccgaagacctggagcgcttccacaaaaaaagggactga

SEQ ID NO: 341828 - DNA, 756 bp, Pseudomonas aeruginosa
atgcccgtgcaattcggcctcgctgaaaccggtggcgatcttcggcgtgttctgcgggtagacctcgctcagggtcttcatcacctgctctttgtccgggtgcaccaggatcttgccgtcgccgctgaccaggaaggcgtagcccatgccgctgaagtccagcgaattgatgatctgcaccagggtcttcaggctgaggtcgccgcctaccacgccgagggtgttgccagcggccttcaccggtgtcgccgcggtgatgatcaattcctgggtggcggcgtcgacgtagggttcggtcagggtcaggccgccggccgccacggcgtccttgtaccagggccggctgcgcggatcgtagccggccggcatcgggctgtccggacgcatggtgaagacgccgtcctgctggccgaggtaggtgaagctgaaggtcgaggtcagggccggctgttcgagcagggcgctgacggtttccgggctgtggtcgcgggccagggtctgggcggtctgctcgaccagcagcagacggccgccgagccagttctgaatgttgctggaagtcacgtcacccatttcccgcaggtagctttcgaggtcctcgcggatcgcgttgcgctgcaggtaatcgttgtagagggtgaacagtgcgaaagcggcgaacaccacgagggaggccgcgaggaggatcttgtggctgaacttcagacttttgatcatgttgtattgcgtccaggagtatgtagcgccagtctttga

SEQ ID NO: 341829 - DNA, 282 bp, Pseudomonas aeruginosa
atgaagatcgatccgtacatccgcaccaagggtgagcgcgccggggagccgggagcgagcctggaatcgacgctgatccacatcggtctgatcaagatcgacggcacccaggtctatccgacgagccaggcgcaagccgaggcgtcgcaggccgaggacgcacccgcgcccgaagccgaggacgccgccgacaccgctgccgaccagcctatcgagcccgccgagcgcgagcccgcaggtgaagtcgaagagcaggagccggcattggctgcttcgttctga

SEQ ID NO: 341830 - DNA, 222 bp, Pseudomonas aeruginosa
atgggtgactgtatgaataacaacatgcgctccggctgtggccggtttctctcagtgctgggtctgctgttcttgctgttgtggcatcccgtggccagtgctgaattcttttggtggcaggttaatggcatcgaccgtttgcgcgacaagccgtttggctcgcctggtgaggggtgttcagcggtgctggcctattttcagtctcagggcggcgagttgtag

SEQ ID NO: 341831 - DNA, 261 bp, Pseudomonas aeruginosa
atggacccgatcctggctgcgctcccgctctcgctgttaaagctcgttgacggcagtttgtccaacgacgaagtttcctccgacgaggaaatgctggggtacttcatcgacaacggcctcaccgaggagcaggcacggcaggcgctgacctaccgcgaccagtacctcaacaacatctacctggacggcttcacgccgatcaccgcggtggacgaggcgcttcacttcaatccgcacacccaacagttcgagccggactga

SEQ ID NO: 341832 - DNA, 315 bp, Pseudomonas aeruginosa
atgaacttcttgctggttctttcgccgcagtacgggcccgcggaatttggcgactacaccactgtgtcggtttccggcggcgtgcttaccgtcgaggatcgtgactatgcgttcccagacatcgaagacggcgccgagctcacgatggatgacttcgccgatccatatcccgtctaccaggttcggcggcgaggcgacacgatttcggtgtggatcatttacagatatccggcagatgcgacccatgctgccagataccccgagccggtttccgttccgggtgatttcgacgggcctgttgatctgccgaggtga

SEQ ID NO: 341833 - DNA, 369 bp, Pseudomonas aeruginosa
atggccgagccgagtggtgcggtagcagtcgccggcctggtcggtattggtgcgtctgcattgatccctggcattgatgccaatgcagtgatcggtgcttttgctggggcgatcttcttcgtggtgtacgccaaggacatttcggcctgggcgcgccttggttacttcgtcgtgtcctggatcgttggctactacgtcgccggcgaagtcatcgggcgagaatgggccagaacatcgggcctggtcgcgtgtggcggggcattgttctgcgtcgcagtgggcaccagcttgctggagtgggtgcagggggggaagacgcccggttggctccgcttcattgcggaccgctttggaggtcgtaatggttga

SEQ ID NO: 341834 - DNA, 909 bp, Pseudomonas aeruginosa
atggctgcagtacagcgccgcgaggagcgtttttcggggcacgagtctttcgtgtgtcgctacggctggctacctaagctgcacaatgcggtagctaatgatccgtttgcgctaaaggacgaagcccaagcaaccatcaccttgggcatcggccgcaacatggtgaagtcggtgcaattttggggagaggctttcggaatcatcgaggctcgggaggggggaggcttgcaatctggccctttggggcagctcctactttctaacgatggcggatgggatcgtttccttgagcaatccgaatcgctttggctcctgcattggtggatcacgacgcatgctgacgttgccgtttggaacctagtcttcggcaagagcacctactcgcgctttgatcgtagggcgcttattgcgggactggttgatcgtgcagataagctcggcaaaaagctcgctagcacaacgctggagcagcatgccagcattttcctacattcttataagcgcgaagagtctgcttcagatgatacatcctggtgcccgctgcaagatctaggtctttttgagcagacgactgccgacgacggaaagaccgtgtatctggttggtaggaatgctcctttaggcctatcgcctcgaattttcctgtttgcagtcgtggatttctatgctcgtcatcgcgccattacccgcaacctgaccgatctcacttacggagaattcagtccaggtgttgtgtttcgcctagatgaatttcaggtgcgtgcgctcctggaaggggctgagcaggaatttcctaacgttctgcgttttgttgacactgctgatactcagcaagtggttcttgagcctgcgctagtgcccgagtgggctggatgcttgtgggtagctggggaagaattgaatgtctga

SEQ ID NO: 341835 - DNA, 2412 bp, Pseudomonas aeruginosa
atgttcaaagttaaagcaagggtgcttttggagctcggagcagagcttatcagctcagatggaatcgccatttatgagcttattaagaattcggttgatgctcggtcacctaaaattgaagttcggattaatgtggttttgacatcctccggataccaggctcttgtctcggaaattcggcaatcctcaactactacagtgagacgggatgacattttcccacacttcaataggtgctttgagcctggtgtcagccaagaggtccgtgatgggcttatgggggctttagaggggcttgagatcagcaaggctcttcactgcctaagggagttttactgcgagcactcctatattgaagtggaggactggggggatgggatgtctctggagagcctccaatcaaacttcttgacaattggcacgccacatcgagcaaatgagcgagtcgctgatgagggctctaatagggatagtcctatccttggtgagaaaggaatcggacggctttcttcaatgcgcttgggagagcgtctcttcttatctactacaacgcttgaaagttcgaattttgccttgctaagtgttgattggaaggccttgggtgaaaacctgaatctggaccttcacgagttcaaggtaaaggctacagtgggagagagcaagtccggagacaagccgaagggaacacttattagaataagtgatctgcggagcgattggtctttgcagcggattgttcaaattgcgaagtctgagctttcgaagcttcaggatccctttgatctggacggtaatgtcttggatttgcgaatttcctttaatgggaagcgtgtcgacgtagtggaggagttagatcaagattggctttcggggtggcatgggtattttgatttttcttttttctacaaagaaatcaatggtgtaagagagccagtgattaagggggtggtgaagtttaaaccgccacaactgccagggcaggatgccttagaggttgactcatctgagatttatagcgctggtgatgatctatatagcctccttgctgatgatggtcagcccatcataaagggtggaaaagaaaatagtgctgctagatttgcaggtatacaaagcctagggccattctccgcgaccgggtactggtttaataggcaaaggaaacagcgtgagttgccaaaggaagaataccttgagtttaaagagtggctaactcaatgggccggtgggctccttgtatatagagatggttatcgagtttatccctatgctggtcctgacgatgattggctgcacttagatcagaaggccctgaggcaaaagtcttttaaacttaatagggggcagttcgtaggtcgcgtgcaaattagttctcgcgataaccccaatctcaaagatcaaacgaacaggcaagggctttgtgattcgccggagcagaaaaagcttgtgcagtgccttcagtacgtcatatggcgtgaattgggggcgctggtaagaaagtatgaactgaagaccgctactaggtcgctaagctcgataaaagagatagatgaaaaggtaaaaggtagctctaaagatgcacatgctcagttgcgggagttggagaaatatcttcccggagaggagaagacaattcatgctcttagaggatatgtggaagagttagaggctgcttggtctaaggcaaaatctacaattcgtaaacagcaaactcaagccgatgtatatcttcaccttgcaggagcgggcatgctgatggagtttgtagttcatgagcttaatcgtatgactcgctctaccttggcggatttgaataaggtaaatttcaccaagctccctccctctctacagtcgttgaatgctcaactgaagactttagaaaagcgtctgcgaattctagatccagtaagtacgcctgggcgtcagcgtaaagagggaaccgatatatcccaagtgattcaggttcttgtagatgcacatgccatgcagtttcaacgccataacatatccgttactgttgattcttctggtcattttcttgcaaatgttgtccaagggcaaatgtatcagatctttgaaaatcttatttcaaactctgtctactggttaacgcatcattactctatgttgcttgagtcgggtgcgggagtgacggatttttcccctttgatagaggtgattatcaatgcggagaatcgtgaggttgtatttagggataatggcccaggcataagagtgactgatgcatcaaaggtctttgatccgtttttcagtaagaagccatcggggcgtggtataggcctgtatattgtaaagaatttatgcgccgagaataatattgcggtttcacttgttgaagctgattctagaggggctcatgcaggtttcatctttgagttcaagggggattaa

SEQ ID NO: 341836 - DNA, 1974 bp, Pseudomonas aeruginosa
atgttgaaaaaggctttgttcatagatgatgcttttgcaaggcctacagtcgctgactttcaaaagaaactaggggccttgcgtcagttcctggccgacaactcttctactaaagattggtttgatagggaatttggcctgtcgggaagtcatacagggagaaggtatttcgagcctattcttagccctgaggcggttctccgtttctggagtatgcggcaaaaatcaccatccaagatgaagttggttcgggaggtttttggtgatttggtgagtgacttaaatcagcatcatgctcccttggagaagattgagagcatcttaaaggcgcagggctggaaggttataaaattgccatccttgccatccgttgatgatgttgctgaggatgtagagcttatcgttatggactatcttttgagtggatccattcctagcgatattgaggctaaggtttctgaaagtatagagtttttgaaactgataattcagcgtgcaaaaaaatctccggccgctgttcatcctttcgtgattttaatatctagcttgccatccgcgattgatcacgctcatgcatttagaaaagggacctctagtccaggcggactgttccggtttgttggtaaggtctcagtcgataccgagttcccttcggctgttgataccctggctagtcaggggggggatctgcagcgctttcgtagagtccaggttagtcttgagggcgctgttgttgaggctgcgcaaaagctactggatagggttgtagacctcgagttggaagatattgcaacgctctatactgggcagttagttacagaaaaggagcccctttctgattatctgggctggctgagcggtcagcttctaacttctacaattcagcgaaacatctctttggctgagtgctctgcggatcttccgtcagaaagttacgatgtcctacttgggcattgtgagccgacccaaaatttatcgaagattttttcagatttttcctctgtgaagacatcttccggggagctttataaggttagtcagaagtctcgtcaggttagatttggcgatttgttcgtaaggcacccacgcaaaaggagaagggagactcagggtgagcaagaggttgcagcgggtgataatgattatttaatggttatttcccaaacctgcgatcttttgcagggaaaaatatcaaacgggcaggtcctttgtgtgcaggggttgggtaggataattcagtccacagagattgagttactgcgagtcacaatccggcagatgttctcagatggtgatgtgctggtccgggacggagatcagtttgttcagattgaatggggtgatgctaaggatctcgtaaccgtgaagcttacttccctttccaaggaagcaggggtttcgtatatcggacgcttgaatgagatctatgcactagaggttcagcataaggctcttcatcaattggggaggattggtgtcccgattgttcctggataccgcgttttctttggtggggcagagatccgaatcttcactgcgaagggagagctagggcagttccttcatacccttaacaataactcggtattagcgattttgcggtgcgacaaacctaagcaaaagcttctattttcattagagcttcaccgctgggtaagagagactcttgagaggatcagcgtttctgagggtttcccttcgggattagccaagggtgttactgatctgttgagtgcgctcaaagcgtctggttcttttaatgtgaatgtcaaattcacgagagacgggaaggtagagggttttaatagggatcctatctcctcactaggtgaggaaaaggttgttccattacctgggagtgttgagttcttgctagatggactcccccggaccgataagcagccaactcaagttagggtgcagttgaggcttttgccttcactacagtttcacaacgacacactgtctatttga

SEQ ID NO: 341837 - DNA, 234 bp, Pseudomonas aeruginosa
atggtgcacagcaagagtcagcccctgaaatccaccatcaagcatcgcggcccactgaaagtcagcatcggcacccggcagctcacaggcgccagaatgtatcttttcgcgtggcacggacacttcttcattaagcgtctgcaagtctcaaacaagaccatcgagatgctttcggataacaagagacacaagaatgtgcgtgcgtttctggtgagggttggccatctggtctga

SEQ ID NO: 341838 - DNA, 1092 bp, Pseudomonas aeruginosa
atgactcctaacataaagatttcctcgaccgacctcctgaacctcattgaggcatcactaaatgccgattacaccagtgttcggcagatatccaataggatcgccgcaagctcaaacgagacggcgcccgaggttagtaaaaaaattaaaatggccattcgacgtaatggagttccgctccgtgcatctggatattcagaagctctcccagtagatcctaagtctagaagtgtgcttgtagaggagcaaacgtggcccacctccccagtctttctcaatgaagggctgaaaagaacattcgatgacttcatatccagtgtaaaaaactacgaattactgcagaaaaatggtctttcaggaaagatgaatctactgatgtccggcccccctggaacaggaaaaacattggtagctggtcatattgcctcaacattatcaatgccgctctatgtagttagactggattcactaatctcatcactattaggtgacacagcaaaaaatattcggagcgtattcgacttcgtaccctcacgaaatggaatactattccttgacgagtttgatgcaattggcaagcttagaaacgaccaacatgaacttggtgaactcaaacgggttgttaacacactaatccaggcaattgactcacttgacgatcgcgcgatcgtgattgcggccactaaccacagcgagctactagatcgagccatttggcgacgctttccttaccggatgatttttggaaagcctgaagaacagcttcgtgcctatttgtggaaccatttcctttggcaagatactggtgatctcacagcctgcagtgccctagcgaagatttcagagggtttagctggcgctgacatagaatctatttctacgtcagcacggcgttcggcaattatttcaggacaaccaatagacgttcagcgagtcgtattggaaacgctctccaactcaccctcttatagcgaggcagacaaaagaagcatctgcaggcagctatacagaaatcacaacctatcacaagccgaaatactgtctataattaaaattagccgacaaacactatccacgtatctaaaggactag

SEQ ID NO: 341839 - DNA, 2208 bp, Pseudomonas aeruginosa
atggcagaaaggccagtactcaaccccgtattgaaactacttaagtctccagcgccaaaaaccgtacccggcggagggaagaatgagcgaggaataaagaaaggagttctagctaataaacggaaagtactttcccaaaaggtagatagcatcaaaaaatctaatacggaaaatatcaccttttctggagttatgcatattatcgccaaaatggacgacgactcattatctccgagttggacaccaactgatttatttgactcaaaaactggaagcagaataattgcgccagcatataaaggcttcctgatagagattgagagagaaaaattaagcaagctgtccaacgctctactctcttcgaccaagacaaatgaaatggtcgacatctctaggatttcaaacattgaagcttttgatgagagagaaactttaagaggcaggaagcgctcagagacttgggagagccttccagtagatggtgataccaaggcagcaaatatctggctaaaacccttcaagaacatacttgcaagaaaagatctagccaatcgtttcaaagcagcttttgttagcactaaaacctcattcggccatcccgaattcgatttaaatactgacgatcaagctgacactctctctgctatattgaacgagtacataacctcaggacatgcggcattctctctacacttaaaagctgaaaatgatttcggcaaattggtttcttccggagccatctacagaatagaagcagccccgagtgtcaaagcagccgatgcaccgggcaaaggggcggagcctaacccctcaagtgtttcccactcttctccaacagtagtaataattgatggcggagtgaatgctaagagctacctcccacttcagaaactcccactcaagccgcttattaaagatagcgatgcaaacctaagccatggaaacaaagtcgcctctctagtttgccatgcccacgcttggaataagaacaggccgcttccagagctagattgcactttcatttccgcccaagcaatctgtaaaagcagtgttccaaaaacaccaaatcatcgacaactccttaattacctctaccaagtcgcagatcagacgtccaactactcaaaagtctggaacatgtctttcaatcttgtcgcctcaatggattcaaaagaagaggtaagctatttaggccatgagatcagcaagctcgcgagaaaatacaatatcttacctgtgatctctgctggcaacatagatcataacccatacacaaagaccctatgcccaccagcagattgcgaagcctcactaactattagcggcagagattttgatgttaggaacaacatacctggcgaagcctgcaaactgagtctcagaggccccgcccctgccggcatgaaaaaaccagatttatcatggtattcaaaactccgcatgattggaggcacgatccatacaggcacaagcttcgcagcccctcttgtctcctctcttgccgcacatgctttcgctaatctgaaagatgccacacctgatctaattcgcgccctattaataaatagagccgaactattcgcacacagtgataccgtaggctggggtaccccgtggatagatgatcatcttccttggctatgtactcccggagacgtaactatcgcatggacagccaagttggctcctgggtttaactactactggaatgacatccccatacctccggagcttgttgataacggaaagttcgtgggtgccgtagcattaaccgcagtactaaaaccacttacgtctgacaaactaggtgaaaactacttttcttctcgactccaaacatcgcttcaggcaacctctgcttcgggaaagaccatcagcctagtcggctccatgcgggaagataaagaaaaagaggtcaaggctcgtaccgaactggcaaaatggagtccagttcggaaccattataaggctcaccgaggaacaggaatcacgggaagcactatgcgattgaacgcacgcatattcacgcgagacctgtatcaattcgacataagccatcactcagaactgccatcgcaagatgtcgctttcgtactaactttacgctctccaaccggggacgattctatttatgaatcgacaatccagggcatgcagtccgaagtggaaagcgcagtaatcaaccaggaaattgaagttggatcttag

SEQ ID NO: 341840 - DNA, 600 bp, Pseudomonas aeruginosa
atgtccactcgtgacgcggatgaccgccgcgaatactaccgtatcgaagataccctcgcactggaatttcgccctgccggggccgtcgaagacggcctggagagcgagccgggggccaccctgttcagcctgctcagcgacctccacctgatggattacgagtcgcagcaccttctgcgccacatcagcgaacgcgaccgcacgctggccaactacctgaaggtgatgaacaagcgcatcgacctgcttggccaggtcatggtgcagagcctgctcaaggagatcggcgaaccgcgcaaggtcagcctgtccgaggggggagtcagcttccgccacgaccgcgcattgccggtcggccagttgctcgtcctgcgcatggtcctgttgccgcaggggttcggcctcgaactgcgggcccgggtaatccacgcccagccacacgacgacgaattcgagatcggcaccgagttcgaagcgttgagcgacgcacagcgccagttgctggcccggcatatcctccagaagcaggcccagcagcgccgcctggcacgggccggacagggcccgctcggcgagccgggccaaccttcttcgacctga

SEQ ID NO: 341841 - DNA, 459 bp, Pseudomonas aeruginosa
atgattgacccaaccgacaagcaaacccaacccctccccctggagcagccgaagcgcgaacgcggtcggccagccaccggcaaagccctgacggacgcagagcgagcgcggcgctaccgggcgaacaagaaaaagcgtgacgatcaaccgtcacgaaaacatgccccatcgatccccgccgatggcgtaaaggaaatcctcgacggctggcagcgcacccaagaggagctcgaccaggcactgcaacgaattgccgagctggaagccgaattagcgtcacgcgtcacgaaaaaagaagaggccgaggcgaagacttgggcaattcaagagcgcaagggcaaggcgcgctggcagaccatcagcaagggcctgacccggaaggccggagaacgccagttcgacaagctgctgtcgggcctgacagatccgcgctacacctaccgcatgattgaagaataa

SEQ ID NO: 341842 - DNA, 357 bp, Pseudomonas aeruginosa; identical to SEQ ID NO: 332093

SEQ ID NO: 341843 - DNA, 1443 bp, Pseudomonas aeruginosa
atgggaaatgctcctgacccactggcacggatggttggcaccgcggcaagtgaacagcgccagggcgggcagaatctgggcagtgtgctgttccgccggcgctacgacttgaagtacgcctatgtcgccggagccatgtatcgtggcaccgcttcaccggagctggtgatccgcctgggccgggccggcttgctcggctacctggggaccggtggcttgagcctggtgcagatcgagcaggcgattggcacgctgcaagccgcgctgccggcgggtcagccctacgggctgaacctgctggcggagtacgacgatcctcgccatgagagagcgacggtggagatgtacctagcccgcgggattcgcaatatcgaggcggcggccttcatcgagatcacattgccgctggtgctgttccggctgcgcgggcttgtacgcgaggccgacggcacgctggtgtgcaggaaccgggtgctggccaaggtctcgcgcctcgaggtggccgaagccttcatgagcatggcgccggagccgttggtggaggcgctgcgcagcgccggggatatcaccgaggagcaggccgaactggctcggcgggtgcccatgagccatgacatctgcgtcgaagccgattctggcggacataccgatggcggtatcccgaccatcgtgctgccggcgatgttgcagttgcgcgacgcgctgcaagcccgggaggggtatgccgagcctatctgcatcggcctggctggaggcatcggcacacccgcagccgcggcggcggccttcgcgatgggggccgatttcatcctgaccgggtcaatcaaccagtgtacggtcgaatcgggtgccacggacctggttaagaccatgctgcaggacgtgagcatccacgacatggcctatgccccggcgggggacctgttcgaacgggggagcagggtgcaggtgctcaagagaggggtgctgtttcccatgcgggccaaccgcctgtatgcgctctacagccattacgagagcctcgaggcgataccgcagaacatccgcggtgtgctggagcggctgttcttcaagcgcaccctggagcaggtctggcaagagtgcgaacactacctgctggcccagggccgggaagaagacctggccctggcccggagcaaccccaaggtgcgcatggcccgggtatttcgctggtacttcgcctactcgaccaagttggccttcagtggcgaaagcgcggaccaggccaactaccaggtacagaccggcccggcgctcggtgcctttaaccagtgggtcaagggcacacgcctggagtcctggcagcgacgacatgtagatgagattgccattagcttgatggaggctacggcgcagcacctgcaggtgttgcgggaactgttggtcagcccgcaggaggctgtgatggacacagaacactaa

SEQ ID NO: 341844 - DNA, 9660 bp, Pseudomonas aeruginosa
atggatccaagatcgccgcaggacgaaaccaccgccacgcctggagccagcgaacagcccgccaacccatcactccaggcctacccagagcaggcagccatcgccatcatcggcatgtccggccgctatcccggagctgactcgctggaggcctattggctcaacctgttggacggccgcgactgcgtgggcgagatcccagccacgcgctgggatgtcgatgcctatttcgacccggccataccttcgccgggtaaggcctacagcaagtggctgggcagcctggatgccatcgaatgcttcgatccgctgttcttcaatatcgcccccagcgaggcgcaacggatggatccgcagcaacgcctgttcctggaggagggctaccgggctttcgaggatgccgggcgatcgccacgggagctgagcgagtcgcgctgcggcgtctatctgggcatcagcggtagcgagtacggcaccctggtccagcaacgcctgggcctgatggacatgatcggcagcagcccggcaatcgccgcggcccgcatcgcctacttcctcaacctcaggggcccggcgattccggtagataccgcttgttcctcgtcgctggtggccatgcacttggcctgccaggccttgcgcaatggtgaagtcgacctggcactggccggtggggtagcgttgtacctgacgccggaactgtatgtctgcatgtgcaccgccggagtcctttcacccaggggcaagtgccggcccctggataaccaggccgacggcttcgtgccaggggagggtgtgggcgcgctagtactcaagcggctcgcggatgctgagcgcgatggcgactcgatccatgggctaatcatcggctccgggatcaaccaggacggcaggagcaatggcctgaccgcgcctaacgaggacagccaggccgcgctgctgcgggaggtctaccagcgccatggcatcgatccggccagcatcggctacgtggaaatgcatggtacgggtaccaagttgggcgacccgatcgaactcaatgctctgtccagggtatttcgcgagggtacccgggagctgggtttctgcgggctgggctcggtgaagagcaacatcggccacacttcggcggccgccggcgttgccggcgtgcacaaggtgctactgcagatgcgccatcggcagctggtaccgaccctcaactacagcagccccaacgagcatttcgatctcaagctggagcagacgccgttcttcgtctgtacctcgggccagccctgggagcgtgccagtggggagccgttgcgcgcggcggtcagttcattcggtatcagcggcaccaatgcccacctagtgctcgaggagtatcgccggctacagaccagtcgtcccaaggtggaactggacgagcagcatccactgctgatcgtactgtcggccaaacgccctgcgcagctcaagagctgcgccgcacggctcaaggcgttcctggagagtgcgacggatgtggactggccggccttggctcacacactgcaggcggggcgggcgccattggagcatcgcctggccttcgtcgccaccgcaccggggcagatcatcgccactctggcagccttcatcgaaggccagtcgcttgggcaggtgctggagggcgacattcgcaagacccaggtgcgtacgcgggatttcgacacagctaaggccttgtcgggggccggcaggcagtccttgctagagctcggtagggagtgggtcaaaggcacggagatcgactggcggttgctctgcggcgagcagcctcgggggcgcattgccttgccaacctatccgttcgcccgggaaagttattggatcgagcagcccccaaatgagggcatcgagcatcaaccgctgcctccagtgttgcagacctcgttgcagcctctgttccagtgcagcggctcgcaggcaggcgaacagcgtttctccatgaatctgacgggaagcgagtatttcttgcacgatcaccaggtcgcggggcagccgttggtgcctgcggcggtgcagttggaatgggcgcgcgcggccatggcccaggcccatggactgccgacagaacagccgatacggctggaggagatcgtctggctgcgcgccctgacgctccgttcgccgctgcaagtccatgtcggcctgcacgttcagggcgatggtgctgtggcctaccaaatcttcagcgacgaccagggtaagccattggtgtacagccagggcaaggcacgactggagagcaagggtgaccagccgcggatcgacctccaacagttgcgcgcggagtgcaaccgccagttggatggggccgcctgctatgagcgcttcgcccggcttggcttgcactatggtccgagtttccaggtgctgcaggggctggagatagccgaagacctggtgctcgcgcggctgcgtgcaggcagtccgcagcctggggtcggcttgcctccagcactaatcgacggcgcgctgcaggccagcttgggcctggccacgcatgactccctggcgttgccctttgcgttgcagaggcttgagcagtggcgggcgctgccggaggaggtgtgggcgatcttgcgatccgttacggctggccggggcaaacaacgagggatcgatatcgatctggcagacagagagggacgcgtcatggtgcgattgagcggattcagcagccgggcgccggcggataaattgccactggcggcgacggataccgacgccgtccaggagctgagcctgataccggcctgggaaccagtccttgagcagccgggcagcgcagtgagcgattcgcggcctgtgggccgggtggtggatatctccggcgaggtggaacaacgccaattgaccgccggcggccaaggcgcatggcagtcctggctccagcagcaggagccgttcgagcacctggtctggcacgtaccgtcaggccagccctgggctgctaaggccgcgttcctgttgatcaaggccctgctcgagttagggtacggcgggaagccgctgggcctttccgtcgtcacgcgccaggccctgagcatacgcacgcaggagctaggcgatcccttccaggccagtgtgcacgggctgatcggttgcctggccaaggaataccccaattggcgcgtggacttggtggacctgatgccagacgagtcgatcccatggccgtctctgctcaaccgcgagccaggcttggccggggagaccctggcctatcgccagggcaggggctatcgccaacgcttgctggtctgccagctttccgcaccagtgcaaccggcattccgccaggcaggggtgtatgtgattctcggcggcgccggcggcattggcgtggcgttcagcgagtatctaatccgccagtaccaggctcaggtgatatggctgggtcgacgtgtcgaggaccaggcgattgccaatgaaggcgcacgcctcgcgacgctgggacccgcgcccctgtacctgcaggccgacggctgcgaccgcggcgccctagaagcggcgctcatagaaatccgcgagcgctacggtgccgtgcatggcgtggtgcatgccgcgctggtgctggctgatcgcagcctggcgcggatggatgagcagagcttcgaggcggcgctggcggccaagcaggaaacggcgcttaacctcgacgcaatattcggcaacgaacccttggacctaatgctgtacttctcgtccttgcaaagctttgcgcggatggcagggcagggaaactacgccgctggctgttgcttcatcgacgagtttgcccgcaatgcgcaacgtccctatccggtgaagctggtgaactggggctactggggtggggtcggcgtagtggcatcggccgactaccggacgcggatgacgcaggccggcatcggctcgatcgaagtccctcaggccatggcgtggttggaaagctggctggcagggccgcaggagcgtcttgggttcgccaagctggacttgaccagggccgcacccgtctggggcatcgccaacgatgcagtggcagagcttatgcccgcggtgcctgcggtgtcgctgccggtagcgccggtactttccccaccggtcgctgaggccagcgcctggcaagcgctggagcaacgcctgaagccgctgctgtacagtctgctgcaggagcatggctggctggcaaccgaacagggattggcgccgcgataccagcgttggcgtgccgcggcgctgcgcctggtcggccaccccgaggcggataccggctgggaccagcagtgttcgcagtggcaggcttactgcgaacaggtacaggcaggagccgagtctcgcggtctggagacccaggtacgcctgctcgaccagatgctgcgggcattgccggcgatattgcgtggtgaacaggaagcgacccaggtgctgttcccagaaggacgcttagacggggtcgaagccctgtatcgggaccatccggtggcggattacttcaacgaagtgctgggcgagcgcctggaggcatatgtcgagaagcgcttgcgcctcgatcccgaggcacgtttacggatcctggaggtcggagccgggaccggcagcaccagtggcgcgctcttggcgcgcctggtgccttataccggacagatcgacgagtacgcctataccgatgtgtcaccggcctttctcaagcatgcccagcagcactacgcgccccgtgctggctacctgcggacccgcttgctggacatcgagcgagacccggtaagccagggtttcgaggccggtggctacgacgtggtggtggcggcgaacgtgctgcatgcgacccgtgacattacgcggaccctggggcaggtcaagagcctgctcaagggcaacggactgttgctcttgaacgaggccacccaggcacacctcttcgggcacttgacgttcggcctgttgcccggatggtggctggccgaggacccggagctgcgtgtcccgggcacgccgatgctgactcccgccagttggtgctgcgtgctgcaaacacaaggattccatggcgtggacattccgtgcggcacgaccgaggccctgagccaggaaatcatcctggccatcagcgatggcattgtgcgccatgctgccgcgcccttcgaaccgctctccgctgcacctgccgggcccacgactgaagctcaatgcccccagccacctgcggcgccgtccgtcctggatgcccaggaactggtgagccaggtcgaagcggcgattacgcagatgatttccgactacctgaaaatcgcccgtgaagagctggaccggaatacgccctttggcgagttcggtttcgactcgatcacttcgacggcttttacccggctgctcaatgagcgttatggcctggacatggcgccctcggagttttttgagaccccgacgattgccgcgctggccagctacctggcgcaggagtgccgggtcgaactgcagccgctctttgccccggcccaagcgccccgaacgcccgaggcgagcgcgccgaaggctgccgcgcccaggatcgaccctgtggcccaagtcccgtgtggcgagcccggcccgaccaaggcgggcgccgagccgatagctgtaatcggcatgagcgggcgtttccctgaggccaaggacatcgacgcgctgtggcgcaacctcgaagcgggccgcgattgcatcggcaagttgccccaggggcggtttggctccgggccagatcctgccctgcgccatgccggggtgctggaagacctggatgggttcgacccggccttcttcaatatttcgcaccgtgaggcccaaggcatggacccccagcaccgcctgctgatgatggaggtctacaaggtgatcgaggatgcggggtattcggtgcagagcctatcgggcagcaataccgcgctactggtgggtacctgcgccacgggatatgcccagttgctggcccaatccggcgaggctgtgaccgcagcactggcagtcggcaccgccggatcgatgggccccaatcgcatgagctactggttgaattggcatgggccgagcgaacccatcgaaaccgcctgttcgagttccctggtggctgtgcatcgggccgtgaccttgttgcgcactggtcaatgcgaccaggcagtggtggggggcgtcaacaccctcctttcagcagaggcccatgagagcttcatgcatgccggggtgttgagcagggatggtcggtgccgggcgttttcggctcaggctggcggctacgtaaggggtgaaggggtggtgatgctgatgctcaagccactgtctgcggcccaacgtgacggcgaccagatccatggcttgatcctcggtagcgcgcagaatcacggcggccaggccaactcgctgaccgcccccaatccacaggcccaggccaaggtgatcgaaacggcgctgcgtgaagccggtgtggacctgactagcatcggctacatcgaggcccatggcaccggcacagagctgggcgacccgatcgagatcaaaggcctgaaacaggcgttccgcacgctggcaggcaaagccgaattggccgagcacagcatcggcctgggaaccataaagagcaacatcggccaccttgagctggcggctggagtggcggggctggtcaaggtgctattgcagatgcgccatgcgtgtctggtccagagcctgcacagccagccgctgaactcgcagatcgaactcgcgggcagtccattctatgtggtggatgccaagcagccctggccggcgctttccgatgggcagggtggcgtgttgcccaggcgcgccggggtcagctcgttcggttttggtggggtgaatgcccatgtggtgctggaggagtatcggcacgattcacgcccgggccaaacgatccaaaccaagccggtgctggtggtgctctcggcccgggacaccaagggactcaaagcgcgggttgagcaactgttggcctttctggagcactgcgaagcagacttgcaatccctggcttacaccctgcaggtggggcgcgaggcgatgaaggtgcgcctggcttgcgtggtggattccatcgatggcctgcgtccccggctgctggcttatctgggcgaagagggtgggcagggagagatcttccatggcgatatcaagcgtgacccggaccttcagatgatcttccaggcggacgaggatctgcaggaaaccgtctgcaggttgatcgcccagggcaagctggggcgactggcgcagtggtgggtactgggcctggagatcgactggacgcgcctgtatggccagcagcggcctcggaggatcagcttgccgacctatcccttcgccttggagcgatgctgggtgcaagcatccaccgaaccgggtaccagccagtcgcacctcgagcctgcaccgactgcggcgttgcctggcaagccccggggcttgcgcctgcgggcgacggaagagcgcgctgatctgcgggtcgtcgcttcccagaatggggcgtcgagcgcgcattccacggtgcaagtggctatggcgcaggctccccggaatacccccggtatcaacaccgtagtggacctccatcagcaggacgctgggctggatgagttggagttgactctcaaggaaacgctggcggcagcgctgcggattgacgtcaacgaaatcgacccggacgagatgctctccgagtatggccttgattcgatcattgccgtggagtggattcgtgagctcaatcggctgtattcgatctcgatcaataccagccaggtgtatgagttcccgacgattcgccagatggccaagttggtgcaacaagccagggaacgcccaagggcatttgccttgaattctgtcgacgggcagggttccgggcagtccttgggtgcgacgcagatggaggtggccgggccagccacggccttcttgcctggcgcagagaggggccgggccgaccagggcgtgcttgagcaggaactcacggcaagccttgcccagtccttacgcatcgacagtgaggaaatcgatcctgaggaaatgctcgccgaacatgggctggattcgatcattgccgtggagtggatccgcgagataaaccagcgttactcgatctcgattaacaccagccaggtgtacgagcatccgaccatcaggcaactggcggccctagtcggccagctactgggcaccgagtcgctcgctgtgccgggtacgccgagtttggtggcaagtacgccccaccgaacggtgatgcgcgctcagttatcgcccgatacggctccggtatcgactgcgacggcatcacccgccggcctccaacctgaatcgccatcacgggtattggctaaccagcttcgactggacaccatgattagctcggacatcctgcgcgcggcagcgaaacttgcgccccccaccgatctaccaccaagccaggtcctgctgaccggggccagtgggttcgtcgggcgcttccttgccctggacctggcgcaaggcttggtaccacgcgcggggaccctgtattgcctggtgcgggcaacttcggatgcgatggcgcggcagcgcctggtcgagagcctggcggcatcagctgaactccagcaacgcctagtcgcgctggagctgtccgggcgcctggtggtcctggcgggcgacctgaccaagccgcgcctgggcctggcccaaccgacttgggacatgctggtgcataaggtcgaggccatcgtgcacaacggtgccctggtcaatcacatgctggcctacaaccagttacacgggaccaatgtccacggcactgccgaggtgatacgcctcgcgctttctgggaagaagaaagtcatcaacttcatctcgagtatcgccgtgggcagtgcggtgcgtaggaacgagccgatccacgagggcgagaaagccctggatctgtatgaccactgccttggagcagggcgctacgccgccggttatgcggccagcaagtgggctggggaagttctattgcaggaggcatgcgagaagtgtgcgataccggtaaaggtgttccgttgcgggatgctgttgccccacagtacccattcagggtttgtaaatttcgccgacattttctcgcgcttcctggtcagcctggtgcaaaccgccattgctccgccatctttccatctggatagttcccgttccatgacgccgatatttcgcgggttgccggtggatgcggccgcacgttcgattgcccagatcagcctgggcgcggaggccgggtactccatctaccacgtccagagcaacgggcccgacgctcccagcctggacgtgctggtggagtggatacgggagctgggttatccgctcgagaagctgggaagctccgaagcctggagccaggagttcatggctcgcctgcaagcgctggacgcccggtcaagatcctacagcctgtattcatcggtctatcagctggacgaattgcaggaggtattgaaccagcccgagttcgacagccgcaggttcgccgaacgctcccgctcgctcatcactgacccggccgcgcagaactggttggcgccgatcgatcggaggttcatttcgggctatctgacggaacttgccaatgccgggttgatctag

SEQ ID NO: 341845 - DNA, 1263 bp, Pseudomonas aeruginosa
atgctatccgtaggaatcgaagcgatgaacgtgttcggcggtcgggcctgcctggacgttgccgaactggccgcgcaccgccagttggacacggcgcgcttcaataatctgctgatgaaggaaaagaccgttgcgctgctggacgaggacccggtgacctatgcggtgaacgcagcacgccctttggtggaggcgttgtcggccgaagagaaggctcggatcgagttgctgattacctgctcggaatcggggatcgatttcggcaagtcgctgagcacctacgtccattaccatctgggattgaaccgcaactgtcggttgttcgagctcaagcaggcctgctattcgggcaccgcgggcttgcagatggcggtgaacttcatcctggcccaggtctcgccgggggccaaggcgctggtgatctccaccgacctggcccggcacatgaccgccgatggcggcagcgcactcaccgatgactggtcgttcgccgagcccagcaccggcgcgggcgccgtggcgatgctggtcagcgaccagccgaggatcttcgacatcgacgtgggcgccaacggctactacggctacgaagtgatggacacctgccggccaaccccggataccgaggccggcgactccgacctgtcgttgctgtcctacctggactgctgcgagaacgcatatcttgagtaccaaaagcgcgtcggtgacgtcgactatgtcggctcgtttcgctacctggcgttccacacgcccttcggcgggatgatcaagggcgcgcatcgcaccatgatgcgaaagcaggtccaggcctcgccggcggatatcgaggctgatttccagcgccgggtgacgccgggactcagctattgccagcgggtcggcaacatcatgggcggcactgtgctgctgtcgctggccagcaccatcgccaacggccgcttcgaatcgccggctcgtatcggttgcttctcctatggctcgggctgctgttcggagttctacagcggcgtagtgcgccaccaggggcaggtgcaactgcgggcccaggagatcgaacgccaactcgataaccgctaccggctgtcgatgagcgagtacgaggagctgttgcagagcaacgcacaggtgcgcttcggcacccgcaacatacggatcgacgacgcctgcagcgtgcgtccgcagttgccgcgtgcggaccgaccacagttggtactgcgggaaatcaaggaattccaccgcgaatacgaatggctccagtaa

SEQ ID NO: 341846 - DNA, 1290 bp, Pseudomonas aeruginosa
atgggccggcgcggccggcccgttcccttcgcccgaatcaacaatcctggtgccaacatgcctgccactcgaccactacccgttgcgatcaccggtatcggtatcgtttccgccattggccagggcctggaggccttcacccgtgcactgctggccggcgacgcggctttcggcgtgctgcaacgcccagggcgccaggggcaaagtcgttttctcggcgccgaactcggccctctgcaactgccgccggagcgttcgccacggctgttccggcagttgtcgctgactgccgaggcggccctggtggccttgcatgaagcctggcaggacgcccggctggcggaagtggacccgcagcgcatcggcctggtcgttggcggctgcaacctccagcaacgtgaactggcccagttccatgagcgctacaccgggcgtgaggccttcgtgcggccggggcatggcgtcgagttcatggacagtgacttatgcgggttgtgcacccagcagttcggcatccagggcatggcctgcaccgtgggcggcgcctcggccagcggccaggtcgcggtaatccaggcgctgcaggccgtgcagtcagggcaggtggatgtggcgattgcgctgggtgccctgatggacctatcgcattgggaattccaggcgttgcgttcgttgggggccatgggctccgaacggtatgccgatgcgccgatgcaggcggccaggccgttcgaccgcgaccgcgacggtttcatctatggcgagtgttgcggcgcggtagtggtggagtgcatggccaaccctgcgcgcaacaccatccggccctatgcgaggttgtctggctggggctgggccatggatgccaaccgcaatcccgacccatcgcgcgaaggcgagatgcgcgccatcgcccaagctttggaacgcgcaggcctggccccggagcagatcgactatgtgaacccccatgggaccggttcgcacctaggcgatgtggtggagctggcagccctgcgcgacagcggcctgggccacgtgtgcctcaacaccagcaagtcgctgctcggccatgggctcacagccgctggcaccgtggaggtaatcgccacgctggtgcagatgcgcgaagggctcctgcaccctagccgcaacctggacacgccgatcgatccgtccttcgactggatccgggatgtgactaggccgcacccaatagagcatgccctgaccctgagcatgggttttggcggcatcaacactgcgttgtgcctgacgcgtcatgagcgatga

SEQ ID NO: 341847 - DNA, 1104 bp, Pseudomonas aeruginosa
atgaaggtgttcatctttcccggccagggttcgcagcagcgcggaatgggtggccagctgttcgatgagttccccgagctgaccgaagcggccagcgacatactcggctattcgatcaaggccctgtgcctcgacgacccggatggcctgctggaccagacccgctatacccagccggcgatctatgtggtcaacgccctgtcctatttccagcggctgcgcgatggcgctcaggcggatggcttcgccggccacagtctgggtgaattcaacgccctgttggccgcgcagtgcttcgatttcgcccagggcctgcgcctggtccagcaacgcgctgagctgatgagccaggtcggcggcgggagcgggggcatggccgcgatcatgaacctgcggcgccaagcgttggtggaactgctgcatgcacaacaggccgatggcgtcgacctggcgattcacaacgcccccttgcagagcgtgatcgccggtcccaaggccgaactggcgcgcctggaaagcgcggtcgaggcggcgggcggaatgctgtatccgctcaataccagcggcgccttccactcgcgctacatgcaacctatcgccgatgcttttcgcacgtatctccacggcctggagctggctctgccgagcaagccggtgatcgccaacgtttcggcccagccgtatcgccaggaaacgatcgccgacaacctggtccggcaactgacccatccggtgcaatggtgcgagagcatcgaatacctgctgacccagggcgaggtgcacttcgaagaggtcggccatggcgaggtgttgaccaagctggtggagaagatccgcgctggcagccgaacgcctgctccgggcgttgcggtttcgccggctggcgcagcgcctgggtctcgcgaagcggcgttgcacagcgccatcgagcaggtcgcgcaatggaatgcccggcatcctgtcggcactcgggtacgctcgctacgggttgacggcgatcagctaacccgcagcaccgccctggtgttgttgggccaccgggcggcggtgtacctgcaagggcacaacggctacttcgccctcgaagaaatccaggcgttgtaa

SEQ ID NO: 341848 - DNA, 255 bp, Pseudomonas aeruginosa
atgaccagagaacaaatattcgaattgatcgtccatcacgtccggcaagtgattcccacccttgccagccatgcgttcacccgcagcgaccgcttacgtgacctgggtgcgaactcggtggaccgcgcggaaatcgtgatgctggtactggagtcgctgtccctgagcattcctcgggtggagctgttcggcccgcgcaatatcggtgaactggcggacctgatccacacccggctcgaagcaagggcggtgtag

SEQ ID NO: 341849 - DNA, 750 bp, Pseudomonas aeruginosa
atgagcgacggcctggtacagcttgagcagataacgccagcgatcgtgcaggtcaccatggccgatcgcgtccacaagaatggattctccaccggcctggcccaggcattgatccgcgccttcgagacggtgcgtagcaatccggcgtggaaagtgatggtcctgacgggctacgacacctacttctgcaccggcggcacccaggaaatgctgctcgagctggccgacgggcgcggccagttcaccgactacccgatctacgaattgcccttaacttgcgagattccggtagtggcggccatgcaggggcatgcgattggtggcgggctggtgttcggtctgttcgccgacctggtggtgttcagtcgcgagagcgtgtatgcggcgaactttatgcgctacggtttcacccctggcttcggctcgacccttgtgctgcaggaaaagctcggcctggctctagcccaggaactgctgatgactgccgagaactatcgcggtgacgagctggccggccgcggcatcccgttcccggtgctgcctcgggcgagcgtactggcccgtgcccatgaactagcggtgcagttggccgagaaaccccggcactcattggtgaccctcaaggcgcacctgacctctgacctgcgcgcacggcttcccgcgatcacggctcgcgaggtgcagatgcacgcgcagaccttccatcatcccgaggtgcgggaacgcatcaaggcgttgttcggtaactga

SEQ ID NO: 341850 - DNA, 783 bp, Pseudomonas aeruginosa
atgatcgaaaccggatactacaccctgcgtgtgcgccacgaggacaacatctgtttcgtgcagctgtatcggcccgaggccaacaataccatcgacgatcgtctggtcgccgagctggccgatctgctggaacggctggatgagtgcgtgtcagtgctggtgctcgaagggttgccgcaggtgttctgcttcggcatggacttcgcgctggtgcgcaagctggccaacgacccccaggccagttccagcgtgcttgacccggctaccctctatgacctctggctgcgcctgacgaccggaccgttcgtggtcctgtcctacgtgcgcggcaaggtcaatgccggcggcgtcgggttcgtcgccgccagcgatatcgtgatcaccgaccagagcgcctcgttcagcctttcggagttgctgttcgggctgatgcctgcctgcgtgttgccgttcctggagcgccgcatcggcccgcagcgcgcccactacatgaccttgatgaccaacacgataggcgtcgaccaggccctggcctggggcctggtggatgcctgcgaggccgatggcgacaacctgctgcgcaagcacctgttgcgcctgcggcgcctgtcccggcccggggtggcgcactacaagcaatttcgtggctcgttgtacggcgcgccacgactcgatcgcgacgccgcattggcggccaatcggcaggtgttcagcgatccgcagaacctttcgaacatcgtacgttacgtcgagacgggcgcgttcccgtgggagcaggtgtga

SEQ ID NO: 341851 - DNA, 1371 bp, Pseudomonas aeruginosa
atgctaaaaagaccattagaaacaaaagactcacttgacctattttcgccagaaccgattgcagtgatcggcgtggcgggaatttttcctggagcaagtaacattgatcaatattgggataatttactcgaaggtagagattgtattgttgaagtcccgccagaacgttggtcgttggacggtttttttacgtccaatcagtgtcggggcgcgacaggtatgacaagttattgcaagtggggcggatttcttaatgtcgagcagatggatgagttgttggcctctgaattcaaatgcgatgtaaaggataagcagagcaaactgattttacgaacgatcggtgcggcattgcaatctatggaaaatgcttcacggccatcatctgaagactataggaaaactacaggggtttatgtaggggcgattccttttgtagaggacgcgagcaatggagcctccgagatcatagggaatggtcaactcgctggtgcgatttctagagtccacggtttgtctgggcctagtatagttttggatctgcatagcgcttctgcgatcagtgccttgcacctggcttgcgctgggctgcgtagtggcgattgcgaaactgcaatagccggggcaggtatgatgctcaataaggaccattttatctttggtagccaagcaggagtattggctagtgatccaacttatcgaagttatgcccaggggagaagtggaattatattaggagaaggggccggggcggtagttttgaggccgctgtccaaagctgtggcaaatcaagaccaaatactggcagtcattcgcacgaccaattatggtttcatcggcaaccatgatgtgaatagcagtgatgacctgcttatatcattggacttcgagaaagtaactcgattggttgaaggggtcatcatgcgcgcgcgcgtggacccccagtctattagttatgtggattgcgctgctccaggtcttcaaattggtgacgtgcttgagcttgaggccaccctaaaggcattctctaatttgacttcggctaaagggttttgtgcggttgggtccgtaaagccaaatatcggtcatcttgctgctgcatcagggatgtcccaattgatcaaagtgatattgcaggtaaagaacaagaaaatttcacctatgataaaagcccttcctgttgatcgtgagatagatcttgaagggtcagccttttatctcaagcatgactccgctgaatggaaacgtcctgtcagagccgtggagggcgtggagtacgaatatccccgaagagccttggtcaattctttcgggtatggaggtttttttgcatgcgcgattgttgaggagtacttggaggagagcagaatttaa

SEQ ID NO: 341852 - DNA, 342 bp, Pseudomonas aeruginosa
atgtatccggataaccagcagagcctaggacaactcacgcaacgaccatcctggtacaacacatttgaggccgacgtactgcggctggtgcgcgatgcgctcaagctgcgcgactcggagctgactttggattccgatatgtcggatttcgtcgacggttcaatccatgttgtggcgatcgtaaataagctttcaaaattttataatctttcaattcccccggctatttatttcgaagtcaatgttcttcgtgatttatgccttgtcttgcgcgagcgtcattcgaatgagcttgtggagttttataagagaagtctgggtgatgcttcaggatcgggatga

SEQ ID NO: 341853 - DNA, 1299 bp, Pseudomonas aeruginosa
atgagcggcgcagcgaaggtggcgatcatcggcggcggccccaccgggttggccgttggccgtgagctcaatgccgccggcatcgagttcgtcctgtacgaagcggaggcggacttcggcggtgtctggaacagcgagggcgatagcggccggacctatccgtcgctgcacctgatttcgcccaagtcgaacacccagtttccggatttccccatgcctgcggactacccggactatcccaatcaccggttgatgctggcctacctgcgttcctatgcggcccggttcgggttgtacgagcgggcccggttcggtacccgggtcgagcggctggagccccatggtcagggctggctggtccatgctgcccagggtggtcgcgaaattcatgagttggtggtgatctgcagcggcttgcagcgaaccgcttatttcccgtcgatcccttgcacagggttcgccggggagatcctgcacgcggccgactacaagtcgcccgaccagttgcgtggcaagcgagtactggtgattggcggcggcaactccggctgcgatatcgccaccgatgccgtgcatcatgccgaacgggtctatcacagcacgcgccgtggctactactaccaacccaagttcatccacggcatgcccactgcactgtggatgagagagatcgccgaacgcttcagcagccaggaagggttctggcagcacgtactcgagactttcaaggtggcgagtttcgatggtgccgattatggcctgcccaagcctgactacccgatcagcgccgcgcatcccatcatgaactcccacgtgctgtttcatatcggccacggcgatatcgtgcccaagggcgacgtcgaggccctagtggatgggcaggcgctgtttgtcgatcaatcccgggagcaggtggatctgatcatctatgccactggctacagccgcgacctgtcgttcatcgacccgcaattcttgcactggcgcgacggcattcccgatctgttcctgcattgcgccccgcgcaaccacgacaacctgttgtgcatggggttcgtcaacgcggcgggtggccttggcgatgcggcgaaaatccagggcaacttcgtcctgaactatgccaacgcgttctttgccaagaccagggggcttgaagccttcaacgaggccaagcgcggcgagcaggttgaccttggccaggaacacttcatcaagacgcggcggcacctctgggaggccgacttgtggaagtacctggcccagatcaggaaatacagcaacatgctcaagaacgtttga

SEQ ID NO: 341854 - DNA, 16530 bp, Pseudomonas aeruginosa
gtgaccgatctactcaatagcctcgccgatggttggctagccctgccggtgcttgaggccctggagcaaaatggcgtgctgcgcgcactggaacgcgcgcctgacggaatcagcgcccgcagtctggcccaggcctgcgccgcgaacgagggccagttgcgggtagccttgcgtatgttgctggagttgggatggctggtgcagttggccaatgaacattacgggttgacgccaggggtgagcatccgtatcccggccgacgccggcgcgctgattcgcttgtcgctgccgcaattgctgggcgagcccgccggccacgaactgcgctactggctcgagcgttccgctggtggctgggaaaatgctcccacgccgatggcgacctgcctggacggggcgctgctggcaccgttactgataacgctggagcaggcgggcggggcgcaggtactgcaagaaaaaggggttagcaccagagggccggccacgggactgtccagtgcggttctggaagcgctgcgcagatacttcgaacaacgagcctggggatattggcaaggcaacggcttttgcctgagcgatgtcggtcgtgcgctgctggagggcaccgcgcagttgcgcgtgagcttggcctggcaatttctgccgggccggttgcaggtattgctgttcggcgatgccagctcggtccatggatcttgggaggaagatgcaggctcgtggccagccgagtatcttgctgcgttcgagtctgccgttctcgcccgattcgatcaacagccgctcgaacagcaaccacgttatctcgtcgacgtgggctgctccgatgggacgttgctgcgccgcctgtatctggccatcgccagtcactgccggcgtgggcagcagctcgagcgttacccactgctgctgattggcgtcacagccaacagcaaccagcacgcccgggggcagcaaaccctggaaggcctaccgcacctcttattgaccggggacatcggcgatccccaggggctgcaggccagtttgggcgataatggaatccgcgaccccgagaacatcctctatatccatgccttccaagaacatcggcgggcctggcagtctccggcatcgacccgaggcgtcgacgaccagcgccatgcgcgcccaagcagtgttcacgtggatcgaaatggagcctgcatcgaatcggcggcggccttgcagggcctggtcgaacacctggcccgctggaaagaactcacctcgccccacggtctgatactgctgactgcccattgcctacaccctgccaccgctcgacagcatgcccggcgtagcggggcggtgcatctggacgctagccacggttttgccgggcatcagatgttcgaggcgccggttttcctgatggctgcggcgcaagccgggttaattgcgcaccgcgccgctatccagatgtttccgcgtggagagtcattcacccaggttagccttaaccgactattgccgaggcgctaccgcattcgccatccattgcccagagacttgccacggctgcgagaactggaactggcttgctggcccagcggactgggcgcaactgaagcggtgttgcagcgccggttggagctttaccctcaggggcagttggtgctggagtaccagggacagatagtggctgcgatctactcccagcgcctggcagcggtggagcagttacaccacagcgattgtttcaacgtcgaggccttgcacgatccggacggtcccgtcgcgcagttgctgggaatttgcgtgtacccggaacaccagggggaggggctggccgatgagctgatcgatttcacgctggtatacctggcgagcctcgacggagtccgcagcgtggtcggggtgacgcgttgtcatcactacaacgctcgacaggctgatgcctcttcgctcgaggactatatccgccgcagggacgagacttccgggcgtttagtcgaaccaatgctgtgttttcacgaaagccacggcgcgcaggtacgcgaggtgctggagggctatcggcccggcgatgcggtcaaccgtaacgccggggtcctggtggaatatcccgatgtgcgggccatgcccccgccacccaagacaacggcagcgccatcaccggccgtcccgtcccgagagtggtcgcaggtggttggccaattgctgctgggggtgttgggcgaagcccgggtcgaggcctatggcgagcacgtgccattgatggagatgggcctgacttcgttgcagatgctcgatttgcgccatcgcctggcggagtgcctggccagcccgctgccagccacgttctttttccagcatgggaccccggcagcgatcatcgcctatctgcaaaaccacagcgccccggcccacgggcaaaccaggcacgcgcctccaccggcagccgagccggcgccttgtgctcccggccccgagggtattgccatcgtcggtgtgggctgtcgttttcctggcggcgcatcctcaccggagcgtttctggagcctgttgcaacagggcatcgatgcggttggtcagcggggcggcctggacgacgagccggcgaacggtggtttcatcgagggggcgcaggagttcgacccacgtttctttcgcatttcccccagggaggcacagctgctcgatccccggcagcggctgttgctggaaactgcctgggaggccctggaacaggcggcgatcgcgccaagcagcttgcggggctccagtaccggggtgttcgtcggcctgatggggcatggctatgacttgctcttgcggcaaaccgggcagggccacgagtccaggccggccttcaccaccggcaacgcggcctcggtcgctgccgggcggctggcgtatttcttcgactggcatgggccggccctgtcggtggacaccgcttgcagttcatcgctggtggcgatccacctggcctgtgaaagcctgctgggcggcaagtgcgaggtggccctggccggtggcgtgaacttgctgctggaccaggcggagtcagaggccttccgtgctgccggcatgctctcgccgcgcggccgttgcagcaccttcgatgaggctgccgatgggtatgtccggagcgaaggctgcgggctcctggtgctcaagcgtcatgccgacgccctggctgccggcgacccgatatgggcagtcatccgaggcagtgcgatcaatcacgatggcgccagcgccgggctgaccgtgccgaaccagtcggcccagcgcgcggtcatcgaagccgcgctggcccaggccggcctagccccgcatcaggtgcagtatctggaagcccatggcaccggcacccgcctgggcgatccgatcgaggtgcacgccgctgcccaggcattgggggccggccggcaagcgcagcgcccgttgttgctcggctcggtgaagacccagatcgggcacctggaggccgccgccggcgtggcggggctgatcaaggtcattcttgccatgggcaaggggcagattcccgggcagttgcactttcgctctcccaatccgcaggtggactgggcgaatctgccggtgcaggtggtcgatcagcctcgcccgtggttcgtcggccggcggattgccggcgtcagcagcttcggtttcagcggcaccaacgcccatgtgctgctggaagcctgcgaaccgccgccacctgccacggagaatatcgatgagccagtgctgatcctgctttcggctcggacccgggacagcctgctgaccagcgccgaacgcttgcatgcggtggtgacggatggccgcttcgcccctgcgcagttgcgtgatatcgcctacaccctgcaggtcgggcgcgaggccatggcccatcgcctggcgctgctggcccgttcactgccggatctggccagcaaactggcagggctgggccagcccggggtcgaggctggcgagctgtggctgggcgaagtcccccaggatcaccagccgtctgccgatgccctggccgacgcgacccaggatcggctgcaagtcttggcgcaacgctgggtccagggggctgtcgtggactggacacaactctacgcagcgccgttgccccgccgggtcgacttaccaacctatccgttcgcccgccagctctgctcggtactgccgggaagcacaacagggagcatcactatggagcgtcaatccccacagccgcacgccaccgccttcgcggggggctcgtcccagcccgggctcgatgacggcaagccgcgcaagttgcagttgcgcgtcctggaggatgggcttgccatcgagcccccggctccggcggagcaggcagcgccggtagccgcgcaagactcgcccatggccgcccaaccgggtgcagcgacacgtgccccggaggttgccccccatgcgcaggccgagcggcgcgcgctacttgaacgcgagctgactaccagtctcgccgccgcgctgttcctcgatcctggcgagatcggcctggatcatttgttcgtcgatctgggcctggattcggtgatcggtgtggaatgggtccgcgatatcaaccggcgctatggcctggcgctgaacgcgccggtggtttatgagcattccagcgtcaggcgcatggccgccctggtcgagcaggccttgcagcccaagatgccgatacaggttcaagcgccaccggcttcgcttgcctcgcagcggactatccctagggctgcggctagcccagaaccgcttgcacaaccagagacagcgccaataccggccgcgactgcatctcggacggccgggaccgtaacggccagcgaaggtatcgccatcatcggcatgtccgggcgctacccgggggcaccgacgctggatgcctactgggacaatctggtggccggccgtgactgcgtcgaggagatccccccaacgcgctggagcgtcgacgactactacgatcccgaggccggcaagccgggcaagacctacagcaagtggctgggccggctagatgacatcgactgcttcgatccgttgttcttcaacatctctccggcggaggcggaatggatcgaccctcagcagcgcctgttcctggaggagggctacaaggccttcgaggacgcggggtatccgccgcagaaattgagcgatgcccgttgcggggtgtacctgggcatcatggggcccagtgaatacggctggctggcccaacagcagcgcggcgcagcggaaatcaccggcaggagcgaggcgatagccgccgcgcgcctggcctacttcctcaatctcaaggggccggcgctgctggttgacaccgcttgttcatcgtccctggtggccacgcacctggcctgccaggcgctgcgcggtggcgaagtggatgtggccctggtgggcggcgcaaccctgtacctatcgcccgagatgtacatgagcatgtgcaaggccggcatgctctcgcccacgggcagatgccgaaccctggacaacgccgccgatggcatcgtgcccggcgagggggtcggggccctggttctcaagcgcctggccgatgccgagcgcgatggcgatcgtatccacggggtgatcgtcgcgtcgggcatcaaccaggatggcaagaccaacggcatcactgcgcccagcgccagcagccagatcgccctggagcgcgaggtgtacgcacgccacggcatcgatccgcggagcatctcctatgtcgagttgcacggtacgggaaccaagctgggcgatccgatcgagctgacagcgctggatacggtgtttcgtgaacggaccgagcagcgtaatttctgcggcctgggttcggtcaagagcaatatcggccataccacggcggcagccggggtcgcgggggtgcacaaggtactgctgcagatgcgtcaccgtgaactggcgccgaccctgcacttcaacacgccgaacgagcatttcgatttcgcccgttcgccgttcttcgtcaatactcgccaccagagctggcaagtcgccgctggccaaccgctgcgcgcggcggtcagcgccttcggcatcagcggaaccaatgcccacgtggtgatcgatgcctaccagccagctgtcgcgccgctggccgccgaggcggatgccccagcgctgctggtgctgtccgcacaacgcgccgaccgtttgcaggagtacgccaaggcgctgctgcagttcatcgagcagcaaccacgactcgacctcgcggccctggcctacagcctgcaaaccggccgcgcggccttggagcagcggctggccttcgtcgctacctcactggcgcaggtacgcgaggcgctgggcgacttcatcagcggcacgccatcggcatgcctgctgagcggcgaagtggcgacggagcaagacaccgcttcggtgctggccggcgaggaggagttccagcagctgctggccagtctgttggataaacggcgcctgcagaagctggccgaactctgggtcagaggggtggaaatcgactggtcgcgcttgtatggcgccgatcgcccacgacgcctgtcgctgccaacctatcccttcgcccgggagcgctattgggtagcgccccaggcggcgaccggctcactgccagatgagcgcgcgatcctgcacccattgctccactgcaatagttcgaccctgcacgaccatcgctacagcacccaactctcgggcaacgaatggttcgttcgcgaacatcgggtggccgggcaaccggtggtgcctggggtggtgcaactggaatgggctcgcgcagcggcggccctggccagagaactgccagtgaggcagccgatggtgctggaggaggtggcctggttgcgcccgctggtggtcaaccagccgctgctggttcatatcagcctggtggaagagccggggcggggggtccgttatgagatccatagcggcaccggcacgcaaaaacagctttatagccagggctgggtgcgtcccgcgagcgggcaaccagcgccgcgggtcgacctggccgctgtaggtgcctcatgcaagtcgcaggtggacgcaacgagctgttattcgcacttcgccgaacagggcctggaatacggcgcggggtttcgcgccctcaaggaactgcgcagcggcccgcaggcagcgctggcgagcctgtctgtggccaacgtggcgcagggttataccttgccgccatccctgctggatggcgcattgcaggctgccactggctggctggccaaaccggcgttgcagttaccattcgcagtggcccgggtcgagcagtgggggcccgtaccggaccagatatgggcggtggtgcggcgcgccagcggggagcagggcgcagggcagagcttcgatgtggacctggcgcacgccgatggccaggttgcggtgcgcctgagcggcttttgctgtcgtacgtccgcgcaaccaaggctggcgggagagctgaccctggctccgtgttggcaagcgctagaggacgtgagggtcatcgccgacgctcaggaccaccatttgctggaagttccagaggcgatcgctcgccaatggggcacgcccgatggggctgcggcctgtgccagctggttgggcgccaggtccgggttcgaccatctgctctggcatgtgccgcagggccagcctggggtcgcgcggatcggtctgcagctggtccaggcgctcctggccctggactacggtagccggcccttggcgttgacggtggtcacccgccaggcgctgccggttgtggccggagaaaccggcgatccagaacaggccagtgtccacgggctgataggttcggtggccaaggaatatagccattggcaggtgcgcgtgctcgacctcgccggccagggcacctggccttcggcgcaggctggtccggatgtgccagaactgcctggggaaaccctggccctgcgcgatggccaatggtatcgccagcgcctggtgccctgcgtactgccggacgtcgtcgacagcgcgctgcgcgaacgaggggtctacctgatcctcggcggtgccggcggtctggggacggtcttcagtgagtacctgatccgtcgctaccaggcccaggtgatatggctgggccgccgcgaggccgatgcggcgatcgaggcgcaacgggcgcgcctgggcagcctcggccccatgccgctctacctgcgggcggatgccaacgaccgggcggcgctggaagccgccgagcagaccgttcgccgccgttatggcgcggtacatggcgtagtgcacgcagccatcgtgctggaggatcgcggcgtggcgcagatggcacccggggtattcgatgccgcgctgcgggccaaggcggccaccagcgagaacctcgatgcggtgttcggccggcaagacctggatttcatgctgtttttctcatcgatgcaaagcttcatccgcactccgggccaggccaactacgccgccggttgctgctacgccgatgcctttgccttgggcctgcgggagcggccatatccggtgaagatcgtcaactggggctattggggcagcgtcggcatagtggccaaggccagctatcggcagcgaatggaggcggccggaatcggctcgatcgaagcaccacaggccatggcgctgctggagcgcctgctggccagcccactaccacagctggcgttcttcaaggccctgcatgcgcaagccgcgagccaatgggcagtggcggacgatcgccagttgcagatcagcgcgccggtagccccggtgatcttgaatggcaactcctcgctcggtctgccgcagcgggtggctccggtgctggccgagctggagcgcagcctggcgcaactgctacgcaatctgctggtccatcagggctgggagcatggcactgctggcttggctccggcctacgtcggttggcgcgaggacgccctgcgcctgctggacgccggtggccatgcgcagctggcgtcggactggccgggcgcctggcgacaatgggaggccgaccgcgagcgcctgctgcaaggccccgaccaggccgtggtgcacaaccagatccgcttgctcgataccgtgctgccggcgttgcccggggtcctgcgcgcagagcgcgcggccaccggagtgctgttcccgggcgggagcgtggagcgggtggagggtatctatcgcggtcatccgctggccgactacttcaacgccgtgctggcggaacagctgctggcctatgtgtcacagcgcctggccgctgatccagaagcacggttgcgaatcatcgagatcggcgcgggaaccggcggcaccagcgcgctgctgttccagcacttggcgccctatgcccaggcgatcgacgagtactgctacaccgatgtgtcggaggcattcctggcccatggacgtgagcagtacggggagcaggcgtcgtacctgcgtaccgacaacctggacatagagcgcgatccacgcagccagggcttcgaacccgggcactacgacgtggtgatagcggccaatgtcctgcatgcgacgcgggacatccgccgtaccctgcggcacgtcaagagcttgctgcggggcaatggcctgctgttgctcaacgaactgactcaggccagcctgttcacccacctgaccttcggcttgctcgatggttggcgaatggcgaccgacattgcgctgcgggttcccgggactccggcattggcgccatcgacctgggggcacgtgttggccctcgaggggtatggctcgctgaaccaaccggcggtagccgcccatggcctgggccagcaaatcgtcaccggcatcagcgatggggtgatcgagtctcaggtggaggcggtgcaggagagcggcggcagtgttgccagggtaactcgcccagccagtccggcgccgagcccgcatcaaacggatttggcgcacgagtgcgggatgcaggtgcgccaggcaatccacgaggcgctgttcgaagtgctgaagctagaccatgcccggatgcaggacgaccaggcctttgccaactacggcgtggattcgatcaccggcatcaccttgatcaacgcgctcaaccagaagcttgacctgcgcctgccggtcacggcgctgttcgattttccgtcgatcagggcgttggccgcgtatatccaacgcacgtacccgtttctggaacaacaaaccagccgtgccgaggcgcctgtatccaggctgccggtgccgccagtgaccggaaccgagcccagcggccgactcgcaccggccagcgccgagcccgcacgggtcgaggtactgccattagccgaggtggtggaagtgccacaagtgtgctggcaattgcgaatcgaggggcccggtcggatcgatcagctgcaacctatcgaagcgcccttgctgccgttggggccgaacgaagtacggattgcggtacgcgccttcgccctgaacttcggcgacctgttgtgtgtcggcggcctgtatcccacccagccgccgtatcccttcaccccgggtttcgaggccagtggcgtggtactggaggtgggggccgaggtatcgcgggttgcggtgggcgatgcggtgttcgccttggccggcgaggccttgggcgcccatgcaagcgtcatgacctgcactcaggaccgggtgttcgctttgccagcaggcctgtcgttcgaggaggcctgtgcgctgcccgtcgtagcttggaccatgatagccagttttgcccgggcccaggtcaagcctggcgaaaaggtgttgatccagaccgccaccggtggtaccgggctgatcgccgtacaactggcgcagcatgcgggtgctgaaatctatgccaccgccggctcccaggaaaaactcgactacctggccgggttgggggttgcccaccggatcaattatcgcgaagaagacttcgagcaagcggtgtcgcggctgacccagggccagggcgtggacgtggtgatcaataccctggccggagatgcgatccagaaaggcttcaactgcttggcgcctggcgggcgttatgtcgaactggcgatgactgcactaatgttggcccgcagcatcgacctgtcgcggctcaatgacaaccagtcgttcatcagtatcgacctgcgcaagcagactcgggataacccgatgttgatacaggagttggccgatgaaatgaccaggctgctagaggctggtgtgatccgacccaccttgagccgggtcttcgatttcagcgaggtgcaggacgcctaccgctggctggctgaccgacgcaacatcggcaaggtggtggtccgggtaccgcaaacgacagccgtgccgaagcgtgcaccgcagcttaccagcgaaccgggccgacccgaaccgatcgcggtgatcggcatgagtggccggttcgccagcgccgacagcctgaatgatctctggcaggtcctcatccagggtcaggacctgttcgaggacgtaacgcgctgggatttgtcgcgatactttccggcctacgccccgtattgccggcgaggcggtttcctgcgcgatatcgattgtttcgaccctctgttcttcaatatctccgggcgcgaggccaaggtcatggatccgcagcagcgcctgttcctccaagaagcctggcgagccttggaagatgccgggtatgcgggtgctagcggcgagggcttgcgctgcggggtctatgtaggctgcgcagcaggcgattatcagcgactgctggaggccgacgcgccggcgcaggcgttctggggcaatgccggttcggtaattccggcgcgcatcgcctatcacctcaacctgcagggcccggccgtggcgatcgatacagcctgctccagctcgctggtcgcgctgcaccaggcctgccagggtctgcgcaccggcgatgctgacctagccttggccggtggcgtgttcgtgcaaagtaccgagttgttccatctccaggctcagcaagccggcatgctctcgcccagcggttgtgcttatgccttcgatgccaaggccgatggtttcgtcccgggggagggcgttggcgcaatcgtgctcaagcgcctgtctcaggctctggctgatggtgatgtgatccatggcgtgatccgtggtaccggagtcaaccaggatggcgcgagcaatggcatcacagcacccaacgctgctgcccagacccgcctggagctggaagtctaccggcgccacgacatcaaggtcgagcatatcggcctggtcgaggcccacggcaccgcgacggtgctgggtgacccgatagaggccagggccctggccgatgccttcgcccaagctggccatagtggcgcaccttgtgcccttggctcgatcaagagcacggtgggacacacggcgacagcggccggcatcgccggggtactcaaggtcctgctggcgttgcgacatcgacagatcccggcgtcggcgcatttcgtcagtgccaatccgcacatcgatttttcccacggtccgttccatgtccccacctgtgccgaacagtggcaccggcccgtggccggggagcggctggcggccgtcagctcattcggtttcagcggtaccaacgcccacgcggtgatcgccgaagcgcccgagcggtgggtgcgtccatcgaccagcccgttgcacctgatggtattgtcggccaggaccgtgggccaactacggcagcaggcaaagaacctgctcgcccacctgcagcgtgaacccgtcgagccgggtgccatgagccacaccctgttgttgggccggcgccacctcgaacaacgcttggcctgggtcaccagcgatacggatgcgctgcgcgcacaactggggcaatggctggacgccggcgagctggtcgatggctacagcgggactgtcgacggtacccaggacgcgtccaccaaggcccaggccgtggctaaccaatgcctgcaggacagccgcgtgccggccaatcccgagaagctccgcagtgcgctgctgtcacttgctcaactatatgtagaggggatcgagctggactggtcgcgtttgttccaggggcagcggccgggccgggtcgcattgccaacctatcccttcgagaaagagcgttattggccgtccggcaaagagcaagaggatcgggaggccgatgttcaggtgcaaccggctccacgcttgaccgaacccccggcggcgctcgccacgatggtgcaggtcagcgccagcaagccagccgcggcaacccaaaccaaacccgatcgtctcaagttgcgctctctggtgcaagacctagaagccctggacagcatcgcacccgacgtcgcaccgccggagcaacatgttcctaccccgcagctgcggccactgcgggcgattgccgaaccggaagactcggcaatcgtcactgtcgagctgcaacccgaaacgctacaagccgttgccgagccggtatcggttgccgtcacgccggcgcaagaaagccagcaggcacccgggtttgaccgctactcgctggagcgtgatctgtccgagagcctcgcccgggcgttgggcatcgacgtcgaacgaatccaggctgacaaacctttcgcctcgatgggcatggattcgatcatcgccgtggagtggagtcgcgagatcaacaggcgctacgggctggccctcggtgcgaccgcggtctacaagcatccgaccctggccggcattaccaccgttgtggcgacggagctagagacaaacgcgccgagcatggctgcatcgcctgtaccccaatccatcgctggccaagacaccaaggtcgtcctggaacccgagcctcgcgtcgagcagagcgtgcagtcacctcacgaggcgccggaccaggcagtggaggggattgcgatcatcggtatggccgggcgttatcctggggcggattcgctggaggcgtactgggacaacctcgcagcaggccgtgattgcgtggtggagatccccgcttcgcgctgggacgttagtgcctatttcgatgccgatgcacgggggtcgggcaagatctacagcaagtggctgggcagcctggacgacatcgactgtttcgatccgctgttcttccgcatcccgccgttggaagcggaattgatggacccgcagcaacgcttgttcttggaggagggctacaaggccttcgagaatgcgggttatggccctcgtctgctcagcgagtcccggtgtggggtgtacctgggcatgatgggcggcaatgaatacggtgaatgggtacaacactgccagggcgcgggggatttcaccggcagcagcccagccatcgctgcggcgcgcctggcgtactttctgaacctgaaggggccggcactcatggtggatacagcctgctcatcgtccctggtggccacgcacttggcctgccaggcactgcgcagcggcgagatcgacatggctctggccggcggggtgacgctctacctggcgccgcaagcctacctggcgatgtgcaatgcacgagtgctgtcggcccacggccgttgccggactctggacaacgacgcggacggtttcgtccctggtgagggcgtcggtgcactggtgctcaagcgcctgggcgatgcgattcgcgatggcgacttcattcacggggtcataaccggctcgggtatcaaccaggatggcaagaccaacggcatcaccgcacccagtggcgcaagccaggaggaactgctgcgcgaggtctacgcccgctatggcatcgatcccgaaaccatcagctacgtagagctccacgggaccgggaccaagctgggcgacccgatcgagatggaggcgctgtccacggtcttccaggagcacacgcagcgccagcattactgtggcctgggctcggtgaagagcaacctgggacatacctcggcggcagccggggtggcgggcttgcacaaagttttgctgcagatgaagcatcgcgaactggtgccgaccctgcattaccgcacgccgaacgagcatctggatctgcagcgctcgccattcttcgtctgcacggcgcgccaaccctggcaacccggggctacgccgggcttgcgtgccgccgtcagcgccttcggcatcagtgggaccaacgcacatttggtggtcgacgaatatcgtccagcaccttgtgtaaagcagggcgctgtgcctggcccacaaccctggctgttcgtactctcggccaggcgcccggaacaactgcgtagctgtgccgaacgcttgctggcatatgtcgagcgcgatgctgccccggacctcgaagccatggcctacaccttacaaaccggccgcgcagaactcgagtaccggctggctttcgtcgccgactcgcggtccagggtgctcgagagcctacagggcttcatcgatggtcaggaggttgccctcgcccacaccggccaagcgcgcaaggcgatgtcagcaacgctggcaggcgaagacttgctggccggcccaccaacccaggacaacctgcagcgcctcggttccttgtgggtcggtggcacgccgatcgaatggctgcgcctgtatcggggcaggcaacccaggcgcctgcccttgccaacctaccccttcgccagggagtcgcactgggcgcagccggacgatgccgtcgtccgccgcagcgccgctgtgagcaccacactaccagccaaacgcctgcatccactgatcgagcgcaatacctcgagcatcgctggcttgcgctactcgacctggcttgctccagaggatgaactggtgcgcgactgctacatcgcaggacagcccggtatgccggctatcgttctcttggagtgggcacgggcggcggtgctattggcgcaacggttgccggccgacagcgccgtgaccctgcaggacgtgcactggctacagccgctgctggtcgcgggggcgcttgaggtgcacctggagttggcggtggatgaactgggccacatgcgttttcggatcttcagccaagagcgtgacagcgaggtactgtactgcacaggaaccgcctggccacagactccaacagacccaccagcgccacggatcgacctggccaggctgagggaggtctgcaatgccagtgtgacgggacaagcctgctatgccgacctcgagcgcggcgatgtggcctacgggtccggcttgcgggccctgcgcgagttccgtcggggcacgcggctcgccctgggcgagctgcacagcccggatgccagcacaaacacgggctggccggaggcagcggtgctggtgactggtttccaggtggccgaggcgttgctgccgggcgcccaggccctggtaccgccctttagggtggccagggtgcagcgctggggagcattgcccaggcaggcatgggtgagcgcggttcctagcatggacaattcccaagcgcaaccaccggtggatatcgatctggccgatgatgaagggcgcttgtacttgcgcctgcagggcctgagtctcggtgaaccggccagtctcgacaacgtcctggcaggagcgatgaaatga

SEQ ID NO: 341855 - DNA, 333 bp, Pseudomonas aeruginosa
atgaactctaataggggctctactaaggacggtgcgtatcacatctttggcgtctgtcatgaacccgacagccgcttgttcgtcgactacgcggtcgatgaccccggcgcatgccaatcccgactcctggacttcattcgttgctccagcgaccccgcgctggcctgctgggctgcccggacgcaattggccagcggcgatgtctttgaaatcgaatgcgtgcaggacgtgagtgcagcgcaggaagcagtagagttttggcgtgcgtatttccgcatgctcggtatgaccgtcttcgaggctcgccacctggcggaccggaccgccgactga

SEQ ID NO: 341856 - DNA, 174 bp, Pseudomonas aeruginosa
atggccacgaaaccgctctacatattgaacgtccccgaaccgcgactctgcattgacaaccagaatcgcgtgatcaaaggcggcaaccctatctggttctacgaattcaacggttcgcaggcccagcagtggataccgcagcgtttttcgtctgccaaagctgagttcagctaa

SEQ ID NO: 341857 - DNA, 5235 bp, Pseudomonas aeruginosa
atggacgaagagcaactacctccccttattgactcggcatttaatctgacacctattgcgattgtcggtatgagctgtcgcttcgcaccggaaatttcgagtctcgatgactattgggactttctttgccaaagccaatctgcggtaggtgatcttcctggcgagcgctgggccgattacgaaaacagcagccccgaagtggccgcgagtttgaaaaaggccacgcgccgcggcagtttcatggacgggatcgaccagttcgaccccggcttcttcgggatatccgcgcgtgaggctcagtccctcgacccacagcaacggctgattctggagttagtttgggaggcacttgagcacgccggaattccgccatcgcggcttaaaggcagcgaaactggcgtttttgccgcagccaattcgttcgattacggccataggatgttggcagacctcagccatatcgaaccctgggcggtcaacggcgggatgctcttcggaattgccaaccgggtgtcctacatcctagatctgcatggccccagcctcgtcgtggatactgcatgcgcgggatcgctcactgcattgcacctggcttgtcaaagcttgcgcgacggcagcacagacctggccgtggttgctgccgtgaacgtgatgacctttcctggcatgagcttggcgttggacgtctcgggagcgacagccgctgatggtcgttgcaaatccttcgatatcacagccaacggttatggccgtggcgagggcgcaggcgtgctgatagtcaagcgccatgccgatgccctacgcgaccaagatcgggtacttgctcttgtgcgtgggtgtggggtgtttcaggatggtcacagcgctggcatgatggcgcctaacggtgacgcgcaggccctaatgttgcgcgaggtctaccgcaaggcgggcgttccctgcgcctcggtgcaatacgtagaagctcatggcactggcacccggttgggggacaaggccgagttgatcgccctgtccaccgtgttcggcgcgggccgtcacaaggataacaggtgcctggtgggcacggtgaaacctaacattggccacttggaagccgcggcaggcatggcggggctgataaagacagtattagcgctcaaccacggccaattgcctcgcagcctgtacgaaaacctgaccgacgaactcgattggcccgcctcggggcttgaggtggtcgccgctctgatgccgtggccggacacgcagttgcccagacgagccggcgtctcatgcttcggcgtaggcggcaccatcgcccatgcgattctcgaagccgcgccatttagccccctgaaatcaggcttcgtggactcaggaaccgccgagcagttgttgccgttgtccggccaatcgccgcagaacctgcgcaacaacgccgcgcgtcttgcccattggctgcaactgcaccctgaaacttccttggaagatatcgctcacaccctcgttactcggcgtgaccacctgcgctgtcgaggcgcgttgaaggcatccaattgttcggaactgatcgaggctttggattgcctggcagcgggtaaacagtccgagcgctgtttcagcggcttcgcgactgccgagagaggacccgtatgggttttctccgggcacggcgcgcagtggagcggcatgggccgcgagctactgcacggccagccggtgttcgcggccgaactggacagtcttgccggggtttatctcgaggagttgggctattcgccccgtgaggcgctggaggagggccgatttgattccatcgagcgaattcaggccacgaccttcgccttgcaggttgcactggctgcgctctggcgtagcctgggcgtcgagccgcgggcggtgattggctattcgaccggcgaaatcgccgcagcagtggtcgcgggggcgctggacaagctgtcggctgcgcgctttgcctgccgtcgggcggcgatctaccagcggctgtcgggccagggcggcatggtcatggtcaacctgccgttcgccgaggctgctgggcgcctgcagggtactgcgcaggtagtcgcggcgatcgctgcaagcccatcatccacggtgatttccggtacggccggcgaggttgagcgaattgccggcgagtgggcagaggaggggctgatgctccggcgcgtggcaagcgatgtcgcatttcacagcccacatatcgatctggtgctggaagacatccgccacgccgccagcgatttgcgttgcctggcgccgcacttgcccatgtacaactcgactttgagcgatcctcgggcccagacgcctagggatgcggacttctggtgtgccaattcacgtaacccggtgctctttgagcaagccgtgaccgcagcccttgaggatggcctggcgctctacttggagatctcgagcaagcctaccgtcggccacgcgttgcaagagactgctgatgcctgcgggcacgagaacgtgctggtctgtccgagcctcagggagggacgcctcgagttcccggagatactggccagccttgcccgtatgtattgtcatggcctggctcccgaatggccgacgccaggaaacttggtgaatttgccgagcatgggctggaaccatcagcgttattggacgacagctttgccggtgcgggccagtttgggcaaaggccacgaaccactgcatcactccttgatgggtagccaccatgtggtgtacagcgccccgccctgtgacatctggagcactcgcctggatttcgagctacggccctatccaggccgccatcccatctgcggtgtggagattctgccagcagcggtgctgttgaacagtttcatccaggccggggcgcacgattcacaatggccggggctgcgcgatgtggtattgcggacgcccgttgccgtggaaggagcacgggatgtccagatcatcagacaggggcaattgatccgcctgtgtagtcgcctggacgatgagtccgcgcaatcggaacaggaacgcgaaatgggctggctgacccataccactgcgaatttggactggagtaccgggctgcaaggcccagccgtcgatatagaggcctggcgagcccgatgcactgagattctggagtggtcgcaggtcgagccgatgtaccgcaatcgggggatcgccgactatggcttcctgtggcgaatccgtaccctgcagcgtgggcaggagagcctgatggcgacgatccaggcgcaggtgggcccgacccagaataatagttgggcggtggtgttggatgccgtgctgaccagcctgccgctgctgctgcccgacgacgatctgctgcgcatgccggcggcgatcacctcgctgtgggttcgaccagcaccacccgaacgcttcaccctgtgtgccgaaatagtgccgcccaccggtggtagccagtccatcgacctgttggtgtacgacgaacaggggacgctggctgcgcgtatcgatggcatggtgttcatgacagtcgaccgccagaacgagatccatggcagcagtgcgacggtgttcgtagagggttgggagacctggcaattcgaaccctccaccgagcggctaccgcacttggttttagtggggccgatcagcgatgtctcgcggctgttttccttcggcttagatcaagtcgggattgagcattcctgggtgcgggaaccctccgagctgggttcgagtgggcagccagcgctggtgctggtgctgggcgactcatcggaggccgacgagtcgttggcggataccgtcgaagccaacgcctggcgcttggtagagacgacacagcagatcgagcgactggcgcggaatcaaccctgcctacggctgggctgcgtgaccttcggggtcaaggctactgccagtcgggcagccttggcacagtcaacgctgtggggcgtggcgcgaatcgtcgccggcgaacagccgggtctctgggccggcctggtcgacattgatccggctgccttgggtaacaaaggtacttttggcctgttttctgcagccctgggacacaaaaccgaggatgtgatcgccctcggtggtaatgtctgtgaagtcctgcgcctgcggccggcgcagacggcgcagacggccggtaagctgcaatgtgtaccgggtgcgagctatgctatcaccggtggtttcggcgctttaggtttgcaagcggcgcagcacttagtgaaccaaggggcgcgacgcctggtgctgattggtcgtcaggccttgccgccacggagtgattggcccggggtgcagtccccccagctgcgccttgcgatcgccggaatactcgctctggagcgccaaggcgcaacggtggtgccgctgacattagacgtcgccgatgctgttgcggtgtccgaggcactgtccgaggcatcgctgggcctcccggcaattcgtggcgtggtgcatgccgccggtatctttaaaggaggtctgatcgaacgtctgcaccgcggtgacctggcccaggttctgcaggcgaaagtcgcaggcacgctggctctggagcgagcgtttcctccgggtagtctggactttctggtgctgttctcctcttgcgggcaactggcgcggctctccggtcaggccagctatgctgcggcgaatgcattcatggatggtttcgccaggtaccgggcggcgctggacgggcaacggaccttgagcatcgcctggatggcctgggagcagttgggcatgtcgagtaatatcgacgccactcttcgcgaatgcgctgccaatggtctgggtgcgctgagtgtacgctcggcactgacgtcctggcagttggcccagaattgcggcgccccttatgtggcggcttttcgcgtaatgcgttcggtgcaactcggccaaccactaccggtgttgagccgggtagtgtgcgaggcaacgcaagataccttgcatgagacgtacgctgtcccttggagcggggtgcccgacgaacaactcggccagtggttggtacaggacattcaggcattgatcgcggccgaactgcggtgtgcgccggaggatatcaatgctcagcgctcgctggtcgaaaagggcttggattcgttactcagcgtgtcccttagggggcgcctgaaacagcgctaccgaatcgacgtgccccccacgctaatttggaatcacccgagtgtggaggctattgcccgttacgtgcgtcaggcactcggttag

SEQ ID NO: 341858 - DNA, 855 bp, Pseudomonas aeruginosa
atgcacaatgcaacggccagctggaccgcaatctatacgtccatcgctcgcgcagcgcaccaggtactggaccagacgcccaaggtgattgatgacccggttgtggtcggtctggttgaaggctcaagcgtgtcgcagatccaagcgcgggcgaacgattttgcgcagcccttgcagcgtttagctcgggcgctgttcgtcatgcgtaaccgattggctgaagacgaattgcgtcgggcagtggaggcgggagcagggcaatatttgatactgggcgcggggctggatacctttgcctaccgccagcctaattgggcgcgagggatacgcgtgatcgaagtcgatcatcccgcctcacaggcatgtaaacacagatacttaaagaccgcggacatcaagctacctgctaatctcagtttttgtgcccttgatttcgaatgtacgaccctactgcagggtttgcaaagtgtgaattttgatccacaagtgcctacttttctgtcctggcttggcgtcactcaatacttgaatagaaccgccattcggcatactttgaaagatgtgctgagctttccgcgcggcagtggcttggtcatgagctttattgttcgggattcggtgcttgatggcttggaatcagaggcagtccggctcttttccagcctggcggctagtcggggggaaccttggatcagccagttcgatcctgtgagacttcgtagctggttgttggcgttgggtttcgccgaggcgtcgttgatatcgccgagcgagttgaaccgtcgttatttttataaccgttcggatcaattgcgagcgccagtcttcgagcagttgcttagtctacgagtctag

SEQ ID NO: 341859 - DNA, 747 bp, Pseudomonas aeruginosa
atgcctgcaacctatcacgcgcaatttagtagcttgcccagcctgtacgcagatatggctgaatgggcttttcgtaaagaaatagagatcccgtgcgtacttcaggctcttggtgatattacagggaaaataattctggattatggctgcggtgagggtacttacgcgcgcttgcttagacgcctgggggcggccaaagtgactggctttgacctcgagccaagcatgctcgaaaaggccgagcaatttgaggccattgataaaattggggttgaatacattcaatctttagatgcttcattgtttggtacttatgacatggttttgggcgtgtatgtgctgccgtatgcggatagtaaacgcctgctactttcaatgtgtgaggacatggcaaaaattttgaaaccgggagggcgattggtcacgctgcctcttcatcctcactatgaacaaacgccgcgttattatgaaaagtacggtttcttgctgtcggctaaccccgggaatattgacggaaatagtgtttcgttagacttgctgtggcggggaaaaacatccactgttaaagcctggtattggtcttgtgaatcaattagtgaggcccttgagatggctggatttgagaaaataatttttaccaaccctagcccgtcagattttcatgatattgagagtgctcccattttcttgcgggattatctaaaaaatcctcatgctgttgtggtaagcgctcaacgcaaaaaataa

SEQ ID NO: 341860 - DNA, 1029 bp, Pseudomonas aeruginosa
atgctagcactagttaaggctagggactctgaagggctttggctgcaagaagctcctctgcccatgattcgatctgatgaagtacttatacgcatcagcaggactggtatctgtgggacagacttacatatctggaactgggatgactgggcaaaaaaaactgtgcctgtaccaatggtgatagggcatgagtattccgggaaaatcgtggaagtcggaagtgatgtaaagacgcttcgtaccggtcaacgggtaactggtgaggggcatctaatcgacctcaactgcagagctgccagatctggctgctttcatctggaccccaatacacgcagcgtcggtgtcaaccacccgggtgcctttgctcagtatttagcattaccagctttcaacgtggtgcctttgcccgacgagatcgatgatgagcttggcgcaatactcgatccgcttggtaatgccgttcataccgctttggctttcgacgttacaggcaatgatgtggctatcgttggtgcggggccggttggcatcatggccgcagctgttgcccggtatgccggcgcagcaaagataattatcactgataaagaaccgtaccgtcttgccttggcaagtcgactggttgacgcgattcctgtcgacgccaacgaatatactttgacacaagcagcgcggttgtatggtatggaaaatggatatgacatcggctttgagatgagcggaagcagtacagcgctagacgggctcatagatgcgatggcaacaggaggacggatcgcatgtttagggctgccggccaatgatataacaattgaatggagctcggttgtttgcaagagtcttgtgctggagggaatttacggcaggaagatgttcgagacgtggcgaaagatgctcggcatgctaagcggggggttgaaagttagtgggattataactcaccgttttggttttcatgatttcgcacatgcctttgctgcgatggagggaggtcagtctggaaaagtcattatgaactgggaggtataa

SEQ ID NO: 341861 - DNA, 2361 bp, Pseudomonas aeruginosa
atggagattcagatccatgtctacaattctttaagtcagcttgactcgaaagagtacaaagttttttttgaaaaggctaaggcgcctttcttttttgactggagatttttgcttgcagccgagcgggcacctttgatcaaagttcgcaaggttttttatttggtcgctcgcaaaggtgatgtactgcgtgcttttctacctctctatttgcaaaaattaagtgatgttgatccattgaaattgctcgcagacagctgtggcctaaaagatgatggtgaagatcttggtctgctcagccatgttatgcattgctatgatagtcgattgctattgagtgaagatgatgcagatttacgggctgcaatgctagacgctgccgcacgcttagccaaggccgagggggcaaggtactttgcaatactaaatgtagatgacgcgtcactgttgcagactgctgagcttcaaggcttaaacataaaatacatggttgatcgtttttatacctgccttgatggtcgcacggaaattaaggatataatcgaaacgctgccaggcaaagggcggcgtgaattattccttcaacttcgccgatttgaagcctacagcggtgccgaagttaaagttctttcgcctccttttgatcaacggttagagcagctggcaaaattgtgtcacgagacaactgctagaaaaggaaccccccagtttttccctacagtcgcattagctgactttgtacgtttgtgtggtgatctcgctcgcttgtttgtggttgagattgatgatcgattgataagtggtatcataagttatcagctcgacgataccctatgcctatggtcagcaggcatgcaatataatcagacgacatttagcccctatgctgttttggtgtattctgcatatcgctatgcgttagataacggaattcgccatatcgaattcggtcgtttaaatgccaaaacaaaaatacgcatgggttttcatgcaaagccaatgaatgccgtgtttagtcgcgacctgaagtctgatgttgggtgcttagatggggcagcgtccttcatctcgagggagacaatcgcttatgcgcagtggtatgacaaacgtgtgtggaataaacgagattttggaagagcaccgcgcgcattagtattagcagaaggcgatttgcacatagtatccgccattaactttgcccgtaatcacggactaaagctttgcaccaaaacaggcggtcacagctacgctgggacattcatgcagcaggataccttacttatagatctttccaagttagacaatttaagagtagacccccatgaatgtaaagtggtagcacagcctggcgtgactagtaaacagctgagtcaaagcttgtacgagtatggactggcttttccgacgggacatgctcgcaatgttacgctgggagggttcttgttggggggggggctgggcatcaactgcaacagttggggtggtatgagtgttttcaacgtagatgcgctggacctggttactgctgatggcgtttgtcgccacgtcaacgccaactgtgagcccgaactatattgggcggcaaggggggcggggccgcagtcgttcttcgtggtaacacgcttctatctaagctgttacaaacatcctaaaactatctgctcaagtagctacaccttgactttagaccaagtaccaacagtcatggagtgcctcgaacagattaaccctccaagcaatatacagatcatgctagccattgccgctaacactagcggtgatcacaatgcgatgttgaattttcttatatatacagacgaaaaagaagaatctatatctcttagaaaacacttgatctctcaggtaggtaatacgctagagcccgtcgaagaagaccgagttattggctttgaggatatctacaaacagagtgacgagatgctgacatgctcgcgttacagaacggacaatgtgcttactgatcgagtgagggaatcactgtctgtattgtaccgccatattgcattgccacactcaataaaaacggtaaccttgatagtctggcgaggagagcaaagctatccagatgcagcattttccgtcagagggaagttttttatctcaacttacgctcaatgggatagcccttgcgaagatagttccaattcttcatggctgaaaagtctatatgatgaattgcagggattttccagtgggagttatattaatgagtttgatatggaagggcgccccgatcaagtacatcgttgctttagcgcaggcgcctgggggcgtctcattgaattaaaaacacgttatgataaagacatgctttttgctgcgggtgtaaccgacgctctctaa

SEQ ID NO: 341862 - DNA, 1563 bp, Pseudomonas aeruginosa
ttgatcggcgccgcctccacgcccgtgcgcctgcgcacgggctcgcgccggcgaacgccattctggctgctcctgccggtcctgctcctcgccctgctggccagcctgccgctgctctacgtcgcggccaaggcctgggacgccggctggcacagcgcctggcaactgctctggcgcccctacgtattccgcttgctgggcaacaccctgtggctgatgttcggcgtgaccctgctcagcgccctgctcggcctggccctggcctggtgcgtggagcgcagcgacctgccggcgcggcgcttctggaacgtggtgctgtgcctgccgttcgccatccccgccttcgtcagcagtttcacctgggtttcgctgagcccgatctacgaaggcctcggcggcgccatcctggtcatgaccatgtccaagtatccgctggtctacctgccggtagcggcgaccctgcgcggcatcgatccttccctggaggagtcggcgcggatgctcggtctgtcgcggcgccaggtgttcctgcgggtcaccctgccgctgctgcgcccgaccctggccgccaccggactactggtggcgctgcacatgctggtggagttcggcgcgctgtcgatcctgcgctaccagaccttcaccacagccatctaccaggagttcgaactggagttcagcaacgccaccgcggcgatgctctcctcggtactcctggcactgtgcttcctgctgctctggctggagttgcgcatgcgcggccgcggccgcctggtacgcaccggccagggcagcgcgcggcgggccgaacgggtccgcctggggcttggcaagtggccgctccaggcgctgctggcgacgctggtgctggtcggtaccggtatccccctggtgatgctcggttattggctgtacgaaggctcctcggccagcttcccgctgatggaaatcgcctcgaccctgctttcctccctgtcgctggccttcggcggggccctgctcagttgcctgctggcgctgccggtaagcatcctggtggtgcgctaccccggcgccctggcgcgctggacccagcgcctgccgtacctgctgcaagcgttgccgggactggtgatcgcactctcgctggtgtacttctcgctgcactacctgccagccacctaccagaccaccggcttgctgctggtcgcctatgccctgctgttcatgccgctgacccaggcaccgatccgcgtggccctggaaaaggcctcgccgcagttggaggaagccgcccgcactctcggccagacgcccttgatggccttcctgcggatcaccctgccgatcatctcgccggccatcggcgccggcttcgtgctggtgttcctcgacaccatgaaggaactgaccgccaccctggtgctaggtcccaccgggctgtcgaccctggccacctcggtctgggtgcacaccgccaacctggagtacgctgccgccgcaccctacgccgcgctgctgatcctgatctccggcttgccggtgtacctgctgaccacccgggcgcatctcagcactcactga

SEQ ID NO: 341863 - DNA, 1008 bp, Pseudomonas aeruginosa
atgcctgttcgacttctcaaccgtttccgccacgccgccctggcgtgcctgctcggttcgctttccctcaatgcggcggccgatcccgtcacccttaccctctacaatggccagcacgccgccaccggtatcgccatcgccaaggccttccaggacaagaccggcatccaggtgaagatccgcaagggcggcgatggccagctcgccagccagatcaccgaggaaggcgcacgctcgccggccgacgtgctctacaccgaggaatcgccaccgttgatccgcctggccagcgccggcctgctggccaagctggagccagagaccctggccctggtcgagccggagcacgccggcggcaacggcgactggatcggcatcaccgcccgcacccgggtactggcctacaacccgaagaagatcgatgagaaggatctgccgaagagcctgatggatctttccgatccgtcctggtccggccgtttcggcttcgtgcccaccagtggcgccttcctcgaacaggtcgccgccgtgatcaagctcaagggccaggaggaagccgaggattggctgaccggcctgaaggccttcggctcgatctacaccaacaacgtcaccgccatgaaagccgtggaaaacggcgaggtcgacatggcgctgatcaacaactactactggtacaccctgaagaaggaaaagggcgagttgaactcgcgcctgcactacttcggcaaccaggacccgggcgcgctggtcaccgtctccggcgccgcggtgctcaagtccagcaagcaccccagggaagcccagcagttcgtcgccttcatgctcagcgaggaaggccagaaggcgatcctcagccagtccgccgagtacccgatgcgcaaggggatgcaggccgatccggcgctgaagccgttcgccgaactggacccaccgaaactgaccccggccgatctgggtgaggccagcgaggccctcagcctcgaacgcgacgttggcctgaattga

SEQ ID NO: 341864 - DNA, 2847 bp, Pseudomonas aeruginosa
atgagccagacccgctacggcatccgccgcttcgccctgctcaataccgccggctacagcctgggtatcttcccgctggaaaacccgctgtcgatctacggcgccaacaacctgggcaagagcgcctcgatcaacgccctgcagttcccgatccttgcccgcctgtcggacatgagcttcggcaagtacagcatggagcagtcgcggcgcttctacttcgcctcggacaccagctacatcctcctcgaactgatgctgccccacggtccgcacgtgatcggcgtggccgggcgcggcccgggcggcggcttcggccaccagttcttcgcctacgccggcgagctgagcctggaccactaccagaagaacggtacctgcctgcgccagcgcgagctgttcgccaaccttgagcgcgaaggcttcaaggcctacgaggtgaagccggaagagctgcgccgcctgctggtcggcgggcacacgtcgatcccgctcgacctgaccatgatcccgctgcgctccaccagcgagcagagcctgaagaccttccgctcgctgttcatcaacctgctgcacatgcgcgagatcaccgcggccaagctcaagcagctgttcctcgacgccttcgagcacagcctgcgctcgggtaatgtcgactacatcgccgcctgcgaggaggccttccgcgacgtgcggcggatggagcaggactaccaggcgctggtcgccgccggcccgctggtggaagccctggccaacggcgtgacccagcgcgacgtactgcgcggcaagatgcaccgcctttcaccgctgctcgacagcctgctcggcacctggcacgactacgccggggcgcgccgcgaggaactgctgatccagcacgagcaataccgcgccgagcaggacggcctgcagaacgaacagcgtggcggcacccaggagctgatgcgcctggagcgcgagatcgccggcatccagcgctggctcggcgagctgtcggtgctcaagacccgcttcgccctggtcgacgacgccaaggtcctcgaacaacagctgctcgccgccaaggatgcccacgacgaactggccggcgccctggcccattcgcggcagttctccagcgaagacctggaagagcgcctgcgcgacctggaaaaacgcctgaagaacgtccgccagcagctcgaacacgccgacaacaacagctacgcacgcctgcgcgaggagttcagccagcaggacgtggaacgcctgatgcgtctgttcaacggcgcgctgttcagcctgccgctcggcgagaacggggtgaacctggatgacggcgacgtctgggtgaagagcgtcgaagccatcctcgaccacttcaagggcgagcatttcgaggctcccggactgagcatcgacctgtcgcacatcgaaccgccggcgttgcaggccctggccgaccgcgccgccctgcgcgaccagaaggaacgcctggagaaggagctgaagcagctcaagacccagcagagcgtcgctgccgaccgcgccgcgagcaaggcccaggcggagaagctgtaccaggacgtgctggatgcgcagaaggccctggaagacttccgccgcacccagacgctgaccgccgaggagcccgagaagctcgccgaactggcccagctggaggcgtcccaggacgaactcaagcgctccagcgacgccttcgccgagcgcgtccagcaactctccgcgcgcctgcaactggtggcccggcaactgggcgacctggaggccaaggagcgcaccctggaagatgccctgcgccgccgccagctactgccggccgacctgcccttcggcacgccgttcatggagccggtggacgactcgctggacaacctgctgccgctgctcaacgactaccaggacacctggcaggcgctgcagcgcatcgacgggcagatcgaggcgctgtacgcccaggtgcgcctgaagggcgtcgccaagttcgatagcgaagacgacaccgagcgccgcctgaagctgttgatcaacgcctacgcgcatcgccaggacgaggccctgacgctggccaaggcgcgccgcgcggcggtcaccgacatcgcccggaccctgcgcaacatccgcagcgactacgacaacctggaacaccagttggccctgttcaaccgcgagatcaacaagcgccaggtttccaacctacagagcttccgcatcgtcctcgcgccgaacaaggatgcgctcaagcacatcgaccagatcatccacagcgccggccagtacgaggaaggcgagaacctctcggtgttcgacctgacccagagcgccgagcaggacgcgaagaacgaggaggccaaggaatacctggcccgcctggtcgccgccaaccacaaccagttgggcctgaaggacctgttcgaactggccttcgagatcaccaaggtcaacggccagccgatcatgcacaccgacatcgacggcgccgcctccaacggcaccaccatgaccatcaaggcgctgaccaacatgtacctgttgctgcacctgatggaccgcgagcaggccgggcgcgtgcgcctgccctactacctggacgaggcggcggacatcgacgagcgcaaccaggccgcgctgctggagaccagcctgcaactgggcttcgtgccgatcctggcgagcgtgaagccgcaggtttccgcacacgtggcgatcgacctggaaggcggtagcggcccgaacggcatctatatcgacgaagcggactggaaatacatccgtcgccgggatgccgccgccagcggcgaaacccgcgcagccagcgagccggaggaagccggcgaaccggcgtga

SEQ ID NO: 341865 - DNA, 696 bp, Pseudomonas aeruginosa
atgcatcttgatctctccgaactgacccagctcgcgccgatcttccgcgagctgttcaagggctaccacatcagccaccgcgaccccgagctgtacacccagctgtcctcgcaccaggaccagtaccgcggcctgttccgcgccatgggcttcgagctggtctgcgacacccgcggcttctactacttcgtcccggagcaggtcggcgcccaggtgaacaagaccgcccaacgcctggcgctgttcaccttcatcctcgtcgaacacctcgccgaccagggccgcgacccgctgtccgtgctggacggcggcagcatcggccgcgaagagctgccgccgctgctggagaaataccgcgacctgttcctccaggccgaggtgcagacccaggaagaactggaagagaaggtcatgcgccgcctgacccagctcggcttcgcctccgaggacagcggcgtgtaccgcttcatgccgccgatgcaccgtttcctcgacgtctgcctgtcggtgcagcaggaccgcaacctgtccgccagcctgcacgccgacctgccgttgcagacgccggtgctggtcgatgacggcgagatcgaaccgctgatggccagcgacgaagaattgtccgaagagagcgaggaagacgccctcgcccgcgccatcgccgaagaacacgcgcaacaggaggctgacgcatga

SEQ ID NO: 341866 - DNA, 1299 bp, Pseudomonas aeruginosa
atgatcgacccccgacgcgtactgcgtgcgcttgccgaacactgggccctgctcgagcctctctgcgagcgcttcgatgccggcaccctgagcctggcggaactgcgcagccagttgaacacccagttaccggaaagcaacccggcggaaatcaccgccctgctcgaccagtggatccgcctggatatcctggtcccggtggccaagagccccaaccgtttcgagctgaacgcgcagatccacgacttcctcgcctacctgcgccacgagcatcgccttggtctgtgcctggagatcgaggcctacctgcgccatctggagcgcctcgccgggtacatccaggacgccttcgagacccgcgacagccaggacctggcgcgccagctgcgactgctcgacatgcgcgtgcgcgatgtactgaagaagctcggcaatgacgagcaggcactgatcggcgtggccgagcgggccaagaccagcgaccggcagattcccctggcgcagcgctacgcggaggtcctggcgacctgggacgagtacgtcgagccgatgatccagctggtcagcgccgacggcgccttcgagcagggcgtgcggcgggtcgaacaggtcctgctgcgcctgctaggcgaacagcagcgcctcggccacctggtcgacgacgacctggtgctgcgcacccacgcgcgcatcctcgagatgcagaccaacgcccagctgaccctgcgccgcgcccgcgaattattgctgccgctgcgcgaggaagcgcgccggcacaacgcggtgacccgtggcgccgccctggcgctggcggcgatccggcgcaagggcctggatgccgtgccgcaggcggcgatgccgctgttcacccggccgcagagcaccttcctcggcaccgcctcgcaggtcgagagctacgtcttcgccctcgcccgcttcgagccgaagccggcgcagttccccaagtccagcggcacgcgcaagagcaacgggccggcgcgaccaccacggaccgcgcgggaaatgatcgagcgctgccaggcggcgctgccgctgccggacctcatgcaatggctgctggcccaggaaccggacggcgccaccgacgagttgctctactggttctcccggctgtcgcgcgacgcgcgcttccagcgcgaacgcctgcaacgccgcgagtacgaaaccaccgaacattgcgtcagcctctgctccttcgccctgacccccgccgccaaggacaagggccaggccagggacgcagacaccctttccgcgagcgaaacccatgcatcttga

SEQ ID NO: 341867 - DNA, 603 bp, Pseudomonas aeruginosa
ttgaacgacgccgcctacgccgaggcccgctgggccgaactgcagaaccagggtgaccttgcctgggacctggatgccatcaccaaccgcagcgaggcgatcgccttcctcaaacgtttcgagaaccgcctgtgcatctactcggcctatgtcgagaagctctacagcaactacagcttcgtgattcccgagagcgaccatggcggcatcaccatcctgcccagcgagcaggcctggcacgacaccttccacgatatcccgctggccgcggtggagcccaccgggatccatatcctgccgggcgagaccatgggctatcgcgggctctacctgaagattcccggcgagcaccgcctggtggcgtcgaaggaattgccgttccaggaagggttgaaactgctgatccagcgttaccaggctcacgacgacgtgttcctgccgatcctggtcaagggcgacctgcgcgagtacgaagcgcgcatgccctcgctgcacctgcaccggatcaaccccgcccgcctcagcgcacactccctgctcagcctcaacgccatcaagggcgccattgccgaccatctgatcggcctgttccgccagcagtga

SEQ ID NO: 341868 - DNA, 2280 bp, Pseudomonas aeruginosa
atggctagccgacaattgtccccggacatcgtgtccctcattcaccatgttgagcttaatgagtcaggatggtggaaaaaaggcgtcagccagatcattaaagcggtgttctggacaaaccagaccccatctctaacgatccaaggccttcacgaagccattcaccgtgaagccccaggcatgaatctaagcgtggaagagcttgaaaaacagctcactacattacgtgaccaaggcacgatctctttccttcctgaacagacctataagctcactgaacgcgctttgagggatctgaatgccgaagccgcttctgcacaagccgaacaggccgagtgccagcaggagtttgtagagtcgtgcgtcaagcactgcccaggacttgaccacgcgaaggtatggaaggacttcaccgaggcgttggctaaagctatcagggtcagtggagcaaacctgtttaacctgctagtgggcgggcagctgcgtaaggacttcgattggctggatagtctgatcacgaaggtagagcccgaccaccgcgaaggcttgcgcaacgtgctgatgtcattctttgacccgaataaccacgtttgtcgaaaccagatccttcggttcatgaccgcctactttttcgccgaagccacccgtttgcatcccgaaacgcttgagatgatcaacaaagcgcgtaaggtcaaagcaataaaggtggttctggacaccaattttttgttctcgatcttgcagctccacgacaacccggccgatgctgccgctgtatcactggtggatcttgcccataaaagcgacggcaaactggacatcagactttacgtcctacccagcacgctggatgaggccaggcgggtgctcatggctcagttgcaccaagtcgagcatattcggacaacacaagccttggctcgggccgccatgacccagccaatgcccagcatcgccaaaaagtttttcagcacagcagccgcatccccaggcctttccgcacaggcatacttcgccccgtacatcgacgatttgaggctgatcctggaagagagggggatcactgtgctggatgcgcatccggagatctacaacaaacgccaggatgtgatcgacgacgtaatgactggcgtgaagcgcgaggagaccgactttccggagaaccggcgcaaaagctatgagacgcttctgcatgacgccgtcctttggcatgccgtcaacgacagacgtccagcgaatgctgattctccgtttgaaactgaatattgggcggtctcgatcgattggcgcctcatcggattcgacagagctaaacgtaccgcttcgggctcgtccttgcccgtggtacttcacccaagcaacctggtgcagctgattcagttctgggtaccgagaacacctgagcttgaagaaagccttgttgatgcgctgcgcttgcctctatttttccagtctttcgatctagaggatgaaaaagccacccttaaggttttggagtcgctgtctcgcttcgagaacatcgcagatctccccgaaaacgccatcagggtcgtcctgaccaacagagcgctaaggaacaggctcaaaaaaattgaagcctccaacgaagaagtctttcagttggtgcgcgacgagatcctggctcaccacagggaagtctcagagcgcctagagctggccaattcgtctctgcaagagcagcaactccatttagatcaggagcgccaagcgcgagaggcggccctccaaagtcagcaggaagctgttcagcgcgttgccgatgaagaagcacgccggcaggaagcagagcgcaatgctagcaatctcgctgccgccaacgcccagctcgaggggcgcctccagcagaacactcatcttgctagtcaacagatccagtccgaacgtgatcgagcagatggagcagagcgttcactagcccgaattgagtttgcagtacggttcgtgatcattccagccttactaggttggttgatcttctggctatcaaacgggataacaccaggctccttaccgggcatgaccacagagatacgcattctgtccgcgcggttggcggtctctatgctcccgcttaccgcattttggtgcctcgcggctggttacgtggagaagagggcgcacctgcaaggatggtggccaagccgagctattagctggattgggcggaaggtcattatcgcccctgcggcgctggcgatcgaagccattttcacgggcggtacgtgggacggtatcaagctctttatgggctggaattga

SEQ ID NO: 341869 - DNA, 705 bp, Pseudomonas aeruginosa
atggagtcagttgttccgagagaccggtcgatatccgatctcttatcgcgtgccgcatcagccgatctggaggtcttggccgacctgatcaccgacaatggcaagggcaggattgccctcgacagcgacgtgaaggcaaccatcatgacccggaaggtgcagggccgtttgcaatctatttcgggcctgcttgaaaaggaaatttgtgctttcggaagcaacaccattgtttccgcaatcaaatcggagagcgtcgactacctcgaggtcgccacggatgtcgccaaaaaactggacggaaaaccctccgcgcaagatgacatcttcgccattgaggaaatcatcatccgccaggccatggacaaatacatgggagacgaagcgctcaaggactatctgagcggtggcaatctcgctggctacatcaatgaaatggtgaaaacgctgatgttgtctgccggtagcctgggcggcatggccgctactggtggcggtgcgggctttgccagcgcattaggagggcgggtgctctcaatggtggcagcgccacttgctatcggagccgcaggactcgcgatttaccaggcttcgtcgccggcgttccggatcaccattcctgccgcgctgcaaatcgccaagctgcggcgcgcacgttacgaccaagacttcgaggcctacacggagaaattgaaagcatgtttgtaa

SEQ ID NO: 341870 - DNA, 969 bp, Pseudomonas aeruginosa
atgtttgtaaacgttgacgcgcttgtacgctccttgcctgatatcccagatgtcctggccaaactgcatagcggagattacacgctttggggtggcgtagtccggcactcaaagggaaccgagaaggctggccagatcgtcgggcacctcctttttccgggcgactcagggcgtgtccaagagagcctaaagagcctgcaatccaccctatccagtggactggggtcgctccaaaccggcatggatcaggtgcagcagagcttgaatgtgcttcagggtctgcagtcggccaatctcgtaatgagcggcctcaacctcgcagtgacaactgcaggctttgtcatcgtttgcaaaaaactcgataaaatcagccaaaaaatagacgagcaatcaaaaacgatcgcacatacatggcagttggtgagtgaggggcacgaacggaatctactcgctgatgaggctcgctttcgaggcttgctagtcaccgcaatgcagttctgcgaagaaggtgatgttccgcagctcaggccattgattggatcgttcaatgagcagtatcagttcaccaggcttctcctggaacggcattcgcggaatgccaccagcaacgtcgtactcttcgatcagatttcattactgcaaaaccgattggtaaaccttggtttgatgatgtcccacgttcagttgaaggccggttctcacaagtacgcccgacaaagcctgacggagcttgccaccgacatcgccagcctcaacgcttcacgggtaaaggctttgtccaacgatcgcagtgttgcgtcaacgatcactcatgagcaattcgcgggtctgactcgtttcctgcaggacggaacacagatgacgccgtctctgacctatcaagctgatctgattgagcttgaagtgaagcatcctgggctgcttcagcatgcgaccgaggcgcgggaaattctgctgatagccgcgtga

SEQ ID NO: 341871 - DNA, 1395 bp, Pseudomonas aeruginosa
atgatgaagtcagcgcggacatcgattaaggattcagcgagcaaaccacgccctaagcctgcgtcgagcccgccgtgcgaatcgccagagccagccgaccccacggattcctgcgtgccgtatccattgttcccgccgattgtgctcctaaccgaccaccaaggcctggagcgtccaatcaataacgacgtccgcggacggctcagtaccctagaccccgcactggaagcattccaagcctggcgcctcggcatcgagtttctggccaagcagtgccaacggccggaattcaccccaaggcactacaagatcatgtgtccagtgctcgaaacgatgatgcattggagctggtctgttcggcacaagccgatacaggaatggcaagaaacggatgctagggagttcatgcacttcgtcatgcgcctacctatgtcatggatttcgaggactggcggaacgcgctacctgctgaagaccaagacggaattcgctgttaagccaattaatggcaattggcgtccgatagtcagaaagcagctggcggatagttccgcgtcgactttcgcactcggaactgaccagcaccgcagtatcttcctgcacggtgggagggattttttcgactacctatgcgccctgcgaattacaaccccaattaatccgttcggtgccctgaggcctagagatttcgaggttcgccaagggatagcccggccgactttcacaccggcacaactggctgatctgatgtctacagccacgtcattggcccagaacgatagtcagtggcagccatggctcctcgtagcggccgtggcgatctactctgacgttccactgcgtgcgttggggtcaacatcggcccttaaattgtggttttcaagcttcagagccgacaaaaccagctctccagaggcaggctcaagttggatttccccagcatggtttgaaagccctcagtaccctcgcctgcgctatccgctggcttctgagttcgctgcctatttccgccgttatgccaagttcaggcacagccagaattcggatctttcccctcaaagcctgctgctgccgtcgatgaatggcaatgatggctacgcgagccataccttgctcgatctattccgcaggttcacgaccgccattttgacgcgactgcaggaaagtccgctcgcggagaacgccgattggcgtggttgcgcgcgctttcagcccggtgcttcaatcacgttcctcgagctgaggaagtcggcgaaagcggctggatgggtgccgagcgcagtgcgtcttgatgagccacatcaagatgaatgtatttggccagatattggaatccgaaagcatttgccggcgtctcagtggctacgcaagcatgcaagtgggccgtcgctctga

SEQ ID NO: 341872 - DNA, 915 bp, Pseudomonas aeruginosa
atgacccagatgagcttttccgatgccgagtacgccggcaaacgcaaacagacgcggcgcgagcgctttctggcagagatggagcaagtggtgccgtgggccgggctgctggagttgatcgagccgtcctatcccaaggcaggcaatggtcgtccgccgtatccgctggaaaccatgctgcgcatccacctgctgcaaaactggttcgccctcagcgatccggcgatggacgaagcgctgtacgagatcacctcgctgcgtcagttcgccaaactgtcgctgacccagggtagcatcccggaagacacgacgatcatgaacttccgccacctgctggagcagcatggtttggcggcgggcatcctggctgtaatcaatggccatttgggcaagcgaggactgtcgctgcgccagggcaccatcgtcgatgcgactatcatccatgcacccagctcgaccaagaacaaggaaggcaaacgcgatcctgagatgcaccaaacgaagaagggcaaccagtacttcttcgggatgaaggcgcatatcggcgccgatgccgcgtccggcctggtgcacagcgtggcggggacggcggccaacgtggccgatgtctcccaggtcgaccgattgctgcacggcgaggagaacgtggtgtgtgccgatgcgggctacaccagcgtggagaaacgcccggagcatgaagggcgtgaggtcatctggcagatcgcagcacggcggagtacctaccagcgcctgagcaagcgcagtgttctatacaaggccaggcgcaagatcgagaaggtcaaagcgcaagtacgggccaaggtcgaacatccattccgggtaatcaaacgccagttcggctacaccaaggtgcgcttccggggactggccaagaaaacaccgcgcaactggtga

SEQ ID NO: 341873 - DNA, 651 bp, Pseudomonas aeruginosa
atgatacagacgctcgctgatatttatgcgctaccagatgatcatgagatcaagcaggcctttctgaataaggggattggtagcgcgtatgatgagttctgcaatagagtggaagagtttctgttgcagggtgttcagtatttggagaagaataagcctaagtataggtatttggatgaagacaccttgacttccatacttgtttttggtcttcagcagagggattttcaggcggatcatgataattattgtaatggacattgtgatctggttgtaaggtctggtaactatgaatggtatggcgaggcgaaattagataaaggcccgggttatgttatggagggttttcgccagttatgtgatcgttatgccccgggggggcctactacgaaccgaggggggcttattgtatatactggaaagcgtaataaatctaaaatattagatgtgtgggttaagcgaattgttcgcgattatgcagatgttagctctgtaaatttaaatggtttgtgtgaggaaacgttgacggctagaaccagccatttacatcctgcgactggattagattttaaagtacgtcatattccggtatctttttactataagcctacagataggagtgctaggagtgctaggagtggaggtgtttaa

SEQ ID NO: 341874 - DNA, 957 bp, Pseudomonas aeruginosa
atgattataaaaggggctgctggtaaaaatcctaaagttattgagtctttagttaatgctctttgtatgcagcaggcctgcgatttaaaggcggtttcatattttgagttgggagaagatgtttctgatttgatttattcgaagctgaagaaattttccgttccgaaaggagaactttcatcttcctacccattcgtttctccagaggacgagttacgtcgagatgatggaaagttaaagcctgtagcgaaatttgaggacgaaaatggtgcggggcttgttcttagtaggcgtcgcacttttactactaataatgagatttcgcgcgagcattttacagaaaatgttaaagatgcatttccggaggcggagaaaattattgaagttaagacttatgataggcagacatttgatgttatttatttgaacttggccgctggcgtgttggaaattcgtgctgatacgactcgtgagcacgggatgccgcagaccactagtcagatagatacgtctgtttctgatcttcgattctatactagacgtttagctgcaagctgggtgcccgggtttgacctagatgctcctcttaatttactacccttggctaagggagtttatggcgataagtctggtgcgattaagaaggttggcttctctactgagacagaatctgttaagcgtgagaccatgaaggctggcgtcgacctgcgggatgaactattccacaaaaatggtgcccaagctattgatcacaggatggcaatttttgaaattgctattcaatggcacagggctgatatagatgatgggaatagtaagccggaactttatatacctggaagtcatcgcgactatgttaagattggcgctcgtacggactatcttctggttaaggggatgcgggtgtatgatgattcaaatttcattctgaagaaaatactctcgtataagcgctga

SEQ ID NO: 341875 - DNA, 405 bp, Pseudomonas aeruginosa
atgctcgacgtgctctccttcggcaacctgctggagcgctcgctggaagtgctgctggtgaccctgctcggcgccatgctctaccagcactgggactggcgcgcgctgccgctggcgctgctgctgttctgcgtgtgccggccggcgatggtctggctgctggtcggccggcggctgatgcacccggcgcagcggcgcctgctcggctggttcggcatccgcggcatcggcagcctgtactacctcagctacgcgctgaaccaggggctgcctacggcgctcgcgcataccgccagcgacctggtgctgagcctcgtcgccctgagcatctgcgtgcacggcctgagcatccagccgctgctgatgcgccacgcgcgcagcgtcagtcgccgcgatcgggaatga

SEQ ID NO: 341876 - DNA, 858 bp, Pseudomonas aeruginosa
gtgaacagttccccacaggctcgccagcacgagcacccaccggccgttgccgcctccctggccggcgacctgcgcctcgcccggcgtttccaggccgccctggcgcgcggtcgggtgcgcctggactggcaggccgtacggcatgccgggcatccggaatgggagccgctctaccgggaaaccctgctcagggtcacggccgccagcggcgagccgccgttgccgacccaggaactgatcctggcgctggagcggctcggcctgatacgcctgctcgatcgctgcgtgctgggcacggtcctcgaccggctgaacgccgagcctaccttgcgcctggcctgcaacctgtcgcgccagagcgcggcgatggatgcctggtgggaagcggtctgccgatggctggccgcccgtccgcaggtggcacggaggctgacgctggagctgaccgagaccgccgtgggcgagagagtcgcgacccgggagttcatccgacgcctgcgcgaacatggcgtgcgcatcgcgatagacgacttcggcgcggcgcacaacaacctggacttcgttctcgatgcccgtcccgatgtgatcaagatcgattgccggtatacccgcgaagcacgtcgctcggcgaagggcgccgaagtgctgcgccatctgctggccctgtgccgcgaactggcgccctgcgtggtcctggaaggtctcgaggaggacgatgcgttcgcccggctgccgaccggggacgtctatctccagggcaacgcgatcgcgccgccgatgcgggtcgaaccgccgctgtccgtacgccggccgaagagccgggcgcggatcgaggcgctggcgagccgccaggggtga

SEQ ID NO: 341877 - DNA, 2442 bp, Pseudomonas aeruginosa
atggatgatcggatgtcagacaagccgctcggccgcttgttgctcgaaggcctcggcgagatcgcctggatcgccgtgctggtggcccttggcgtcctccttccgttgccgctggtagcgctgggttgggtgctgctgctgggcgccgagtgggccacggatcgttggcgcggcaaggtgccgtatcgcctgcaacaggcgctgttcttctgggttctgggtggcggcatcgccctgggccaggcactgccgggcttctggctgggactgggcggtggcttgctggcggtgatcggcggcgtgctgttgcagatccgcttcgagcgcggcctgcgcctggagcgccaggctccgcaagcgctggacgcacccctgccggccggaggtagcgcatggggcggcgaagcgcccgagcggacccccgagggcgaggcgatccgcctgttcgacggcggcgagatcgccatgggcggcccgctggtatgccactacctgatgcccgacggctgtttcatccccgactgcaatccttcggcacgcttttccagcgatggccgccacttcgtttcgccgataccgagccgaggcgcgtggggcctggcgatcttcgaccggcaggagcggttgctctaccgctgtgccgtggacaacttctgggagctggacagcgtcaccgagcgcgaggtgatcgggcggcacagtccgctgacgtccaacgcaccgcagcgcctcgagctgcaggcgctcaaggccggcagcgaggccgaggccttcgttgccatcggcgacctctggctgcccgagagcgaatggcagcgctggagcagggacctgcgcgcgcaaccgctaccgtccccgcttggcgggcccgcgctggaaatccgcccctggctgccggccagcctgctggccctggacgatcctttcgcgccgctgcgcgccaaccgcggcgagctgtggataaacggcgaggccagcggcctctacctgtcccgtgaagcgccgccattggcttggagcgatgacggccgggcgctggcgctgcaggctgcaggcgagccgctggggcaggatacctactggctttggcgagaggacggcggcctgcgtgcgctgggcgcgccgtggtcggcgttgcccgccgagccccatgccggcgggcccgaactgctcgggctggaggatggctggctgcgtttcggcctggacctggcgcaaccctgcctgacctacgaacgctacggcacgctgggttcgtacagccattccagcctctaccttctgcacgctcgcgatgcggacgaccggccgcgctggcgcgaggccgacatgccgcgcctggacctgttgctgcccctggatggcgcggccggcaggccgggatgcctgttgcagagcgcaccgctggccgatggcagccgggccgtctgggagtggttgcgcgacgatcaggaggcggagcgcggcgcctatgccttgcgcctgggcgactggcgcctggatggcgagtggacgctcgaccaccgcgtgtccgattgcggtcgctacctggccgtggtggccttcgccgaggcgccgaccctgccgcagcgcctggccatactcgatagccgggagcggcgcctggagtggctcgccgagccgctggccgatctacacctgcaaggtttcatcgatggccaggtgcatttgctccacctgctcggccgcaacgcctaccagccgccgggcgggccgggcgaaggcgaccccggcctgttgcgccgcttcgacgaaggcttgcccgagcccggcgcctggcacgcattcggccgcttccacgacgactggcggcattactacgagcaggcgcgggtggcgttcgatggcacggcctggcggctgtgccccacgtcgcgctggctggacgcagcgccacggccctggagcgacggcgacttcgtcttgccgtcggtgggcgcggaggacgccgcctggggcttcggtttccactacgagggcatgcaccgcgacgaggacgtgcgcgccgggttcagccgcgacggctacctgctgaccgcgtcgggcatcggcttgggcaacctggcggcgccaatgatctggtcggcggacggtcgctacctggcgctgacccggcacgtccagcgctacgaggaaagcgacctggaacgggaccagtggcgcctgctgctgctcgacgtgcaagagcggacgttgcgtcgctaccgcgacgacctcggcgagtacccgtgcttcgacagcttcgacgacgacctgtgcttccgctgcgcggggacggggcgctacgtgctggccctggactcgctgctgaaggctcccgccgagccgctgcaggcctgcgccggacgctggctgccggccgaggaactgccgcggcggcgctactgggagcgcctggcgtttccctcgcgccctcagtag

SEQ ID NO: 341878 - DNA, 1062 bp, Pseudomonas aeruginosa; identical to SEQ ID NO: 332100

SEQ ID NO: 341879 - DNA, 597 bp, Pseudomonas aeruginosa
atgaccgagtcctctgttgagtttggcgcaaaagatctgggtgggccgaaaaacattccaccgagaagtagcaccacaccaagtgacgaccttaccaacgagctcataaggcgacagcggctcagccgaaggatggcactgattaccatatgcgtattatcgctatccgcaatggcctgtcttgggtttgcaatgtatgtgggctgtcatttccttggtgtccttgaaaaggaatcaaccgccgataaagttcaacaaggttctgagatagcagccaagatagttactaacaacgacatctcccataaaggtgcaccagcgaagctttttgaaaaacagaagacagaagtcatcgaccctcaaggcttccccgtagccaacgagagtctgcatataaaaatacttgcacctttgattccagcttcattttcttcagctctcgcgatcattttattcataaccatagctcgattcgccacaaactatgaacgagccgggcgagaaaataacgaaaaggaaacaacagaagattacggcgcaatatcggtgctagtacaggaaataggaagattaattcaaactcttcgaggaaaataa

SEQ ID NO: 341880 - DNA, 2325 bp, Pseudomonas aeruginosa
atgacgactcccaagtacggcggtctgctcaccgacatcggcgcggcagcgctgatcgcagcgagcgaggccgggaagaagtggcaacccacccatatgctcatcggtgacgccggcggcgcgcccggcgagacggctgaccccatcccctcggccgctcagaccaagctgatccgccagcgctaccgcgctcaactgaaccgcctgttcgtctcagagcagagcgcaaacgtactgatcgccgagctggtcctgccgatggccatcggtggattctggatacgggagatcggcctcgaggacgccgacggaaagttcgtggcggtcgccaactgcccgcccagcttcaaggccagcgtcgagagcgggagcgcgcgcacccagaccatccgcgtgcagatcatcctatccggcatggagcacgtcgaactgatcatcgacgacggcatcgtctacgccacccaggactgggtgacggcgaaggttgccgcggacttcaagggacgcaaggtgctggccggcaacggcctggtcggcggtggcgatctgtctgcggatcgcaccatcgccttgccagcctccggcgtggccgccggcacctaccgcgcggtcaccgtcaacgccaacggtatcgtcaccgccggcagtaacccgaccacgctggccggctatggcatcaccgatgcctacaccaaggctgccaccgatggcctgctggcacagaaggcgaacaaggccaccacgctggggggttacggcatcaccgacgcactgaacgtcagcgaggctgtcaccaccccgacggccaacaagcttctccggctgaacgcggccggccaactgccgacctcgattaccggcaacgccgccacggccagccggctggcggcggctatcacgctcagcgcaaccggcgacgcaacctgggcggcgcgcttcgacggctccagtagcgtcagcggtgccctgaccctggccaataccggtgtagccgtcggcacctacacgaaggtcagagtgaacgccaaaggtcttgtcaccagcgccacatcgttgacggctgacgacattccttggctggatgccagcaagctcgccaccggtattttgccggtggctcggggcggtactggcaacgccatcggccaggcagcgactgcactcaagctggcctccccccgcacgctggcaatcgctggggatgccaccggcagcgctgcattcgacggaagttccaacgccacgctcgatatccggcttgtgaacacgggggtcaccgccggcgtttacaccaaggtgaatgtcaactcgactgggcgagtgatcgcgggcagcacgcttgtacagaacgatattcctgctctggatgcctcgaaaataacgtcagggatgttcgctgatgcccgcctgccctggtacgcacaggggctctgcaccagcgcgccgatcactgaagacccgaacacaacgaacatcccgctaattctcaccaaccacgcgaatgggccactcgcagggcagtatttctatatccagacgatgatgtacaaccagcgcaacggcaacgcggcgcagattgcggtgcgctacgctgcgaatgccgaaatgtatgtgcgctacatgtacaacgagggcaacaagcgtggggtctggtccgcctggcggcgatgcgatgtgggtggctcgtttgcaaaagaacccgatggccgcctcggcgacaatgtggacctgaactacttcgaccagtcgggctgggtttaccagactgcaaatctctatgcgcagaacggttcaaactacccgacgccgaaagccggcaggctcatcgttcatagggccaacaatgatttcgtatatcagacctaccagactcatgacggcgccatatttcatcgttgccgctatgcgggtacatggcagccgtggcgcaaagtatggactgatgccgagctcaactggaacgcccttcccggaaaaccttcgacattcccgcccagcacacatgttcactctacggcgagcagaggggtgagcggctggtacaagaacaacgatacgggggtgatattccagtgggtgaacctgtctatcggtgaccaccctgggggagttatcgatcgggtcgtgacgttccccattgccttcccgaatgcctgtctacatgtcgttccaactgttagagaaaacggccgtcctgccattcccgcctcaactgtaacggttgcagaaaaagccagaacggcgaccaactgcaccatcgtttcaagtgagtacatcgggagtgtgcagaacttcggcatcaatgttttcgcaattggctattga

SEQ ID NO: 341881 - DNA, 783 bp, Pseudomonas aeruginosa
atgcacaagcaaaccccggaatggatcgacctattccacacctgtttcggcccgaaggggctggtagccctggcctggtggctcggcgcgatgcacgccaagcgcatccgtgacctgcagggctcttaccctttcctgctcgttgacggagacacgggagtcggacaggacagcttgatcgctaccctctggcgactcaccggtcagccaaatgctcagaacgtcacgccggaaacccacaccaagaccgccctgatggttcgcttgttcaattcggacaacctgccagtcgtccttgagcccgccccccatttcgattgggacatgctcaaaccacttttcaacaactgctctttcagtgtgcacgacggggtttctgtcagtagtacctatgaaagcgcgattgccattgtcggcagggctgatggttccccagcattcgcctctcgcgtggtcaacctgaagcaggaacaggtcggcgtgaatactcagcgcagcacagcgctgcaggccttgggcacgtattgcgagaaccaatttgcagtcccacaccatcggcaagacctggtggcctacagcctgggcaagaccgggcactacatcagcgccctgcatgacgacatgggcgactccttggatgcgcggacagctttgaaccacgcacagattctcgcccttctggacgctctgaacagcctctacgacctacccgatcaggcccataccaatgctcactgcgaggtttgggacatggcatggcgtcgcgtccagcttccgttctga

SEQ ID NO: 341882 - DNA, 384 bp, Pseudomonas aeruginosa
atgcaggcccaattcgttacgcccgagcaattgctactgaagcacttggagattgccttcgctttgtgggcaaaacctcgcggctatgacctggctatgtgcgacgacggcaacagcttcctgtcgctggaaacccgtaatgcctggcttggcttcgaggcggcacacggttcggcgggctgccgtcccgtcggccaacaactctatgcacggctgaagaaatccagccctcatgcccaccagaccgacaagttgttcgctgtgcgcgtttgccgtgcgccctacgacgactacgtcgtgcacgggggacccggtggcgtgtatcgcctgagcgacgtgaacttctacgtgatcgacggcgagaagaagtaccgcctcggttga

SEQ ID NO: 341883 - DNA, 729 bp, Pseudomonas aeruginosa
atgaaaaagcacttccctgtcacacaagcaatgcgtgaggaggttgtcgacaaactcactatccaggccgtagcgcatcatgcggtcgccattgccggctacctcgaggcgctcaatacgcaattctggacagcgcattgctccaaggtcgaagcccttcccgggctcgaaaaacagcattgggcaagcctgattcaggcgggctccgtcaccgccgcttcgaactgctacccaacctataaggaccagcgcggggatgaccgcagcccagttacgaagtacttcgttgcagtggccttccgctacaagcaagaccaccacagcactttcgtcgcacgcctgctcacctctcaggcattcgaaggcgtcaagcgctttctggactccagacacgaccgcgactggaagatacgcctcgtctgtcccaacggcgcagtaccccgcctccacggcatggaggacatcaccgacttgaagctgaaaggcctcgctctgctgatctgctcagaactggagtccgtggttgaagcaggcctcgcctttcgtagtcaggccatggacgttctgcttgcctgccgcacctcccgccaggttgaagacctgttccccgaggctgcgaagctgctcccgcagcctgtgaaacaggacaaggccctggcccccaccgaactagcggccaatgtgcgcagcatgctcagcaagggcgtaccaccggtagtacaggcataa

SEQ ID NO: 341884 - DNA, 588 bp, Pseudomonas aeruginosa
atgcaagcacatccccaaggcggcggcgccaaggctagcacatccgccagtggcgaaatcgacgagaaggtgcaggcaaagctgcgcaagctgcaggctctcgctgagcgaggcgttggcggagagaaagtcaatgctcagcgcatgctggacaagctgttggcccgccatggcatcaccgtcgaagacctgagtaacgaacgccgggagacgcgctggtttccagctgccaacaggttcgacaggaacctcgcccttcagatcatgagcaagatttgcgattcctcgacggtcgacctgtgggttagcaaggctcgtcctaagcagatcggcgtggatgtgacgccagccgaagctatcgagttcgaactgcactacgacgctcttcggaaggcgcttgctgaatgcttcaaggatgcattcgtggcgttcgtgcaagccaatcgcctgttcccctcgactcgtgacggtgattacgccgagcccactgatcgcgacatcgccatcatgacgatggcatcggcgatcaccccaaccaaggttaatcagcgcctcgagcatgttggggagggcaaggccaatgactga

SEQ ID NO: 341885 - DNA, 222 bp, Pseudomonas aeruginosa
atgcgcatgctgatacttcaaagtggccgccgctgcggcccgaaaagcctgcagccattgcttcagtacgccctggccaacggttggagggttggactgaccaacggcgggcaagagcggccagttatccacaccagcagcacgccgagcgattggcgcgcagtccgcaacgcggtggcgatgctggccagggccgatcgcaaggaggtgatccttgtctga

SEQ ID NO: 341886 - DNA, 207 bp, Pseudomonas aeruginosa
ttgtctgatcaggccaaccgccagcacatgctggcatgcgaggcccggtactggctccggcgtgggtacaccacgccggagaaaatcgccgagctgaaagagaccctttacaagaagcgcggcgaggaagccgccacccggctgatcgaggaaatgcgcaggcagtggggtagccgccatgagtggcagagggggccggatgaataa

SEQ ID NO: 341887 - DNA, 1464 bp, Pseudomonas aeruginosa
atggcacaagctaggccttggtctttttacggccggcgctccgaactgtggcagatgcggcaggtactggagcggaagaggtggttcttcctccagatttctggtcgccgccgtattggtaaaaccacgctgatccagcaagcgctgcaggctgcgggcatcgataagacgctttatatccagattcctgactctgacccgacgggggtagttgcggcgtgcaatgaatacctcaataccttcggcatccaggagcgagtgcgctcgctgggtgatttagctgacctgattggcaggcttgccgagcagggatacgtcatcgcgctcgatgagtttcagtactttaatcgcaagcgcctgttcgatttttgctcattgcttcaggccgtggttgaccgccttgccaccagcgcggctcaggttcccggcggcttgatcgtactgggatccttgcatgctgaaatgaccgcgttgcttgaggatcgtgcagctccgttgttcaaccgtacaaccgattcgctagagctcggacacctggatattagctctatccttgagattcttaaggcacatgctgatgtggagccagagcgcctgctgtttctctggagcctttttgagggtgtccccaagttctatcgggacgcttatgagcagggagtgttggcagcagagcgacaagaagttttgcggcgcttgttcttttcgagctcctcccccttgcgtaatgaagcagataactggttcttgcgtgagttgcgtggccgctacgacatgcttctgcagtatctagcccagcatcccggctgtaccaatgccagcattgaagcagcgatggctgaggtatcagggccgggtgaagtgaagcaggtgggtggttatctaaagatcctgtcagagcggtatcagatgattgagcgtcggctgccgattttcgcgccagctcgtgcacgctcaggtcgttactatattcgcgacaatttccttcgagcatggctctctgctttgcagcagcccgtgtcggccgtggcttttcgtcctttggagaagctgttgacccaagccgatgagcgtctgatgcaggttgagggctatgcgctggaggacatggtcggcaagctctatgaggagcgtagccgtcgaggtcttggtgatttcccgcttacagagcgtatccagggcttttgggatcgcagtgacgtagagatcgatctggtggctatttgcggtgatgagcaacgcattcgtttcggaacctgcaagcgtaacgaaaacaagttgctgggctccatcgagccacttaagcaagccgctgagcgcttcttgaatgcgcagccgcgattccgctcctggtcggttgagtatgtagcgatagcgcctcggattagcgctgatttgaccgagcaactcaagtcacaagatgtgctctctcaagatctgatagcactgacagcagacctttag

SEQ ID NO: 341888 - DNA, 246 bp, Pseudomonas aeruginosa
atgcagcgcatcttggctgacgtcgcggtcagcgtttctgaactgaagaaaaatccatcaggcatcttggctggcgctggtggtatgcctgtcgccgtgctcaatcacaatcgcgtcatgggatacctggtgccggcagagttttatgagcaactgatggagcgcctggatgatctggaactggtcgaagtggtgaacgctcgcttgggtgaggagcctatcccggtgcgcttggatgagctataa

SEQ ID NO: 341889 - DNA, 1806 bp, Pseudomonas aeruginosa
atggataccagcaaactcaagaaatttgcccaattcgcgcgtcgcaccttgcttgatcaggtgagtggcaagttggacgtggtactggcaccgcaaagtgctgcacgccgcgagcgagcccaggtagtggctgagctggaaaaactgatcagtagctccggtcgcgagcatgtggaagagcgtgttgcctacacctggtttaaccgcttctgtgccctgcgcttcatggacgtaaaccgctacacccgcatcggtgtggtgtctccagctgaggggcagtttcaacctgagattctggctgaagccaagatggggcacattgacgaggagatggtgccgagtcagattcgtcagaagatcctggatctgctagcgggccgcgcaccaagcaacgactcgcaaggcgaagcctaccgcctgttggtagttgctgcgtgcaacgcttggcaccaatcgatgccctttctattcgagcgcatcgacgatttcactgagcttctgatgcccgacgatttgctttcgggtaattccatcctggcttacacgcgcgaggctatgacgcctgacgcctgcgaggatgtcgaggtgatcggctggctctaccagttctacatctccgagaagaaagacgcggtgttcgaggggttgaagaagaatcagaagatcactccagagaatatcccggctgccactcagctgttcaccccgcattggattgtgcgctacctggtggacaactcgctgggccgactctggctgctcaaccggcccaactcacggctggcagagcaaatggagtactacatcccaccagagaagccagagagtgatttccttaagatcaccggcccagaggacataaaagtctgcgatccggcgtgcggctccggtcacatgctcacttatgccttcgatctgctgtatgtgatgtacgaagaggagggctatgacccggctgatatcccggaaaagatcctcacccacaacctgttcggcatcgagctggacgagcgtgcaggagaactggctgcctttgcgctcaccatgaaagcccgagctcgccagcggcgcttcttcaataaaggcgtggagccgaatatcaccgtgctggagaaagtgatcttcagcagtgaagagctggacgagtacatcggctttgttggtcgtgacttgttcacctacggcctgcgcgaaacgttgcagcaattcagcgaagtcgacaacttcggctcgctaattgtgcccaaggtcgccaacgtggccgatgtgctggccacgctggagagcaaggacatgagcagcaacctgttcctggccgagacgcacaaaaaagtgctgagtgttctgcgtatggctgaggctcttagccctcgctatgccgtggtggtggccaacccaccctatatgggcggcaagggcatgaatccaaggcttggtgcatggctgaaagaaaactatgagcccgtaaagactgacctgttttcagcatttgttgtacgcaatctggagctagctctccccaaaggccagcttggcttcatgaccccatttgtctggatgttcatttccagctacgaaaaactgcgcgccattctgatcgaccggaaaacgatcacttcactcatccagcttgaatactccggctttgatggcgcgactgtgcccatttgcaccttcactcttgagaatgctcacaaacctgacttccgcggaggatatgtgcgtctctcggacttccgaggtgccgaccagcaagggcctcgggcgttggagatcattcaggcggcacgcaaggtgggcaagtga

SEQ ID NO: 341890 - DNA, 168 bp, Pseudomonas aeruginosa
atgatcactaacctggaacacaagaactttacggccttcatcgatctggccatcgacttctcgcattgcatcaacatcgtcatcagcgagaacgacgccagcacgatccagctgctcaaggcatttctgggtcagggcaggccaaaggacacgcgtgaggttgattag

SEQ ID NO: 341891 - DNA, 1245 bp, Pseudomonas aeruginosa
gtgatcagtattttcgccgaagagaaccaactgctactgacgtatcagcctgatcgcttcaacgatgcgcgttggctcgatgagaagctgcggcaagacggcgaagtgactctgcgccgcacgttcaccttcactggcgcagatctgctgaccccgtctgcatcctctggagagggggacgacagcgaacgcatctttttgctcgggctattggaggacggctactacaagatcaatagtgacgtgcttggccttaagcatgaccttctgctcgacagtgcgatgacgctggtaccgagcacattcattgcgcagcgcgatatttcggtgttccgaagaatcgatgaattgattgaagagcctatcgtcgttggcggtgacaacgaaagcgccatcccgttggcggattttgagcagcttctaaaaacctttccgaccagcaccgagctcacccattacgcccgagcccgtattgtgcgggttctcaaagactattttggaacgatctcggatgccgaaggccagctgaatcagtacctgaagcgcaagaagaagctccctgccgcgtcccgtgaaagcattgtttccaactttgagctgcaaaagtttgagtatgttcatgcagaactggagtccatgctgaagcaggtggacgcgtactctgagaaggactggcaggccaagatattgggcttgctattgtttgttttccccaagtatgttgcggtacttgagaatgttcatatcaaggacttctacactaatgcttccaaaaccaccgaccgttacatcgacctgatgctggtcgatgcgaatggcaacatcgatatcatcgaagtcaaaaaaccctttccgaatgcaatagtgtcccgcagcacataccgcgacagccacacgccgaaaaaagagttgaccggatctgtcatgcaggcggaaaaatatctattccacctgagtaaatgggggcacgcgggtgagcaggaaatctacaacaagcggaaaagtgagttgccaacttggattgagctcaagatcaccaatcccaaggcaatcatcctgctcgggcgtgataacgattttgtggggcagcagcgttttgactttgaaatcatccggcgtaaatacgccaacatgctcgacatcatgacttatgacgacctcttgcgtcgggtggggaacattattgaaatgatgagtcgtcagaagtcagcagggagtgtggcaccaaacaggaggggcgcatga

SEQ ID NO: 341892 - DNA, 174 bp, Pseudomonas aeruginosa
atgagagttaagggcggtgcgaccgaccattgcgtgatcgacgagatcgacgtacaggcgctgcgccagttccagagcagctatcgctccccggccaaaccgttcaaaccggtgctggatggatttgaaattgattttggccgcaaggtattgccggcgggagataaagaatga

SEQ ID NO: 341893 - DNA, 954 bp, Pseudomonas aeruginosa
atgggttcaatctccgtagctcaaccaggaagacgcagcaggccccacacccatcgtgtgaatcgcggcggtaactactgcggccactcgccggaacacccgcgcctggagctgctgaaggacgttgtgagccctggaaaagccctccccggcattttgaccgaactcaaagagcgggttaaacgctactacggcaaacccgccgtcctaccctcactccgcaacgcaaaccccagcctcggaggccgtcagcagcgcagcgaacgccgcgaagcgtgtcttctgatgctggcagtcatcgtttcttatacagaccttgtgtcgctacgctgcggcgtgccaacgaagcaaggttttatgtcactgaccctagactatctggtcgaatacacaggcctccacatgcgccgcgcagaacgcgccatggccgacttgaagcgtgcgaaccttatcacctgcagccagccgagaaagctgaatgaagacggcacttatcgcggcctggcgtcagtaaaggcggtgaacaagatgttattcactgcctttggccttggtaagcgcttggagagggaaactgagcgcgccaaagaccggctggccaagaagatcaagaaggcaggcggcaccatgaccagctgggcccgcaacaggctggtaatcgggagtatcagcgccccgaagcctttgaagacatcagcaggtgactaccataagccaacggtagccgagagcaccacggggcttgcagcggccttcagatcgccacaaatcccccagcggataccagcgggtgctgacgctcaaacatatgccctagcgcgcaccgaactggcgatagcgatcttgaaagcgaacccaggtaagacagcagcagaggtgaacgccgaagctgaccagatactcaggcaacgctacacagccaagacagccaaagcaggacgattcaccgcttag

SEQ ID NO: 341894 - DNA, 906 bp, Pseudomonas aeruginosa
atgccagacgctatcaccctttgccatctgtgtggactgcatcctacaggtgagcagagtcatattatcccacgcttcgtctcaacccggatcgcccaagattgcggtggtttttctttcagggaagcctcaaaccctaataaagttgtccagaacactattacttttccactattatgcgccgattgcgaagatctcttttggaagtgggaagatattttctccagagagacttttcgaccatattttgacaacgatgagcagccagttatttttgataggaatacctttgacttaatgatatcaatctgctggcgagttctaaaatacaccctgctggctcatcctccagccataaatttttcttacttaaatgacgctgaaaaaatttggcgcgactacctcctggcgaaacgcaccaatgtggcgacatttcagccatacctggtactggacagggacttctctaactccgtaattcagaactcagcagcgttgacccgtacgcatttgaggaacactatcgcacaaggtatttttggagtccctgctatagatttacctggagttttccgccacgtcgtatacgccaagctcggcccattcattctttttggcgttatgtttagctcagacgaaatcatagaccaaaatgactcatggcaagccgtcgagcaaacagtgagtgataaagtacggcaaaacccagaaaaacttccaacaagtatcatttcacatgtggatgtcacaacatccaaaatcatcaagagcatggaacttttatcagacaaacaaaaaatcaagcaaaatactctagtcaccaaaaagcttcacaaagcgcctgttagacacttagtcaatgaagacaagaggctttttccaacagacagcacgaaagataactag

SEQ ID NO: 341895 - DNA, 1086 bp, Pseudomonas aeruginosa
atgaccatggggtccaatatctacgaatggataggtggctcagtcgacgcggtgttgaacagctacgttcagctgatggcacatagtgtcattgatgacttctcgggcttgttcgttgttggcggtggcctgtttttcatgaccctgggccttctgtcggtcggtgggttcatcgagcatccccttccacatctctttaagctgatgctgaagtgggtatttataggcgcactggtactcaatgctgatacgtaccttggttgggtggtggaagcgattcgtggcctggaggctggcttggcagatgcattttcgccaaacggcgatggtgtagctgcgacatcggtatatcaggtgattgatagagctatgaccgacggcttggatatcttttccgatctcattgctcgcgcaggaaggcgtgggatgaccgagataggcatgattctttatgactggctcatcgctggaacgatgctctttgcaacattcctgatcacgctacccgctggagcgatgatcattacagctaaggtacttttagcgtttttgcttgggtgcggcccgttgttcattgcaatgctgctgttcggccagatgaccagcaagtggttcgatcaatggttcgcccaggtgatgacctatgtcattcagtgtgctgctatcacttcagtactgacgcttgggatgaaattcttttcagtaatgttggcagatgtgcagcccactgctggaaacggcccagcgactgacatgttggagatcctcgcgttgagtggggtcgtgctctacatggtttatcaggcttactctttaggaggccagcttgcaggtggtttgtcctccagtgcgatcacattgcggcagatggctcaggctgcgttaaacccagccaaggcggccttcaacacagttaatccgatgtcaacgcgccgtgacctgcagtcgggcatgatgaccactgcaagaggtttgaatcatgtgatcgcagggaacagtgtttggaatcccgcctaccggcagcatgtcatgcagaacctgggcaagaactggggtaggccgagaggagggaaggtcggcagttaa

SEQ ID NO: 341896 - DNA, 255 bp, Pseudomonas aeruginosa
atgaaagcctctcgtttcccaattgtcgttttgtttttgctcacgggctgcggggcggatgaacctgtccattctgtcgattggtacaaagcccaccgctcggacagggatatccgtatatcgaagtgcgagcgacaagccgggactctggccctcacgccgaactgcgttaatgcgaagcaagccaggaatgagcagcagcttgatcagcgcggctatcggaagcgtgagatgctgaatctggaggggcaatga

SEQ ID NO: 341897 - DNA, 765 bp, Pseudomonas aeruginosa
atgggtctgttcaagcgtctcgccttcaaaggcgtccggccatttagtttcgcgaccacgctcgcgttggtgctcggctcgcagcagggatacgcgcaaatccctgtaaccgttactacccaagtgacggattcccccatgactgttgcagagttcgcatctaacgcgactcgctgggcccaacaggttcagcagatgacatctcagattgatcagatgaagcagcagtacggcgcgctcacggggtcgcgtgggctcggtcgagtattcgatgacccgcagctgcgagattatctgcctcaagactggcaggctgtgtatgacgccgtgaagcgtggcggctattcgggactgaatggtcgtgctggttcgatctatgcggataacaaggtgttcgatgcttgcggaagcctggttcaggatcagcagcgcgatgcttgccgagcacaggcggtgaagccgtcacaggataaagcgtttgctctggaggcctatgaccaggccgaagcccgactgcgtcagattgacccgctcatggggcagatcgatcaaacgcaagatcccaaagggatcgcagagctgcaggggcgcatcgctgcagagcaagcgatgatccagaacgagcagaccaaattgcagatgttccaaatggtcgctgaggccgagggcaagattcaagagcagcggaaacgggaactgaatgcccaggtgctcgacaagagaggctacaagaatcgcgaattgctgaacctgggggacaactga

SEQ ID NO: 341898 - DNA, 1287 bp, Pseudomonas aeruginosa
atgaacggcgaaatccccctctcctcctttgccaccgcgctgatgacggcaggcgacctggatgaagggacgttgtgccctgagaagctggtaagcgacctcatgaatggccacgcgaccgatttcgtctacagcaccttgtcattgtctgaccgacgcaggcacggagtcttcttctcaggcgcctcgtgggcgaagaaaattttggcaggacatgatctcactggctggcaacgtttcgttgatccaagtgttggtgttggtgacttacttcttgaagcatgtcgctctttgccgctgaagaaaaccgctagcgaaacgattagggactgggcggaaaggctagttgccgtcgatttaagaaaatcattcttagatatagcttggatgagaattcaagctctcgcctttcaccgccacgctgctgaaaagggacaatccaataagattcttttcaaagagctcccgaatagttttctagtcggagacgcacttgaaactgatctccagctgatgcccaacgactgtgtagtcatgaacccgccttaccagcgaatccaggcacctgaaaatagctttaccggaaaaggaaaacggtcagcagcggcacttcacctagaacatattacacggatcgctccgcctggagtgggcatcttcgcattgattccggatgtactgagaagtggcagctcctacgctaaattcagaaccgaattaaccaatttagttaatgttacttctttcgagccatttggcgcctttggcactcaagctgacattgacgtagccatacttgtcgccacatcgaaactccccgaggatgtcctgatagagcccgaacaagaagtctgcagcgagcaatgcgtagaagactttttctcagtatctgtcggacctgtagtgcctcaccgaacccccaccaacggtaagctttatggctatctaactgccaaaaatgcagttgttggcgaagaaataaaagcagcatcagagtttgcgacatataattgccgagtggagcgtggtccttttgtgatagtgcgccgaacctctagcccttctgacaaaaaaagagcaagaagcacattattcgcctcgcgagaggaagtcttggtagagaatcaccttttgatcctcaggccaaaggacaaaaagatatcaacatgtcgcctactcttgaaagtattagatgataaccgtaccgacgcatggctgaatcatcgtatcagatgtcgtcacttgactgtaggtgcaattaagagcctaccctggaccgtagattga

SEQ ID NO: 341899 - DNA, 2085 bp, Pseudomonas aeruginosa
atggagtcgccaccactaggatttagatttgccccatctattcttgtgcgattaggcgaggagctggttcctaacctcgaccaagcaattattgagctcattcgtaattcttacgatgctgatgctaaagaatgcactgtcgagattaagcttgacaaagccaacggcggcaccatagttatttccgacaatggttcaggaatgacttctcagcagatacttaataactggttagtgctgggtggatcttctaaagaaagcactaagcttacgcccaaaggccgacgtactgtaggggataaagggctgggaaggctcgctgcgttgagagcaggttcctctgttgagatggtgacgagacatgaagactcgccaacagatgaagcgtattcaataactatcgaatggagcaagtacgacaacgccaaagtcgtagaggaagtcggccttcctttagaaaaaagtagtcgaaccgaaccaggaactacgacgaccttgaaaggcataaagcgtactcttgggaaaagcgaaaccgaccgactgggccgaagtatcgttctgcttactagtccgtttagtggacaaagcgacttcaaggtcaatttaatagcgccagactttcctgaactggaagcccgggtcagaaatggctatctcgacgaagcagaatatattttaagggctaacctgcgtgctgatggctcgggctatgcagaagttctcgatttcaagggtgatgtgctttacagcgctcactctgacgagtggcccacaaaaaaaccaaagaacccaacaaagtacaacgccccaccagcaacttttgagctttacagctttatctttaacaagaacgcttttgctggtcgtggttctacgattggcgaggtcaaaaattggcttaaggttattgggggcgtgcatttttaccaccgccaattcagggtgccaccatatggtgaccctggacacgactggttggatatgaacctttcgcgagcccgaagcccagaggagcgcccctcgactaatacaagtgtcggccgaatgattgtagatgaccctgagggtgtgctgaaacaaaagactgaccgattcggattcatcgaaagtgatgaattttttgaaattcgtcgcttcgcaaaagatgcactggattggctagctcgccgtcgcttgcgcgatgctgaagctcgccgggatttgcaaaagcagcagtccggcgaagagccagctaaagctcgctccgacttactggacaccatcgcccagtctctgccagcgccagagaaagaaaaggcaatcaaagcccttgatagacttgagcagaattttcagaaggaactccgtgcgacgcgggaggatttagtcctctatcgctccctagccaccgcaggcactacggcagcggtattcgcgcacgagattggaaaacctataaggacaatcgccgggggcgaaaagacgatacgccgaagggtgaagaagtactgtggcgaagaagtagtatcacagattgagccatctcttgacctcattgcgaatggttcagagcgacttactcgctttgcttccatgcaaattgactttttgaagcgtgaaaaaagacgtcatggcgctgtcaacattaacaaggtaatccaaactctccacgatctatggcgccctatactcgaacaggcaaaaattgaactcttgcttacgccatacaaaactgatgacgctctaatttttggcgctgaagctcttgtagagacgattattacaaattgcctcacaaactcggttagcgccttcgaacgctccggggcacggacaaaggaccgccagataaaaatcatggtgagcattgaaggcaacactgtggcaatcgacatcgaggacaatggtccaggcataaacatggacatcaatgaaatctggcttcctggaagaacgactcgacaagaagggaccggcttcggccttactattgtaaaagactctgttctagatttaggcggcaaatacagcgcatcaaacgtagatacatcaggcgcgcaattcaaatttgttttccctctactaacaaaccaagccaacgtatga

SEQ ID NO: 341900 - DNA, 693 bp, Pseudomonas aeruginosa
atgaataccatgagaccaattaggacggtagcggttgtagacgatgatgatgatgctgctcagaccatcattcatgccctagaggacggtcgatttaatccttatcggcaagaagctgctgatagcttggcagctctggcagagctaataattaagaattccgatgcagcagtctgcgatcatcgacttagacatggtgccttcgcagacatatcaggcgcagagctagcagctgcactagtcgagagaaagcatcctacgttgctagtgacccaatatcttgaccagtatgcagacatcgccatacgaagtcaccgaagcaatttacctgtagttcttcgccgggaggatgctgatgagcctgaagagcttcgtgccgcatttgcaagatgtaaaaatgaactgcgacgtggaaaaatcgacgaccgaaaattacaccgaaccttgctgcaagtcatggatgtttcagatgttggtggcgtaacggttattgacgcaatagtgcacggctggaacgccaaagacaccgtacgattcccactttcactggtttcacctgagcaccgaagcaaagtttcatgctctagcatattaagcgcccttacaaatgtaagtacatctgaaaaggtcgacctgtactttgaaaatgtagaactcgcgccagaaccggagtgggatgatggcttgcagtga

SEQ ID NO: 341901 - DNA, 1038 bp, Pseudomonas aeruginosa
atggcttgcagtgagctgataatactcgacgttggacacggaaactgtaccattatcaagcacggcgacgaagcaattatcatcgacgctccaggtcgccccatcgttgcaaaaattttagatgaactaaagatacaatcggtccacgcgcttctcatatcacatgcagatagcgatcatctatcaggtgccattcctatcttaatgaatcctgatcgaccagtcagacaagtttatgtcaacccagacttaagaaaaaccaagtcttggtttcaatttagaattgcagcaggcgatgctaggaagagtcagggcacagcgatttactcatcattgcatgttgatcagccacagagcctgacattagccaatacaactcttcgagttctccacccaacaccggaaatgtgtttagcgaccaatgaaggcgagcatactgatggcgtcaagctcgacgcaaacagtatgtctgccgttgtgttaattgaacacaacggagagcaggtctgtctgctagctgcggactccggtcgtcatagcctggatataatgcttagcgaaaatagagacttgcgtgcccaggtattagtattcccacatcatggagggcatacgggtggggccgctgacaatagatccttcgcgaaagatcttgtttctgctgtgcaacccaagctcgtgctgttttctttgggcagaggttctcatggtactcctagaccagaaattgttgctggcactcgggaggcaatttcggctcaacaaccttacatagcgtgcactcagctttcgaaaaactgcgcagatgcactgcccagccaatctgatcgaaagctggtgaagcactcagaaggtttctcaaaaaaccattgctgtgcgggaaccatcgttcttcctctgagtgatgatggtgtcgaaatcatgatgggggaacttagtgagcaccatggaaaattcgtgacatccgagctacccaaagcactgtgcagacgccagcttacgcaagcggtaccgcacctaattgcggcaaccaattaa

SEQ ID NO: 341902 - DNA, 279 bp, Pseudomonas aeruginosa
atgagcaacccgcgttaccccgaagaattcaaaatccaagcagtcaatcaagtgaccgaaaagaagctgcctgtcgctgatgtagcggcccgtctcggcgtgtcgacgcatagcctctatgcctggataaagcgctacagcaaacctcaagaagaacggcagcaggacgatgatcagcacgctgaactgcgtcgtctgcgagccgaactaaagcgcgtcactgaagagcgagatatcttaaaaaaggccgccgcgtactttgccaaggagtgcggttga

SEQ ID NO: 341903 - DNA, 204 bp, Pseudomonas aeruginosa
atgactgacggatatgactgctaccagaacgcgctagctgagcgcatcaacggaatcctcaaaacagagctgctgctgagtagccctgaaaatctggatcaggcaaggaagatggttgctgaagccgtgcagatctacaacacagagcggcctcacatggccctgaaaaacaaaacgcccgatgcggtgcatcgggcgttttga

SEQ ID NO: 341904 - DNA, 231 bp, Pseudomonas aeruginosa
atgaacgaccgcacactactcgaactggcggcgcgggcggcgggctatcagttctcatactcgtaccactccctcgccatccctaccgtcaaaaagcagcacatcccaggattagaagccgcttacaaagtagctcgcaatgctagtgatagagacttcattggattcctcatcacagtcgcgaggcgtgatcttcagaaaacccagccgggcgccactagctctccctga

SEQ ID NO: 341905 - DNA, 318 bp, Pseudomonas aeruginosa
gtgcctgacatgagagaagagtttgaagcgtgggcttccagtcatttcgtagacgtaggaagcggaaatccgctcaagaaaggacctaacggtaactatggcttctatgtcgtggcaacagcatggaaagcctggcaagccagccgcgcggctctgagggtggagttgccgccgacgatcaccgccgaagaggttgttgagcatttcaacatcgacgaggaaggcatcgacatggccgctggtattgcgcacatggtcaacggcgccatctggtcctgcgctgccttcatcaagcaagccggaatcgaggtgaagtga

SEQ ID NO: 341906 - DNA, 216 bp, Pseudomonas aeruginosa
atgcctaagttcgaactgatccgcatggaaggcctgcgcatctacggtcgccagattgaggcccgtacctggcgcgaagccgagcagcaatgccgcgacggcgagatcgtaaacggcgaactgatcggtgtgtacgactgcgatccggtaaccgaggccgtctgcactgcgcgcaatgacgtgatgattgagcggatgggggtgtgctgtggctga

SEQ ID NO: 341907 - DNA, 687 bp, Pseudomonas aeruginosa
atgagcgtcatcaagcgcttcgagcacaatcaggccggccgagactttgcagtcggtgacatccacggccatttcacacttttgcagaaggctctcgatgctgcgtgcttcgatccggccgttgaccgcctattcagcgtcggcgacctgattgaccgtggccctgagtgcgaggacgttgaggcgtggctggccaagccatggttccacccagtgcgcggcaatcacgatgactacgtgtgccggtacgacacctgcgagatcggaaactggatgcgcaatggaggttcgtggttcgtcggcctcccggaagtccagcagcagtgcctggccatatccttccgcgaactcccgatcggtatcgagatcgacacccagaacggccttgtcggactggtccacgctgactgcgtcttcgactcgtgggatgagctaaaacgcgaactcgactgtgcgagcaaccagcgccgcaagttggtgatgaatacctgcatgtggtcgcgcactcgcatcgagcagcacgacgaacgccccgtgcacggtctccgtgccctggtggtgggtcataacccgctgcgccgcccggttgtgctcggcaacgtctaccacatcgacacgatgggatggcggccacaagacggcgggtacttcacgctgcttaacctcgaaactctggaggccgcatga

SEQ ID NO: 341908 - DNA, 228 bp, Pseudomonas aeruginosa
atgaagatcacaaacgtcgagtggaacgaaggggcgccggacgagattctcccgggaatgcttttgctatgggaggacaccgacggatcaatttatctcgtcgggcatgagcatgacatctgcgatgaagagagtcagttcatcgagcgctgggcctggctgatccagccaaacgaactcgcctggctcgaagacatggcatctcggaaaacgaggacgcaggaatga

SEQ ID NO: 341909 - DNA, 192 bp, Pseudomonas aeruginosa
atgagcaagacagcgcaacgcaagcgtcaggcctatgcggagggcctgcgtgatgcgaagagtggcttcggattccgctgggagcgccatccattcatggagcactacaaggaaggcttcgctgatggccgtcgctggtccgctgaccagcagaagactgttctcgagaaattccgtgaggtgttcgcatga

SEQ ID NO: 341910 - DNA, 279 bp, Pseudomonas aeruginosa
atgcgagcagacgagtacctatcgaaagcacaagctctcatggttgagcgtggaaagcagtacgacaagcccgagggggaacgatccatgggtaaggccgtgtcagccttcaacgcgattactggtcactcgattagggaaagtgaaggctggcttcttctccaaatcctgaaggacgtgcggcagtggcaaaacccttcattccatcccgatagcgcagaggattgcgttgcctatgcagcattgaaagccgaatcactcgagcaggagaacgcctga

SEQ ID NO: 341911 - DNA, 1470 bp, Pseudomonas aeruginosa
gtgcaaacacagaggattgacccggagaccttgctcgccgaggacatggggaggttcttctatgacccgcttgggtgggtgctatacgcattcgaatgggggaagggtgagctagagggtttcgatgggcctgatgagtggcagcgcgagttcctcatcgactggggcgccgcgattcgctcaaacaacttcgatggaatgaagcctgtcgaggcatatagatcggcaaccagttctgggcacggtattgggaagtccgcgctgtcatcttggatcatcctctacatcatgagcaccaggccgcagtccaagggcgtggtcacagcaaacactggcgaacagttgcgcaccaagacctggggcgagctaggcaagtggaagaagcgctgcataactggccactggtttgagtacaacaacggcaaagggaacatgaacatctatcacccggctcacagcgaaagctggagggtagatggacagacctgccgggaagagaatagcgagtcatttgctggtctgcatgctgcaacctcatcgccctggtatctgttcgacgaagcatctgctgttccggacaagatatgggaggttgcagaaggcggcctaactgacggtgagccattctggttcgtgttcgggaaccccacaaggaacacaggtcgattccgggagtgctggcgtaagttccgccatcgctggaagaccaggcagatcgatagtcgatcggccaagatgaccaacaaagacctaatcaagcaatgggccgcggactacggcgaagactccgacttcttcaaggtacgtgttcgcggtctgttcccctcgtcctctgatctgcaattcatcggcactggcctggtcgatgccgcaatggcacgcgtcgtgactgaggcgatggtaagtcacgcgccagttgttatcggcgttgacccgtcgtggtcaggcgatgatgaattcgcgatctatatgcggcaggggctgcatagcaagctgatcgccacttaccagaagtctgatgacgacgttctgatggctcagcgtattgcccaactggaggaccagtacaaggccgacgcggtattcgtcgactttggctatggcacaggcattgtcagcgcggctcgagcaatggggcgcaactggacgcttgtgcagttcgggggcgcctcaagcgatccggcaatgctgaacaagcgtggcgagatctggaacgcgatgaaggaatggctcaaggctggcggcgaactgaacgaccagcagaccgcagacgagatatcggcgcctgagtaccgcgtcaagctcgacggcaagatcgtcctggaggacaaggccgagttgaagaagcgtgcaggtatcagcccaaaccgcgcggatgcgctggctctgacgttctccttccctgtggtcaagaaatctttctatgccggtaacggcgggcaccaatccacgtacgacccatttagctga

SEQ ID NO: 341912 - DNA, 993 bp, Pseudomonas aeruginosa
atggctatcattgccaatactgcgctgaccctggccgactgggcgaagcgtcaagatccggacagcaagccggctcgcatcgtcgaaatgctgaaccaaaccaacgaagttctcactgatatgctgtggctggagggtaacctcccaactggtcaccgcaccacgatccgcaccggcctgccttccgggacctggcgcgccctaaactcgggtattccgcgtggcaaatccactaccgctcaggttgatgaaacctgcgcgctcctggaaaacctcggtgtcgtggacgaaaagctggcagagctgaacggtaatactgctgcattccgactgtccgagaactcggctttcatcgaaggcatgaaccaggacatggccaccggcatcttttacagcaacagcgccctagagccggcaaagttccttggccttgctccgcgatatagcgacagcactgctaagaacggacaaaacatcatcaagatgggcggcgccggctcggataacacttccatctggttggttgtgtggggcgaccaaactgtacatggcatctatccgaaaggatcaaaggccggccttgaccacaacgacatgggtatcgagctggtagacgatggcaccggcaaggtgttccgtgcgttccgcgatcactacaaatgggaatgcggcgttgccttgcgtgactggcgttatgcggttcgcatttgcaacatcgacgtttcggatgttgtggcggataccgatggaacctcgatcaagcttaccgaggctatgattcgcgcccttcaccgcatcccgaacctgcgtatgggccgtgcggcgttctacatgaaccgcactatccgcgaatgcatggacatccaggcgatgaacaagaagaacgtccaactctcgattcgcgagtatgacggcgaatggattaccagtctgcgtggcgttcccttccgtaccgtcgacgctctgctcaacactgaggcaccggtcgtttga

SEQ ID NO: 341913 - DNA, 243 bp, Pseudomonas aeruginosa
atgcaagtggttgctaaagagcgcggcttctatggacgcatcagggagccgggcgaagaaccattcgagatcaaaagcaaggaagagcttggatcctggatggagtgcgttggtgttctttctgtaaaacaccgcggcgctggaaagtacattgttgtaaacgcgagtggtgatcgggtcggggatttctccggcaccaaggaagaggctgaggctgaagcctctcgcctggctgcatcctga

SEQ ID NO: 341914 - DNA, 1656 bp, Pseudomonas aeruginosa
atgaacggaatagcaaataaaatagttttttctctgttattaatctcaccattgcattctattgcagagccatcaaatatcacgggatcatgcccgacaattggccctgctccaagaaccccgcacgcaagtgcataccaatatgcaacatctgggaaattctcaatcagcaaagaaggtctagctctgtttgactatggagaaagctatggtggactagggaaatgggccaacccatatttcaactccaactacgcaaacgcactgtatagagactggattaataccggatgcacagacatcgatttaaagaagagatttctaactgttgctgactggtacgtagattctgccgagatacgacaaggaatggcagtatggccgtacccatttcacaacgaccattttgatttagacccaggatggatatccggaataggtcaggctcgaatcgcaggcgttctatacagagcatatgcagtcagtaaaaaggctgaatacaaactaattgcagatgaggcaatggaagcttatcacagagaaatcaaggaaggaggggttgtaacttatgaacatggagtgacatggatagaagaagccccggatcataatggccgaagttacaagatactaaatggccacataacgggactaacaggaataatcgacatatatgaaattacgcgaaatcctgaatggaagtcacttattgaaaagtccgtagcagccgtaaagagagatatatctaagtttgacgacggattcatatctctgtactcgatggacatgcctacagataagcgcagaatggcagagcgaggcggttacaactctcttcatgtcgagcaaatgctatggttatacgagcactttaacgatccgactttcctaaaatgggcaatgcatttccagtcatacgaaaaaaattcagataaatacagtgcatcttactctgtaaatgcgaaaacaaatggacctgaaagagcaaaggcgcttatgggcggttcggcatggacggcaaatgagttcccagcaacgctaactatagaaccagagcatccagaaatctacaaaggtattgcttttgattctcttgacttggagcggaggccttatgatttcacagtaagggctaagtttaaagggaagactgcatctaccgtaaagataaagaataatgaaaaactatggggtaacattttttttaaatcgccagtaaaggcggacaaaatagaaatagaaatagaaaaaggccacagaattgttgcgcttgcatctgttatgccaataaagaaagagtttggtctttccacggtagttaatcagtgcaattacagacctgtccctatctccggcagcagagaaattacatacacattctatgatgcattggacaacaatgaaagcacttcaatgcctgtacattgtgaaggatggatgattatcccttcaagcggaaagaaagaaatagtaattaaggcgagtggctatactggatcaaaattcaagataagtcaaagtgacgacttggcatcatggagtgatataattgttaaaatcgcagacacagaaagctctgcaagaataaactcaaagtttaccaaagtagaattcgacagactcacaaaagaaataaaagaaattacattccgatga

SEQ ID NO: 341915 - DNA, 144 bp, Pseudomonas aeruginosa
atgcccatcaccgagcatcaactgctgccgcaggatgagtggcgggcggcagggggatggcgtagcggcttacgaggcggagcgctgatcctgtaccagtttttgtaccaattgatgcgaattctggagaatcatggcgcctga

SEQ ID NO: 341916 - DNA, 234 bp, Pseudomonas aeruginosa
atgagcgaccagcccagcctgtcccggggaggcatgagccccgaaggcaggaccaaccccgtcggcaccctggaacccaggctcgatccgcaggacaagaaggtgctgtgctcggcggtctgccattgcagcagcacgcccaacctcagccaggatggcaaaagcctcaagcaggcgtgcgtggcacagcggctgggagagttggacgaagttctccagggacgcagcccctaa

SEQ ID NO: 341917 - DNA, 1119 bp, Pseudomonas aeruginosa
atgagcaacgaagcctataaggaatggcctttctcattaagagaggttcatttgatcggtgggattcgcgcatacaatcatggcaataataaagttgagatacatcctacaacaacaaacgcaaaaaatgcgattattaaaatcaataaatatgaaaacttgtattctgaccttgaaaaattcggactaccggtagtaggctgcgatttttttacaacgagagatgaagctgacggaatacatcccccacaatggaggacaaactgccaagcccgtaaccgatggctagcaactgagcagggatttagctggtcgtttatagcaaactcagcctttaaagataaaaacgcattagtttgtgatatagcgcttaggatttcgcaccaaattaaaacatgtgaatggcgaataagacagttatctgagtgctatttagatcagctaagcagtagaattaaaagtgttgatagcttcacgaatggcgccagattcaagaacgggtacacatctttttgctatcttgcactacaatcattcctaatagatggatgcatacttcgtgactatctttctgagttctactgggtgtgcgcacagaataaagagtcaaccgaaaatgaaaaaataacaaccctgagtgggcttctgaaattttggaaaaaatctcctccaaatactcctgccggacttgagttgaagaatgcaagcaagaaggggcagtggctttatgaaatgggggcatatagagacttaatagtccataccgccccgcttgccagtgcaggaaaaacactgctcgcagttaatcgcctaatttatgtcaacaaagggcgtgaggccttgccagcaataaagctacccattccaaactcgccatctcaattgacatgcgaaagaacaaaagggaaatattttcaggacacaaatctagatttcgctagatttaagaactttattgaagacacagatagctgcagagactcgttagagtacgcgtgtttttgcatgaacaaactaagtgagctttcactatctatagctaacatctcaccactcgtccctcagattccgattatcactcctataccaggtacgctgaaagtcatagaagaagactaa

SEQ ID NO: 341918 - DNA, 216 bp, Pseudomonas aeruginosa
atggaagtggaagaaatcaaggctcaagaccttcgcgcggcgcccccggtgttgccgtggcgggacttcgcgaactggattggcatgggggaagaccacgaaaccgtccgtggatggattcgcaagggctatctccccgcgcacaagatcggcaagcacgtcatggtcaatgttgcgcttttcgtccaccagctgatggaaagggaggagttctga

SEQ ID NO: 341919 - DNA, 1503 bp, Pseudomonas aeruginosa
atggaagcgccagctacagcagatatttctctcaaactaaatgacaagactctttttggaaacgatgcaggtgaagacgagaacatagaagtactcacatcctacttcgtaaaccaacccgcattcactgatttcttggatacagaaactgcactctgtgtcgccagagcgcgtaaaggcatggggaaatctgcactcctcagcaaatttgctcatgatttggaacagcttgacagcaagcctttagtggtgcagatagttccctcctcactctcagctctcataacaccaccagagactggcgctccatcagaattcgaaaactactggaaacaagcaatatgtcaatccattaatatggaaatctccaagacaataggctttgcttggaaagatgaccatatttccttggtagagaatgctgagttaaaccagttcagaggacgcaatataatcggcgcacttacatccagactacttggaaaaataagtatatcggatgtagcggaaattcaaaatacaaagcccagcatctcaaactacgagcaacttctaaaacgcatacaagaagaagaacatagcaatagaagagtttggtttcttattgatgacatagacactaaattcacagacacacctcaacagcaagcttatgtttcttctttcttctctgcctgccgagccctaataagagatattgacggcctttcaataagagcaacagtgcgcacagacgtatggaccagcctaagaacagcggaagacctagacaagttcgagcaatatgtttgcgacattgtatggaccaaaaaacaacaaaaagatattttagtaaaaagaatttacgcatatgtaatgagaaagcatagaacctcatatgttgctaaaaactggaatatttccgatcacgatgaagattatatacaattagcatttaagagaagattaaaatggggaaacagtggagtacctgcagtccacgttcttcagattctatctgctggtcgaccaaggtggatggctcaactttgccgactcgctggcaataaagccgtagagaacagaagtaccagaataggcgttcaagaaatcaatgaagttatgattgtcttcggaaccagacgactttcggatctatacaaagaacacaaccatcaattctccgaccttcgaaagctcatagaagcattcagcaatggagcacgaagatataccacagacgaactcttcaaaaaaatcataaactcttatataaaactaaaaagcgcaaaaagcattccggacattgatggcgcaccatttagagacgcttggcaagtagcacacttcctattcaaatgcggctttatagtcggccataatcaatctcaaacatcaattgacgtgccagagtttataagctatgaacttagacctgacctactacaagcagcaacaaacttagacgacgggctaaattgggaaatacagccctcttacagacgcgccttaagaatccagtaa

SEQ ID NO: 341920 - DNA, 246 bp, Pseudomonas aeruginosa
gtgttgcgacacgttttcagcatttccggattgggtcgcgacacgttccagttcgaacaattctgcgtcggcctgtttcatatcatcctcaaggttcccaccaacgaactcggcctgaccgagtcctatcgtgcagatatccttgaggtaactgctgcactgctcatctctacggaccagtgcaaggatggcgcgcagccccttgacggtctcaacagcggcttcgaggccatccagcaggtctga

SEQ ID NO: 341921 - DNA, 441 bp, Pseudomonas aeruginosa
atggagaatccacccatgctgaccaccgagcaaatctctcagcacatacacgcaaagatcgacggctacaaaggactcagcctactggaaaggttcgcgatgtttatggggaaggcccaaattcttgaattcgggctgaaaaacctgcttggccggcgcttcaatgtccctacagagaaaatggaaaaatggacattggggatgaccaagaacgaactcaaggtaaaaggcattcgtccagacttcatcgccttactcgataatttcgtcggccagcgcaactacatcgcgcatgaatttcttctcgaccactccataacgaactcctttgttggcttaagtggacgcaaactggaagggattctttttcgagccacctacgagttagagaaaatcattctgcttcatgactggtgcgaagagcacaacggctggacctga

SEQ ID NO: 341922 - DNA, 1137 bp, Pseudomonas aeruginosa; identical to SEQ ID NO: 330604

SEQ ID NO: 341923 - DNA, 1074 bp, Pseudomonas aeruginosa
atgacgacttcgagaatcggaaagactataggatctcgatatttaatcgaggacttaatcggcgaaggaggcatgcaatatgtttaccgagcccatgacactctacttagcagaaaagtcgcattaaagacgcccaaaaacaattcagccacgaagcgctttcggcgtagtgccattgtagcagccaaagtcaatcatcataacgtagccaaaacactagactacataaaagaggatgataatcgctaccttatagaggaattaattgaaggcacagatttacaaaatgcactaatgaaaaaaacaaaatttctagatccgtatcttgcagcttgtgtatttaatcagttagccaaggggctcgcagctgcacatcatgccggagtagttcatcgcgacctgaaaccaacaaacgttatgatctctggcggatattcactaaatgagttaaaaattactgacttcggtattgcaaaaatggctgatgaggaactttccgatgcagcgaaggggggctcatcaacattaacagcatcgcagacggccgtgggcgccctaccttatatggcaccagaagcaattgaagttccagataaggtaggcccacccgctgacatttggtctatcggagctatgttctaccatttattaacaggtgaattccctttcagcaatggtttaaaagccgtccaaaatatacttacaaacagtataacaccccctccagcttttctcacagaaaacccacagtttcgaactctcgccagcgaactcctagacatatccttatcttgtctcaagaaaaatccgacagagcgccccagtgcagatgacttggtaaaaaaatgtgaacttttatgttatgcaaaaaacccaagatatattggaaatatcaaaaacattttctataatgcgtatggattcattgcccgccctttaaatgatgacgtcttctttaaccaatctagtgtgtatggccctcgaaacgctaaaattggtgataaggtttgcttttctatgttcataggtggtggtgcatggagagcacatcctgttatgatccttgatgagtag

SEQ ID NO: 341924 - DNA, 1050 bp, Pseudomonas aeruginosa
atgagcacaataccagaccgatatgaatttgataaaaaaattgatggcggcatgggtacaatcttcgtctgcaatgatagaattttagaaagaaaagtagctataaaatttattcaagctcatgaagagaatcgacgcatccttgatgaactcaatgctttaatgaaggtacgatccaagcacgtagtccaggtttacgacgtcatagaagacaacgaacgcgggcttggcatcgtacaagaatatatctacggcaatgacttatcaaattactcccccccgctaaatacactcgatttttacttaaaaatctggcaaatcgcctcaggaatatcagacatacatgctgtaaacataattcatagagatatcaaaccaaacaacatgatgctagaccatgaaagcatcattaaaatatttgactttggcttagcaagacacacacaagaaaatgcatccacaattggatttgtcggcacccatggattctcagctccagagctgtataccgacgcacctcatttcaccactgctattgatgtttatgcattcggcgttaccgcactatttttagcaaatggcaccttaccttcagaagtactctatgcttatggcaagccagtacctaataatctttttacctccctgccaatagcaaatgaaattgcaagcctgcttcagagttcgttagtagcactaccagaagaccgccccccaatatggtcaatcaaagagacacttgagaagcacatattagaaaacagacatcaagcgctaataacacacaaaggaaatccaacctacttaaacaaagatcggaaaaaaataacactttcggtagatagagttggagttgtcgacgtccagtataacggcttagatttcattataaccagggcagagggagaagtcttcattaataacgctcccattttagttaattcaaaaatacccactagttgcgtcttggcaatcggcaattcacaaagaagtaatcaggagcgctcctttattacgttcgacctatctcatccggagataaacttatga

SEQ ID NO: 341925 - DNA, 1098 bp, Pseudomonas aeruginosa
atgaatgtgaacttagagaacgatattacatttcagcgcattcaagcatggatgctacgaagtaattactctggcggtataagaagagtcgctggaatgaatgccgcccttgcaactgacgtgggcatcgtacgcactcaaaaccaagaccgtgtagtaatggcacgtgggaaggactttaacggggacacatatcttcttgctatactgtgcgatggaatgggcgggatgcaagacggcgaatactgcgcagcaaccacaattgcatcattcatatcctcattcattaaaactagccgcaaagtaggcatggcaaatgactggctgatagagtctgccatggcagccaaccatgcactccataaaaaatactccggcactggtggcgcgactttatcttcagtccttctcaaacaagacggaagagcctattggataaatgtaggcgacagcagaatatatcagacaacaccgactgaagtaactcaaattactcgcgacgacaccatagctggccagcttggaaaaaatgaagcgccgtcatctagaacttctgaacttttacaatacattggcattggcgaagttctagagccccatgtatccagactgtcattagaaggatcttcatacatagttctaaccagcgatggaattcattacctgcaaccagaaaccttcaacagcctgataacaaaatccaaagatcctggaacttgcgcaagaagacttatagaagtagcaaagtggtgcagcggccatgacaactgctccactgcaattattgaagctagcacagcagagagtataggaaatattagaacccttcctagtcaattcgacatatgggaccctttcggcgaacttcagctatttgatgagcccatagagccaaatgaaacatctataaaatcggaaaaaaatcgccaaagaagagtcataacccccaaagcaagcgagcatagaaaaaaaatcagagctaccggaaagactaaaaaaacagaaaaaacaaaaaaagaatctagcgaaattataccggaattcaagtctgagaaagtcccacagctgaaaatttctttccccatcaaggatgactag

SEQ ID NO: 341926 - DNA, 561 bp, Pseudomonas aeruginosa
atgagcgacctcttctatctccaggacagccgcagcaacgtcgggagccgagcaacgttctggcgcgccggcggcggctacaccaccaacctcgacgaagccgagacgttcaccctcgcccgggccgtacggcaatacgagtgccgcgaaaccgatctgccctggccggtcgactacgtgcgcgcccgggctgaacttggtgtcgatcaccaggacctggacctgtcccggacgcaggcactcgccggcgcgccggcggacgaccgcatctacgtcgcctacgacagggactgggacggcaactgtcttgtctgggtacccgaggccgccggccggacatccaacctgaccgccgcacggacctggccgctcgaccacgccggcatactcaccgcgcgcgggctagcgccctggccgaagtcctacatcgaccagcatgccagacctgttgctgtggcggcctccctcaaccacaagcaggccctccggctgttcggcctgaagctacccaagccggagcaccagggccggctggcactggcgaaggaaggtgaagcatga

SEQ ID NO: 341927 - DNA, 291 bp, Pseudomonas aeruginosa; identical to SEQ ID NO: 336196

SEQ ID NO: 341928 - DNA, 753 bp, Pseudomonas aeruginosa
atgagcggtggtaatgccgtgacacccactagtaccagcgcgcaggcgcgagtaatgctctatcaacctagccagcgaccgcgcttgcgcgaaggcgactggatggaaacctcttttggtcgctgtcgcgtgaccggcaggttaggtcagcggcacgccgatattgtcgaggcggttttgtactgcgccgaacgtcggcgcgatgtttctgatggtggtgtcgagctgctggtagacccggcccgcgtgcgaaaaacgctttccgatagccggtacagctttactcagatcgaaaagctgttgaccgagctaagagccgcgacgatcacaatcgagatgccccagttcgaccgctcaatcatcggcggcttgattgaccacgttatcccttctcccatgacacgccctgatcctctgacgggcggggagcggaatttgtggaaggtacgccttggagtcgcgcttgtgacgctgctcgaacatgacttgagtttgtactatgacccggcccccattgctcgcttgcagcatggaataagccaagccgtcgcaaggcacgtcttgagccacaaaatagagccgacaggaggctggttcctcgataccgtcattgtggcagtagccgggcaagcatcaagccaagccatgcgcgatgcgcggcgaaggctgaagggcgaggcggaagaattacggcaaattgggcttatgctggacggcgatcgcatcaagaaaaacggtgtgtgcagcccctaa

SEQ ID NO: 341929 - DNA, 516 bp, Pseudomonas aeruginosa
atgtcctattccgatcccaggcatcgccacggtcagcgcctgacccaatggctcgcagcgatccggcagcacgcagcatggctgtatgccgcggatgagcagtatctgtacctggtgggagaggcaaatgagctctaccagtgcggcgtcgtggggttgcaggacaggcacgacatggtcaccgacgccttgggcatgtactcctgggcgatcgagcacagcatcacgcgcgagacgcactactgctcggactgctgctacgacgtgatcgacggcggccatgctggcgggacggtgaacagcgaaggcatctaccacggacctgcacccgagcgacagcgtctgggctacatcagccgggatccgctcgacgggataacatacctccgcttgggacaggcgcttgagcgcgccggcgttgtgcgtggtctggagatcgaactcgacgccggcggcacgctgcaactcgccgagcagatacccgatgacttccggccatggcgttggcccacctga

SEQ ID NO: 341930 - DNA, 369 bp, Pseudomonas aeruginosa
gtgatctcggcccgcattgtctcgatcatgctggcctgcctgctgctggttggcctcggtgccgctggcggtgtccagctcggcgcgcagcattaccggccgcagctcgatgccgcgcggtctgatctggttgcctgccatgccgcccgaggagagttggagtccgcagtggtggcgcagggcaggcagattgccgcgctgcgtcaggctggtgagcagcgcgccagagaggcagcccaggcgctggagcagggacgacagcaggctgccgagcactatgcagcagcccatcgcctgctgagtcagcgaagcgccggtgaggagtgtgcggccgccgaggcggtgatcgatcaggagttgggtctatga

SEQ ID NO: 341931 - DNA, 2739 bp, Pseudomonas aeruginosa
atgaggcctggcgaagatagtctacgtagcgagtgggctcgctggtatgtcgaacaaggcatcgcgctggtagtcatcgaaccggggaacaagatccccaagggcaaggcctggcagaggccaggtggttactacaccgatgcggcccaggctgaggctttctggtccaagcatccgaagcacaacatgggggccgtactcggccccagtcgtgtttgctcgctggacgtcgacgacgtcccatccactcgccaggtgctgtgggactgcctcgggttggatctggatgcgttgccggtagcctaccccaccgtggtagggaatccggagcgcttccgaattctgttccaggtgccggatggggttgagctgagtcggcactcactgagctggcccaacgaaaaggacccggacggctccaagttcaagctcgcgcaggcggcgatcctcgcagcgaaagagaagggggatgccgagcagcagacaaagatgcaggtgctggccgacagcctgaagcgcttcaccgtgttcgagctgcgcgcaggcctagtgcaggacgtcctgccaccctccatccatcctggcaccgggcgaccgtacacctggcgcaacccgccaaagggtgaggggctaccggtattgccggacaacctgctgaacatctggaagaactgggacatcttcaagcgtgacgccgaggcggcatgcccttgggcgccggtgcagaaaccgaagaaggttaccaaaccgaagcggctggctccggctggtagcgctgggtcggttatcgatgccttcaaccgggcacacgatgtcgaggcattgctcgaggcgcatggctacctcaagcgtgggaagaagtggctgtgtccgcagagcagcaccggcttgccgggcgtcacggtcagcgaggggcgggtgtattcacaccatagctcagaccctctcgccaacggccaccagaacgacgcgttcgacgtgttctgcatcctcgaccacaacggcaaccagggcgaggcggtcaaggccgcggcgcgcctactgggcatcgagcgcgagtcctgggcacccagtgttcgcgaggcgctggagcagttcgaccagatgcttagcggcgatgagccgccccccagcccggccaagcagcttccccgctccccatcggtcgaagacgtggatgccgacggcgacgccgaaggtgacaggggggcgggggagggcctgactctggccaaggcgctgcggcgctatgccctggtcgaggggacaacccacgtgtgggacatcgacaaggcgatgaagatgaagaagaccgccttcgtcgccctggtgggccagaaggttttcaaggagtggtccgaggttaccgacgagaagaagaaaaagcgcatcagcgaagagcaggtcaaggagatcgagcgtgcccggtccatggctggaaaggccgtcgggccgatgagcatgcctccagcggtgcgctacgtctacatcgatggcaccaaggacgtgtgggacctggcgaagaaacggcgtgtgcccgagggcgcagtgaagatggccctgggcgatgcctactcgctctggctcaacagcccggagcgccgggtggtagacgttgccgacattgtctttgacccgacgatgacgtgcgacaccaagacatgcatcaacacgttcgagggcctgccgctggagcccaagcgtgatgatgcggcgtgcgagaacctccgctggctgatcgcctttctgtgcaaccacgctgaggactcgatgcagtggctggtgcgctggcttgcgtatccgctgcagcacactggcgcgaagatggacacggcggtgctgatgcactcgacgatggagggttcaggcaagagcctcttgttctccgtcgtgatgggacgcctgtatggtcagtattccgccacggttgggcagacccagcttgaggggaacttcaatgcctggcagagcggcaagttgtgggcggtgttcgaggaagtggtcagccgggaccagcgctacaaccaggtcggcaagatcaagcagttgatcaccggtcagaccgtgcgcatcgagagcaagttcgtgaacggctgggaagaagccagccacatgaacgctgtgttcctttccaacgaaatcatgccctggccaatcagcgagggtgatcggcggttcttggtcatgtggcccgaggaaaagctgccggaggccaggcagaaggcgatcaagcacgagttggccaatggcggcgtcgaagcgctatatgcctggctgctggcccaggatttaggcgacttcgacccacagaccaagccaccgagcacgccggcgcgcgaacgcctggtggccttgagtaggtccacctggcagacgttcgtacacctctggcgcatcggtgaacttgggcacgggctgtggggggcatgcatgagcaaggatctctacgcgctgtttctggagtggtgccagcagaacaaagagcattcgataagccacacgaagttcagtctgttcatcagcacggcaagtatcgagaagaccaggccaattccctggacggacggcagcaaccgtcggttcgcggcgttcttcttccctgaggacccggagtccttcctgcccccatccccttcctcggccgcgctgggtgcgcacgtggtcgagtggcgggcgcgagccaagctcgcgggctggaacgtggacagttgggaccatgtgaaggggcacacgacgtga

SEQ ID NO: 341932 - DNA, 960 bp, Pseudomonas aeruginosa
atgctcggcgcgttcggaagcgccatagaggccggtaagccgatcaagctgcgccctgggtactacactcccggctttatggctgtgctctgtgcattcttgcgcagaagaaatgttccggctgaggggttgcagtacgactgcccgaaggtgagcggctattttagcgctatgcgaatttctcaagttctgtggggcgttgacgactatcagtatggtaggccgaacgcaggtacgaactatgctccactgacgcacctggcgtcgcgagaagctgtcgatgacgccactcaacagatcaatggatgtctccgcgaaatggcgggtagtgcaaggctcgactatcgtgacagcgtggcgttcaaggagctcatgcatgtggtgggtgagcttcacgataatgtctggtcacatggtctagattgcggttttagcctggctcagcgccgaaagcatggcgggcaaaaatctgagatcgagttcgcgttggctgataatggaatggggttcttaggtgagctccgttcgtcgggtgtggcgaaacgttttggcatccagactgaccaagaagctatcgactggtgcgttaaagaaggtaactccagcaagctggtcgacactgatgatggctgggggcagagccttccggatgattttgttggagccaacccttacggagcaggtgtcacctcccgcgctgtcgcgggaggtaatcaccatcaggggttggggctagcaaagcttctcgctcttgccaaggcatacgacggaatattacatttacagtccggagatacctgcctgagcgttaagcatggagtgctttcgttcaatcgaatgaaccactcttggcagggagtggctatctcgctgactctcgacgaggccaaaatggccgccgcgaaacagcctgagaccactgccgatgtggatgaaatcatgaaattactgaggggctaa

SEQ ID NO: 341933 - DNA, 2562 bp, Pseudomonas aeruginosa
ttgcccagcggtgcgcggatcagctacagctacggcgctcgcgccgccggtggcagttggaagcaatatagcctcggctacgacggaaggagcctgaccgagcgccgcgaatacgatgcgcgcggcaagctggtgctcagtaccaatgccctgggcagcgccggcgaggtgtccgttcgctaccgctacgacgccgacggcaacctggcctggacccaggtcgccggcgacagccgcagcgagatccgcatgagctacgacgcggcgggtcgtcgcaccggccttttcgacccgaacagcggccaggaaagcgtgcagtacgatgccctgggccaggccctggtgcgtaccgccagcgacggcagtcgcaccgagcgcaagtacgacctgctcggccgggtgctcgagcagaccgaccgcctgggcggccaggccagcatttcgcgctggcagtacgacacgggaacgaaaagcctgggcaagctggtcggcgtggccgggccgggctatcgccaggcgctgctctacgacgatctcgcgcggttgaaggcgagaggctgggatatcgaagtcgacggtgtcacccgcagctaccaggagtcgtatggctacgacggcttcagccgcctggcgagcaccaccctggccaacggccaggtgctgcgccatctctacaatggatacggcttcgccgctggggagcaggacggcgccgggacgacgctgcggcagatccaggctcgcgacgcccgcgaccagatcgttcgcgaaagctacggcaacggtgtgctaagccagcgcgactaccagcccgccaccggctggttgacgcgcatccaggcgagcaagggcggcagtgtcctgcagagcctgagctaccgctacgatggcctcggcaacctgctggagcgcagcgacgcccgcggctacagcgaagtgctgagctacgatgacctcaatcgactgttgcgtagcgcgcggaccctggatggcacacaggtggtccaggactttacctacgacgccctgggcaacctgaccggcaagagcggtgtcggcgcctatcgctacggcagctattcgagcgccgagcagcagctctgcgctggtcgcggcggggtggcccagcccggaccgcacgccgtgcgcggcaccagcgccgggacgtattgctatgacgctcgcggcaaccagctcagcgggccggggcgacaagtcaagtacacatcgttcgataaacccgtggaaatttccgccggttccagcctcagccgcttctcctacgatcccgagcgcaagcgctacctgcagacggtggatgggcgcacctctgtctacctggacgaggggcgtttcgaggaggtcaacgacggcgggcgcagttggcaggacgcctacgtcggcgactacctgatcctgcgcaaggaagggggcgccgtcaaaaagctctacctgctgcgcgatgcgctcggctcggtggaaatcctgctcgacgccaacggtgccgtcagcgaacgccagtctttcgccgcgttcggcgaacaccgtggcgctgactggaaggacaacggcaaccaacccaccgccacctccacccggcgtggcttcaccggccacgagcacctggaggagtccgggctcgtccatatgaacgggcgggtctatgacccggtgatcgggcggttcctcagcgccgatatcgtctatcaggatacggccaatgcgcaggcctacaaccgttactcctatggctggaataatccgatcgccagtgtggatccgacggggtatgcgttggaggaaatttcgtctggcaatagttggtactcaccgtttataagtaatagttggctggttttggggaatgcctttaaaggtaatcttccagatagttactgggacttaggggtgggggcgttcaagcagaatcttaactttgcggcgactacccttgctggaaatccattttctatttatgggttttcgcgggtaagtgaaagttttgataatttactttcccctaaaggtgtagatcagagggcaggagctggagtgtatgagcttggcagtctatttttcccaactgcaggagataaagtatctggatgggttgcaggttttgcgagtcgcctcagatttgctccagccttaagaggagggataggagtttctagtcctgcttggaaaggttctgggccgactcctggggttttaggggtagagccaggttcactatcctctaaatcgttgaggaattattatccgagcactgatagtggttctatagagtatgtgtttgatccgataagtaaaagctttgcggtgggaagacctaaagattttcgtccaatgttgagtcagcatcagcaattggctgattcaattggggctgctgatgctacagttgtcggtggaaaattttggcgtggcccaaatggtgaattctttaccaatgaatatagtgggcactactggaggaattggtcggaagaaaatcgcaaagtgtttgttgatgtgatgaataaatatggtgtgaaggttgagcaccggagagggatgtga

SEQ ID NO: 341934 - DNA, 876 bp, Pseudomonas aeruginosa
atgtaccgcgccaagtcgcggggccgcagccgcatcgagtactacacccgcgaactgacctacctggccaccgagcgcatggcgctggaaaccgaactgcgccgcgccctcgagcgcgacgagttgcagctctactaccaacccaagctgagcctggagagcggcttgctggtcggcgccgaggcactggtgcgctggtaccatccgctgttcggggaaatttccccggagcgcttcatccccctcgccgaggattgcggcctgatcctgcccctcggcgactgggtgctggaacacgcctgccagcagatgggcgaatggcaaaagctgcacgcgccgttcggcccgctgtcggtcaacctcgccggcgcccagctcggccagccgcaactgatcgaacgcctcgagcaactgctggagcagtccggcctggaaccgtcgcggctgcaactggaaatcaccgagagcttcatcatgaaccagaccgaggaggccctcgccgtcctccacggcctcaagcgcctcggcgtacagctggcgatcgacgacttcggcaccggctactcctcgctcagctacctcaagcgcctgccgctggacatcctgaagatcgacaagtcgttcatccgcggcctccccgacgatccccacgatgccgccatcacccgcgccatcatcgccctcggccgcagcatgcagctcacggtgatcgccgaaggcgtggaaaccgaaggtcagcagagcttcctcacccacgaaggctgcgagcagatccagggcttcgtcctcagtccgccgctgcccgccgagctgttcgccagcaaattcctcaaaccgcgccagccgattggcgctccccgagaagcgccggtataa

SEQ ID NO: 341935 - DNA, 945 bp, Pseudomonas aeruginosa
atggcaatgatgtggcagtggaatcctaaacattggccattcaacgcctcaaacgtcgccaggatagccgaggtgagccaacccaccatgagcactgagcacggtaacggcatccctatcgagtgccgctcgctactcagcatcatcggtcgggtcaggcctttaaaagagcgcaagcgtactcggcacaaagcatctcgatatcaagttcagcaattggagcagaactgggcgatcgagcgaattcaggccatcgagtcgatgctggcgtatgcctcatatgccgaacagacaggtcgagagatcaatctcgactgggtcgagttcgctgctgaggagcgcgcactaatgctggagcgagctcgctatattcgcgacatgcagcaacgtcacggtgcaaacagctcaaggccgaaacataggctacaacccgctgtgcatgccatcgagccatccgatatctcgctcttgccatcgcctccgaaacatgggcgccgggaggccgtgaccgattatgcccagcgcctatacgaactgctcgaaggcccctacagcgaacgtgcccaacgcgtgattgatgattttgttgagcgctgctggacgacggaaaccaccctgcgattccagcgcaatcgtgacgaggaacatgctcaggactatttgtggctgctggctgccatagggattcacgctcgatctatcgagctgatcgtgtacgacatcagcaaacccaaggctgccaagtcttactggcgtcagcaactcggaaacacgcgtcggccgttcagtcagcacgcgccagagaatagcgatgtagcgaatccacatttgggcatcagggcgaaactcgagctgaagggtggagccaggcagaaccatcactccggcgcggccctacgctacctgatactgatggcttccatcgactggcatttccgtgcctga

SEQ ID NO: 341936 - DNA, 792 bp, Pseudomonas aeruginosa
atgatgcgcggcagattgatcggaaggtactggccgactatgcggcgtatctgcgcgacgtggttggacgcggtgacctcgccgtcagcaccgcacaaaaccggctatccagtgttaatggcggcgcttcgcggtgatcagcatgtgacacttccaagtccgagtaaggcgttgggtatgcagcggaccggagttcgctactcagtgccgcaaggccaagaccgcgaacaggttaaacagatcgtcgatgcgctttgtcgccatcatcagttacgagttgcggcgatcattctgttggcgcgagccaccggcatgcgcttgcgtgagggtatcttggctgacctgccacggctaatccgcgaggctaacggccaaggcaggattaacattcaggatggcactaaaggtggtcgcgccggcgcctcagcgccacgttggattgcggtgaacgaccatgttcgaggtgcccttggatttgcaaggcaggtttcgcctgcaggtagtcgcaacctaattgcgccacacgaaagctatctgaatgttctgcaagaaatcattcgccctgcgcgggccatcctgcatgaacaccacctcagaggcttccatgagctccgcgcggcgtacgcatgtgagcgctatgagcaaatcaccctgcactctgcgcctatcaacggcggccaatgttaccgggtagattggcaccttgatcgtgaggcccgaagccaaatcagctacgagcttgggcacggccggaacgacgtagttgctgcctacattggaggacgaacatga

SEQ ID NO: 341937 - DNA, 276 bp, Pseudomonas aeruginosa
atgagcaagccattcgatatggagttgttcatggctggcgtgctgaccggatcgcacaccacgcagcaacgccatttgcggcaggcgagaatcatccaagctgaaatctcagtgcgctggcagcgacagacgccttgggcttggcagaaaaagcatgtggattggtttcttgagcatcgcctaaatcgacgcagcgaggcgacgcggtattactatttactgaccgtgcggctgctcgcccgtcgtttacaaaaaacatgggcgttcaatctctga

SEQ ID NO: 341938 - DNA, 1722 bp, Pseudomonas aeruginosa
atggagacggcaccgacatccgaagagttggtcgagcttttcaagcgcggagaattggctagccaaatggcacaccgattcgggttgagtggcagatcggacactagcgtgatcgaagagcgttgcattgctttacacaacgctagtaccatcgatttgttagcgcttgttgaagacaatgccttgcaaaagcttgatggcactgattttttcttcgcttcgcactttttctgtctgcttctgcccgagttacaggcggagcccgggcggatgatggcttgtgtcgacgcacttgtaacgcgtggaggggaagacggtgccgctaacgagcccaatggcgcgtttcagaaatggtgtgcgaatgttccccagcgtgctagcgaggtcattgccgcagcgcatcaaggtgatgttctctcgactcaccatctatcgttcgcgctaacggcaattagcgatttggctgaggcgcgccgcattgctgccggatatgaagatgttcgtcgtcaggcagcaattgctgccttggggcgtattgaacacacaaactcagagtcacgctctgagacattttctgttttcaaggcactgctagaggtaggtattggcgacccagttagggcgagcgtgttgcatgcgaccatggaaatcttagcgcgctgtcctaacaacgcacctgcggatgcaaacgcattaataagtcggttggtgatgaatcccggcaaattcaccatacaccagtgcgcacgtgcgctttgggcgtgccggaaagcgcttactccagatattgtcgcttgcttattaggtgcattggataatctggagtcagccaacaaggggaccgtagatgagctagatatgggccttcaggtgcttatggagcacgggcatgccgaggctgcattatctttcgtaacaaggctgctctctcgcacagatgatgatttagaacttgaagccttggatagtttcacaaggacattgttggcaggttcttctgatgttctcagtcgagttgtagtacggtggctaaagcttggcgccccccgcctctgtggtggcatcgctaaagccatacagggcccagggctggacggcgttcccctaagcttcaaggctgaggacctggctatttctcccaccgaacaattgttcatctgtcgaaaggctgttggctggttctttttcaaaccgaccacggcctcttccgtattggtatcggtgctacgggtctgcgatatggatacatccctagaggtgcggaagctgctggttgatccgttgctacaaaactatggtggtgtgcggaagtaccttggcacccttgcacccgaggatgctgcgagcaaggctgtgagttgggctctcgctcagaacggctcttatctcgaagcacagcgatccattccacccatcgtcgaacttcaaccatcggagcaccatcgccgcatagagcgactgcgcatttctgatcagatgcgagatgctcataaacaggcggaaagtcggtctgttttcttgagcctggtaagccgctccgtgctgctttacggcaatcgttcactgacctttgtagacgatggccaagacaatcttcgccctatggaaatcgatcttcactcccacggagtttcctacgagataccgcgaatggagattattgatcctgtgggtcttgaatatgtcctccgcgttttccgtcatgagaggatggaagaatga

SEQ ID NO: 341939 - DNA, 1701 bp, Pseudomonas aeruginosa
atgaaactcttaattcgtgattacttggggtcgttaagggagcgagatgaactggatgcaattctccccgatctgttgagtgagcttggcttcaatgtctattcacgccctcagagaggcacaagtcagcttggagtagacattgcggccgttggaaaggacgacgacggagagaagaagctttttctgttttccgtcaagcagggcgaccttacgcgccaagactgggacggaactccgcaagctctacgatcatcgttagatgaagtcctagatgcatacatccctcatagaattccggccagatacaaggagctgaagattgtcatctgcttggcatttggaggagatgtgaatgagcaagtgcgtgagaagctaacgggcttcatcgcaaggaataccactgcaagagtcacttttgatgagtggaatggcgacaagatcgccggaatgattcttaaaggaatactgagggaggaagttcttccaaagccattgcgcagtagcttccagaaagccgttgctatgatcgatgagcctgatgtctcttatgagcactttagtcggcttgcaagggatttacgccaggctggtaccgtgtcgggaaaagcccgtgtacgtgctgcccgacagttaaacatctgtctgtggatcctgtttgtttgggcccgcagtgtaggcaacatcgaatcaccgtatcgtgcgagtgagttggccctgctcacagcttgggaattgctccgacctacgcttgggagcaacggccgggaaataaaggcacttagcatagtggtccgacagatgatcgaacttcatctcaccatctctatggagttcattgagtctcgggtgttgccgtacgcgaaaatacgccatgggatatcgatggctacaggctcgcaaagctcgcttgatgtaaaccttgccctgtttgaggtgctgggccgcattggcttggcgggcctatggctccactggataggggaacggagtgacgaaacccaccaggagcaaatcagaaacagtgtcgtaaggctcacccaaacgggtttggagctaattcgaaataaccccgttttgtttctgccgatagcagataggcaaggaactagcattgcccttttcctccagctttggctggctagtgaggttgatgccacaggcgtaacgtcttggctcgaagaaatggcttgtcgcctcacctactctattcacacaagaggtcgttacactagttccctcacagattaccgtgatcttgccgaacacccgcgcgatagatccgatgagtatttcaaagaggctatggcgggaagcacaattgttccgttgcttgctgcttggttgcatgcgcttggtgcgactggggcggtcgaggcgctgagccgccttgctcagaaggagttgaagcactgcaccttgcagctttggctaccggacgcctcgtcggaagagagtctttatgtaggtaacagctctcatgggcgggccctttgtgggctgccgttgaacaaaggtggacgccaactcattgccaccattgcagaggcatgcagtaaggattcgggcttgcagaatctgtcgcctatcaaatcagatttctggccagtggtcatggtcgcctgccaccatcatcagttaccaatccccccggggttttggataggctctttaaaggagcctgagcgtgagcctgattag

SEQ ID NO: 341940 - DNA, 1095 bp, Pseudomonas aeruginosa
atgaagaccgtatatattttaggggccggattctctgtcgatgcaggtgcgccgatgcaagcagccattatacctgaggcattcaggctgcataagtcaaaccctggaagtttcgataaagttaaatttgatgagtttacaagcttcattggtgagcagttaaatatctctgaggatatgtttccgaagatagatttggaagatgttttcacccctttggatcggtgcctggcagagaattcgcagttcagaggcatcagtctcgacaagataatgaaggtccgcgaatcggtattctatgtcgtcggacgaacaatacagcttttgttgaacgaaacaacaaagacaaaagactacatagatcactttgcaaattacttgaccagagagtcttcagttcgagcaggggttgagtacaaaaggaaagatcctgttagcgtaataagtacgaactgggatattttgctcgataactcaatttataaatcattgcactcaggttatggctataacggggttgtagactactgctgctacataagctctagagacaagagcgatgagacggttgttccggggcttgagaaacttggtcaaggcggattcaatgtgaagctcttaaagcttcatggctctcttaattggctgcaatgtccaaggtgtgcaaggttgtatgctaagtttttcgaaaaagaagccatacagaatttcgatagccctacatcatgccggcactgcgataataatttccctgaagaacacggcaggcatatactcgctccaaatttaataatgccaacgtatttaaaagatttatctaatccgcagtatagaattatttggcaaaatgctggcatagagatttcggaagcggatgagattgtttttatcgggtattcattaccctatgctgattttgaaatgcgtcaattgttatcgagaatgacacgaaaaagtgcaaggattcatgtggttgactatcaagccatggaaaatagagaaaaggtaatatctcactggtcaaaattctttggcaagcgggagataaaatttagctttgatggcgcaaaatcttttattgacagcttgcagtaa

SEQ ID NO: 341941 - DNA, 696 bp, Pseudomonas aeruginosa
atgagcgaccttcaagcaaaagtatccagaggtgaccacaaaggtaagccgctctatccgcacttgtacgaagacggaaaatacgtcgcaagcccttctcgtttcgaggtcgactacattagagttgacgagcttgatgagcttgaggttctggttcgatccggttacgccgcacgcatgtcgaatcccaaaatccccaacgcccagtccctcatcattagcaagaatatccaattggcggaccgtggaacagtgctcacacctgccgcgctattgccctccatagtcgatgaggtcgatttgaatcgagactgcatttccaagtctagaaaggagcaggctttcctcagagcccacctgctcagaggatccatcacagggaaatgcgtcatttgtcattacgactttcccatcgatatgcttgtggctgctcaccttaaaatgcggtcagcatgtagtaattctgaacgcaaggacattgacaacgttgccgctctgatgtgtaaaactggctgcgacgatctttacgagaggggatacatatcggtctacgccggtagagttatatctacgaacgcaaagactagcactccacgcctgagtgagatgattgcgaaaattgaggggcatgttgtttcaaactggtcaactagctctcattactatgattggcatcgagcaaaatctgctaggtag

SEQ ID NO: 341942 - DNA, 1494 bp, Pseudomonas aeruginosa
  misc_feature (568)..(568): n is a, c, g, or t
atgcgtattgggattgatttcggtaccagctacaccgcagccgcagcctacgttgatggggttgtacggcatatatccttccgtggttatagccaatttcggactgcggtattcatgcccgaaaagccagtggacactaccctgtttgatgacactgcttacgaccagacggtggctagcaaccaggccagtgcgtctattgcccattcgaaggctatggaaaaatacgaagaggcagctagtaaaatccgcgtgtactaccgcacgttggcgagagatggcgatctgacagaggaggcagcaagggaacaaatttccttggcactctctgctctgaaaaaaccggtttcaccgtccccagaggcgattcggaaggcgacgttggccgctgccaagcgggactgggtacaacagcagcttgatcaaggacgaacaagttcagtcagcatcgatgagtcagcagtgttcggtgaggaggcgatcgaagagttcttttcatatgaggctgggcggctcattcagtcaccaaagtccatgcttggtttcaagcttggagcaccccaacgcnaggcggtcttgcagatcgtctcgaatgtcctacgtcatatccgacgggcagcgagtgaccagctaggggtagaagtgacagaggcaatcatcggccggccggttctattccgaagctcaatgggcccagaaggcagtgatcaagcggtaaggcttctcgaagaagcagccgcgcgagcaggattcaagtttgtagattttttgcatgagcctgcggccgcggctatcacctatcacgcgcaatcccgagatgcgaaccgcacccttgtggtagacgtggggggtggcacgaccgacatcacgatcggactggttggaggtcaagctgaaataccaaatctcgaaaaaacttggggcttggccaagggtggtacggatgtggacctaggtctttcattgcgcacagtgatgccactttttggtaaggaccagtgcaacttgctggccccggtctatgtgaacgccgctatggtcagcgacctgaaccggcaaagagattttcgagttacaaggctggtcggagtacctgcaccatttcagaagcgtctgctcactttacagcgaaacggcgtcaccgtgaggttgaatcgtgatgtggaaatgctcaaggtggccctgagcactgacgcagaagcggggatttcgctcgattatattgagagtggcttgcaggctaatgcaaccaaatctgacctagtgcggggctatgaaaggtttctacggtcttttgatgagttactgagctgcgtaagccaagaaactgctcatagcaagcccacagtcgtattcttgactggagggatgtcaagggccccttacatcgaagaaactgtgaatcgccacttcccgactggtcagctggttcgcggcgatgcatcgctgggagttgttagcgggttggcaatacatgcggctagatcgttgtag

SEQ ID NO: 341943 - DNA, 1275 bp, Pseudomonas aeruginosa
atgattggggtgcgagaaaaattgagtttgtataattttctgatggcgttacccgtggcaggtgacgcatttttgctcgatcgtctggggcaattgattcttgtcgacggcggaagcagtagtacccgtttgttacaagagctgagcaatgtgaatgtaaagcatttggacattgtggtttgtactcatgctgatagggatcatgcgggagggttggtcgacctcttagataaacctaattcacgaattacggtgagtgagttttggctgccaggttcttgggctgagtcattacccatcttaatcagcgatcctggttcggtggtggatgagttgatcgagaccttagatagctggggggaagtaaaagcttggaatcgaggttctgatcggcttaacaagtatctgcatgagactgtcagcaatgagaggcgcgagtaccggagcgccatatctcggcgggacaaaactgctatctcaagtcgcgacgagcttacggaaaacgaaggtcttcctcgggaatggttcgcaaatggggatgggggtcggaacactcgtagagagggccgagaggctttcgagcgcggccgagagcgcattctgaggaagcatatgttcggagaagttcgtattgaagcagcccgtttttgggttggtttgatagacactgcagaacggatccgcaagatagctttacaggcacatcgacataaagcgttagtgcgctggtttgattatggtgagtttgctaaagctggactagcttcgggtggcgagagggaactcctcattccccttaactctgtagagcttcgaagcccgccaccaccaccacttgacttgacatatttcaaccgattaactccggtgaacgaagagtgcttggtgttcgtttcaccccctccttcagatcatccatcttggcctatcagtgtggtatttactggcgactcaccgctcggggatggtatcgactacgcagagagttggttggactggcctactggtgtgtcaaattgggtagtcgcaactgctcctcaccacggctctgaaagcaactctgctgcttatcgccacctgctgagtaaagcggaagttctgctttgggttcgctcaggggggaccagtcgccatcctggtgatacatatagatcaatttcaaatcagcgtcgaatttgcacccattgcccacgctctaacctccctcgtatggccgccatggttacattgggaagtttgacactaagaactcatggccatttttgcagttgttaa

SEQ ID NO: 341944 - DNA, 1797 bp, Pseudomonas aeruginosa
atggatatcgacgagatttttaaggatttatttggtccgggtttcaagagcctcgatgggttctgccagctattaaaagttgatcaagacaagctactcaacttcctttacaagaggaaagggagccattacgttagcttttccgtcttaaagaaaaacaaaacccatcgttccattaaagcacccaagcgggtgatgaagaaaattcagcatgcgcttttgccgcatctcgaaaagttctattcccccaagccttccagccatggcttcgtcaagggtaggagcgtcaagacaaacgctcaaatccattccagaaagagatatgtgttcaacattgatctgaaggattttttcgaaagcatccattttgggcgggtcagaaatttattcatggctcccccatttagtgcgccccacaatgttgcgacagttatggcacatatctgttgcagcgacgggaagttagctcagggcgccccaacttcaccgctaatatcgaatatgatttgccggaagcttgactcacagcttcaggccttagcaaaatcatgtaaatgtcattttacacggtacgctgacgacattacgttttcctttaccactaccgaaaaatacttaccgaaggatatcgtcgaagtctccgaggacggcagagcgatacctgggcgcgaactggatgaaatcatcaaatccaatggtttcatcataaactctgaaaaaacacgtcttcagcaccggacgcagcgccagatggtaacgggcctggttgtcaacgagaagccaaacttaaccagagacttcatccgtttaacgagctcaatgataaatgctcttaaacgcttcggtcctgagctggcagaagccaagtatttggaaattctgaaaggcgagaatcagccgcttcagcctcgacaaattctgcggacaaaggagaatgctggagattattttatcaaagtggtcaaagggcgactgaattatattcaaatgattcgcgggcgaggcgacaaaatctatcgtcggttggcgtatgaattcacagtggctataggcaaagagaatcctgagttcaaaaaatcacctgaagagatcttaggaaactcgatttttgtcgttaacaacatcattgaggaatctcagggtactgccttccttctggatggggtcggcatcgttaccaatgaacacgttgtggcgggggtatctaaaacgatcgcccgtcactccatttcattcaggcgtgccggcggcacaagagagtattcagctgaacttatcctttcggacaaaaaagcagacttggctattttttatcccaatgaagagttccgaaacatccccgccctgcgcaagtccgagaagactattgttcgcccccaggatccagttctatcgatcggtttccctaggcatcgagatggtgccgcgcactacatcgcaaaaggccatactactcaacggcgccgccaggtcgaccttgatctgtggttggttgattttacgctgatggagggaaatagcggtggccctatattcaacgactccatggaagtgattggcgtcacggctagaggagcaagaaataatctcgacgcagcactttacggctttataccgctggagagtttgaacagttttataaatagagcggactttctacttctgaaaaggttgtacgactatctaggcaacagatcactaagcctccttcctagagttctcggcaaggggatttttagtagcacctaccaaacaaggctccacaaggaacgccttcagaaagctaaggtagtttaa

SEQ ID NO: 341945 - DNA, 2523 bp, Pseudomonas aeruginosa
atgagcgcccaagccgcttctatcggttcgctcctatcgtcgctactgttgtcggactatcgggttctgcgtcactcttggggaacaccgttcacgcaacagttggattggtcggtgttgcgggagcccgtctatctcgcttatcagccttgggcggcacgtttccctgaccatgtattcgattccgcatggcgattcctagcagggcaacaacctgaacatgacgttctgctctcagcgctccaggctctggtcaatgagttcttggagcttcgacatggtgaagtacgcgtccgccgtgatctctttggtgcctggcagcaaggcgtagccagtaggctttcttcgctctctatccgagccgcagcggacatagcactcgatgtcaggcgatacaattcgggccgttcactttgtttgagcctcgactcactcaatcgagagataaccccgtggagacgcctagttgtacccctgcttcgaccagaggaggccccagtcgccgactacattgagcgggaaggcttgcatgagacacacctgcatctgaatggcagcacgcatgccgagatttgctggttgcgagcgatccgggactcgcgcactgaaacccgtgatttcgtgaccgcctggactcgcgacaagaatagaggccatattcgcgagctagttggacaaataaatcccgacctgacgccccagatctttcaccagcacctgcagactgcaagccggcttcgctattggctcgtcggagccgcaaaaggccagatcgcgttggacgcgctactgccagagtcatgccacagcttgtacagcgcaggtaatgacgaatggtctgaagggctcagcatgcctgctccatcatggcgtgacgaacacgatgttgaggaagaggtcacctggatgacagccctcgtggctagacttcggcaacgccctagcgtacagctttcccggatgttccatgcctacctgctattgctgaaccaatactatcgattgcttgtgcagagcgaggcacagtacggattcgaccagtttcagaaatttactctgacagggcttcgcgagccgtcggagcaagagtttcgagcgcgttttcacgccatgcacgggcctcgattagcaaatagcaatgtcggatatcttgagggacgcttcgccccgaaagtcgacccgctaaaagcttgtcgattgttccaggcaattctgggtggctacctcaactacctgcgcgactctactgcagcgcaaagcttgtcctccaaaccgctccgttctctttcagcattgctgaccgagctagaccactgttttgagcgaccgacgtttcctcatcgaagcgtgcatcggctggcattagtcgcacatttcatcaagcaagactggtcgccccaaaatggaaaagccggaccctacaggcactactcactcgatatgcagctacggcgctcgtctaacgtgctgctctcaatcctggcccgctggcctctattacggacatgggtgcggggcattgatgcggccgcaaatgaactgcatgcgcctccagacgtttttgccccggtcttccgggtctgccgtagagcaggtttgactaggcgcacctaccatgcgggggaagacttccgtcatctcctatcgggtatagccaccatgtgggaggcactagagctactggacctgcgcgaaggcgaccgtattggtcacggcacagcaatgggcatccgccccggtctctggcttgagcgtatgccaggtaaaatcacgctgccaagaggcgagtggttgctgagcttactggccgcatggcagttgcttcgtgacatgccggaaatgcaggcctgcgtacaccacctgcagcgtgagctcgagttggttgcccataaaatcttcggacacccacttacggtgctcgaaatcgaacgtgcgatggcactccgtgggctgagccgccttgatttgatgcaccagctaacaagcaatgagaactcacatcaagaatcgctgaacgacctctggcgcgaggaggctaagagggttgaatcaacgtaccaaagccagcctgatgcgattcggttgctctggaagtggctgagcaacgcagaagtgcacaagcgcgcgttcgagctaatagagacagaggctggattcatggatgcccaaggctacctcagactacagcaagcactcatgcgacaagttgccgatcgaggcgttcttattgagacactgccatccagcaatgtccggattagccagtaccatcacataggcgagcaccactcactgcgctggatgcgggttcctggctacgttgaggaaggagatcccgaaattatggtgtgccttggctccgacgatcccgggatttttgcgagcgacctcgaaaccgagttctacctgctgtacgccacacttcggcgatcaggcctcggcgattctgaagcacttcaacgattaagcattttgaacgaacgcggtaggatttatcgattccaccatcctctgctgtcgtaa

SEQ ID NO: 341946 - DNA, 2652 bp, Pseudomonas aeruginosa
ttgacccagccaacgctcgcaacgagatgctttgatgtgcttattcatctggaccaaggggacagcgctaaggctctctcggccggcgagcttgtccagcgccggcagtatgaacttctgcgggagcaaatcagtaagcacctcaccgacttaccgcccacagaatcgatcaagcaggactatcagcacggcagtggttggactcagttcctcgatggctcccgcggcgcaggcaaatccactttcttgagttcagtaaaggctgccctgggagtcgacacggaattgaagagtcagatggcattcatcgctctgattgatccaagtcgtatcgagcgtagcgagatcatcctgctcgtcatcttgcaacatctcagcaagcaggtcgaagaatcgctcaaggtgctgcgccaaatgcgtaatgagcagcttcgcgacgaatggcgcagagcgttcaagggagttgccggcgggttgagtctgttcacgaaggagtatcacccgctcaacgatctggatccggagctattccttgactggggcctggagcgaacaagcgacagcaccagcctgagaaaaaagctgcattacttgttcgacactgcctgccgcattctcggggtacaggcgctaatgctcgggttcgacgatgccgacacagactctacccacgcgatcaatctgctcgagtgcatccgaaaatacttagataccccccgtgtgatggtgctggtaacgggcgacatggagctctactcattgctcgtgcgtcagcactttgcagcaacggtcgcgggcaagcctgaggctgctctggagcttcagcgcagttcaaagcaaggcgatcgctcgggccaatacctacgcatgatcgatcacatggaggagcagtatctgctcaagctcttccccatccgtcgacgtatgcagttgaagcccttatggaatatcaagcttcttgataattgccacgccaagtatcctgcctggggggaagacaaggtcctcgttgagaacgtagtccaagcaattgtgcagcgcggcctacgcgttaaggccagctccgacgtatccatttacaccgagtttttgcttaagcaaccactacgctcagtgctacaagtcttggccacttgcgcgcctcatctgatcaggtcctcttccgaggatttaatgtctggctcctggtcatctgacctaaccagcgcgctcagccgctctttacaggccctagcgctgactagcctctacaaactttcggtcgataccgacgcaatcgctgcaaaagagttacccgctttaacgcaagctgttttcgacctgtcactggaagacggagatctcgacaccgctccatatctgcggccaatgtcagcggagctggacatcaaggcttgcttcgctgctttagctgcggaagtgccgaatttctgcgccgaacagccgggaacggctcttagataccttttgcgtgggccaggcagtgtgtcgctctataacctagcaagcccttacctcagcgaaaaagactcaacgccgttggtgggtcgtgtgcaccaattcaagtcttatatggggatcggccgcagagaggacagcctcgactgggcacgtcgtgctaccgcagtcatcgcaatgccttacagcgtgaattacaagccacgtgtcgtgctacccggcattgttggacttcgacggggaacgaaagggagaagtggggagcaaatagctcgagcagtaatccaaaaagccgttgaggacaaagcgatttcgtgtctgcctgtgtttgcgttgagcatggtcaacgtggtgagcggcactaaccgtcgcacgtacggctctctttttacgctcatcggccttatcgagaagctgctttcggcaaatatgcagggccagcaggaagctcgaacggtctttgagagggcatatccgtctttgaccatatctggacccagttggtcgcgccaaggcgactcgatagtggaagatcaggacggtgaagagcagcaacgcgcaaaagctgattcgaatgagcgggctaaacaagaagccctctggacgaatatcaacagttggctcgaaagtgcgcgtgacttgtttgataagaccatgccttcggggatttttctgggcaaggtctggactcgactcttcttcagtctgcaaaactccgctgaggaactgcaagcccgagctaaatttggcgaggtgatggagattttttcactctgtgtcatcaatgcgttcatggtcgaggaggctgaacaccacctgcttgactcgtccggtgcatcacagactattccaaaagtcgacaggaataacccccgaacctcagctagctggtttgtagacaaactcaactccgcgaaacctcaaagagctgacttcccatttacagccattatggcgacatgtcccctgctcttgggattactggatgccgaactggattacgcgcaagcactgcagcccatgtttccgagtggcacagataagacggctatcgaggcgttgctgtgtccgaaacagcttaaggaactcatgcagaaagtctcggtgacaggagagtcgcggactcgcgcagtttccaaaaaaacaaaacccgaaacctcccctgatggtgctaatgtggcggcccccgaatga

SEQ ID NO: 341947 - DNA, 486 bp, Pseudomonas aeruginosa
atgaccttgggtgctcgcggcgcgcggtggccactaacgctgctcgccggcagcttgtttgccctgggttgggcggcgttcacaacgtcaccgccacggctggtctacaacgggtccgacagcgtgcccgtcggctggtaccgcatttcgccgaccaactcgttggcgccgggcgatctggtgctggctcgcctgccgccagaggcaatgtcgctggcgtcgcagcgcggctacctgccggcagacgtgccgttgctaaagaccgtggcggcaatggcgccgcagcgggtgtgcatgctgggcaatcaggtacgcatcgatgacgtcgttgttgccaggcgtttgagatgggatccacagggacgcgcgctgccaacctggccggtctgtcggcacctggtgggcgacgaactgttcctgctcagcagcagaaacccggcgtcgttcgacagcgccacttcgttccgctgtctgtcggcgggatga

SEQ ID NO: 341948 - DNA, 3477 bp, Pseudomonas aeruginosa
atggcggccagcagtaactttgcctttctccaggagcacgaccccgttttcctgcagcttgcgagcacagccgagcaggtcttcgccagcgatcccaacaccacactgatcaaactgcgccaactcggcgaagcgctggctcaggacttggccagccgtgccggtatcgagttcgatgccaccaccacccagtccgacctgctctacaagctcagccgcgagatccagctggatcagaatatacgcagcctgttccatactctgcgcgtcgagggcaacagagccacccatgagttccgcaccctgcatcgcgaggccatggatggtttgaaggtcgcccgcgctctggccatctggtatcaccagtcgttcggcaagaatgctcatgcgttcaaacctggccccttcgtcacccccgcagatcccagcgcaccgctgcgcgatctgcaaagccagatcgaacagctcaagacccagctcagcgagtccagccagcaactggagagcaaccagaagctggccgacctgctcaagcaggaggccgaagaatatgccgtgctcgccgagcagatggacgcggaatcgcgtagccacaagcagttggccgcagagcacgaagccgcgctgcacaaactacgcagcgagcacgaacaaagcctcaaagccctgcagaagcaactggccgcccaaccgcaagccagccaacaggtggccaagcggactcagcaggccagcaacagcttcgatctctccgaagacctcacccgcatcctgatcgaccagcagttgatcgaagctggctggcaggcggactccctcgacctcacctacggcaagggagcgcgcccggagaagggcaagaacaaggccatcgccgagtggcccaccagcagccccaaagcatgcgccgactatgtactgttcgccggtctcacgcccattgccatcgttgaagccaagcgcaagcgcatcaatatcgccgaccgcattccccaggccgagcgctatgcccgtgagttcaacttggcggccgagcatcaagagccctggctgctggcgggtcagacgcagccctggaacgatggccagggtggtcacttccgcgtgccctttgcctttgcctgcaacggccggccctttatcaagcagctcgccgaacagtccggaacctggttccgtgacctacgtagcccggccaacacgcgcaggccgctgcctgacttccacaccccgaatgacctgctcgacctgctcaaacgcagccaggcagacgccgaggccaagctcaaggccgaaggcttctcctacctcaagctgcgcgactaccaggagaaagccatccaggccgtggagcaggccctggccaacaatcagcgtgactgcctactggccatggccaccggcaccggtaaaacccgcaccatcattggcctgatgtaccgattcctgaaagccgagcgcttcaagcgcatcctgtttctggttgaccgcagcgccctcggccagcaagccatcgactcgttcaacgacaccacgcttgagcagaaccacaccctcgcgcagatctacgacatcaaagagctgggcgacatggccgccgaggcggaaacccgcgtccaagtcgctaccgtgcaagccatggtcagtcgcattttccgctcggataacccaccgcccgtgggcgagttcgactgcatcatcgtcgacgaagcccaccggggttataccctcgaccaggaaatgaccgaaggcgagctggccgtgcgcgatcacagccagtacctctcgcaataccgccgcgtgctcgaccacttcgacgcctgccgcatcggcctcaccgccaccccagccaagcacaccagcgaaattttcggcaaaccggtattcacctacagctaccgcgaggccgtggccgacgactggctggtggatcatgaaccaccgatccgctatgaaacccagcttagcaagcacggtatccgcttcgagaaaggcgagtcggtcagcgtcataaacacccagactggcgaagtcggcgtagccgagctggaagatgaactcagcttcaacatcgagtcgttcaaccgccgcgtgatcaccccggccttcgacaaggtcatctgcgatgagctggccaaggagctggacccattcggcgaagaaaagaccatgatcttctgcgtcaaccaggcccatgccgagcgggtgaagaacctcctcgacgaagcgttcaaggcggcctacagcgagcaatacaacgaagcggccgtgcgcatcatcaccgggcaaagcgacaaggttgagcagcttattcgccgctacaagaacgagcccaaccccaatatcgccatcaccgtcgacctgctcaccaccggtatcgacgtaccgaagatctgcaacctggtcttcatgcgccgggtgcgctcacgcatcctctacgagcagatgaaaggccgtgccacccgccgctgcgacgacatcggcaaaaccgtattccgcatctttgatcccgtcgatctttacgccagcctggaagcggtcgacaccatgaagcccctggtgaagaaccccaacatcagcctggagcaactggtcagcgaactcaccagcggagccagccatgatgcccctggcagccaggacgacagcagccacgcccatgacgtactcgaccaactgagccagcgtgtcatgcgcatcctgcgcaaggctcagcacaaggccgaagacaaacccacgctgaagaaaaagctcgatgagcttcaagaggtgtggggcgttgagccggcccaattacataaacatctgcacgaccttggcccgcagcaagcggccaacttcgtccgccagcacagccagttgctcaaccagctcgccgccgtcagcgccctgctcggttcggagaactacccggttatctccacccacagcgacgaactgctgctgcgcgagcaaaactacggacaaaaccagaagccggccgactacctggaaagcttcaacgactttattcgcagccagctcaaccaatccgcggcccttggcgtggtggtcaaccgccccaaggatctgacccgcgaacaacttcgcgaagtccgcctgctgctcgaccagcacggctttagcgaagccagcctaaaaagcgcctggcgcaatcagaccaaccaggaaatagccgccagcatcatcggctatattcgccaggcggccatcggcgaagccctgctgcccttcgaccaacgcgtggccaaagccatgcagactatctactccctgcaaccctggacgcctgtgcaacgcaaatggctggatcgtctggccaagcagttggtgcatgaagtggtcatcgacccgcagcaggtcaacgatgcctttcgtaacgatggcggcctcaaggcgctggatcgcaacctaggcggcaacctggaacgggtattggaagcgttgaatgacaacctgtggtcggctgctggatga

SEQ ID NO: 341949 - DNA, 999 bp, Pseudomonas aeruginosa
atgaagcccttcagcaagcccgccattgatattcctgcgcagctgaccctgctcaaacagcgcggacttaccatccaggacgaagccaaggcgcactgttttctggaagcggtcagcttcttccgcctcacgccctacatgcgcccattccagctttcggaagatgccgaccacggtttcaagcccggcacccgtctgcaggcactcacccgtctatatgacttcgaccgtcgcctgcgcctgctggtcatggatgccatcgagcgcatagaagtcgcggccagagccgtcattagcaaccacatggggccgcaatatggctcgcactggtatctgcagccaaagttcttccagcgcggctatcggcaccaggcgctgctcgacagcatccgcagcaagcaggacaaggctctccaggaccatctgcgcgaatgccagcgtatcgatgcctcccacgcgtctgacgcccgcaaagagcagctcaagagcatgcgcgccaaggaaagctacgcacgccattacgccctgacgtacaacacccccgacctcatgcccgcctgggcggccatggaggaaatcaccctgggcgatctctcgcacctgttcaagggtctggcccgcgacgccgacaaaaaggccatcgccaaacgcctgaagctaccggcccctctgctgcaatcctggctgcacaccctgaccaccattcgtaatatctgtgctcaccacgcacgcctgtggaaccgcgagctgggcatccgccctgaactacccaggacggtcaatttcccctggccgcaacacctgcaacaacccggacaacatgcccgcctgttcaccgtgctgtgcatcctcaacctgctgatgcgccaggttagcccgcataccagttgggacaggcgtctgcacgacttactggcagaatttccagaaaccaacctacgggccatgggctttccgcccgactggcagaacgaccctttctggcaaacacccgactaa

SEQ ID NO: 341950 - DNA, 1545 bp, Pseudomonas aeruginosa
atgaccaactccgatatcgtccagaagctctggaacctctgcgacgtgctgcgcgacgacggcatcaactacagcgactacgtcaccgaactggtcttgttgctgtttatcaaaatggaatacgagcaggtccagaacaacgacagcttcgcccacaagctgcccgagggggcacgctggcccgatctggccggcaaatccggtcttaacctgctcgaccactaccggcagatgctgctggatctgggcaagaacagcgacccgctgatcgccgccatctatgccgacgcgcaaacgcgcctgaaagaaccacgccacctggaacaactgatcaagagcctggacggcatcgactggttcagtgcccgccaggacggcctcggcgatctgtacgaaggcctgctggaaaagaacgccagcgaaaccaaatccggtgccggccagtacttcaccccgcgcccgctgatcgacagcatcatccgctgcatcaaaccgcagcccggcgaagtgattcaggacccggccgccggcaccgcaggctttctgattgccgccgatgcctatatcaagcagcacaccgacgacctttacgacctcgatgagaaagcccgcagcttccagcgcaacaaggccttcatcggtatcgaactggtacccggcacgcgccgcctggccctgatgaacaccctactgcacggcatggagggcgacgaggaaggcgtggtgcacctcggcaacgccctcggccaaaccggcgccaacctgcccaaggtcgaggtgattctctccaacccgcccttcggcaccgccaaaggcggcggtggcccgacccgcgacgacctcacctacaagaccagcaacaagcagctggcctttcttcagcacatctaccgtggtctcaaacccggtggccgcgccgccgtggtactgccggacaacgtgctgttcgaggccggcgtcggcaccgaggtacgccgcgacctgatggacaagtgcaacctgcacaccatcctgcgcctgcccaccggcatcttctacgcccagggcgtaaagaccaatgtgctgtttttccagaaaggtacgcaggccaacccgcgtcaggaacagggctgcacccagcgcgtctgggtctatgacctgcgcagcaatatgcccagcttcggcaaacgcacccccttcggcgcgcagcatctgaagcccttcgaggaggcctatggcgatgaacccaacggacatagcccacgcgccgagaacgtcgagggaatcggcgaaaccagccgcttccgcgtctttacccgcgagcagatccgcgaacgcggcgactcgctggatatcagctggctaaaggatgaaagcagcctcgatgccgccgacctgcctgccccggaagtgctggccggcgaggccatggccgaactgaccgaagcgctgcatgagctggaagagctgatgaaagcgctcggcgctggggatgaagtggcggcgcagaagcagttgatggcggaggtgatggggttggcggtggttgaggggaacggggaatga

SEQ ID NO: 341951 - DNA, 1494 bp, Pseudomonas aeruginosa
atgagtgacgagctacccgttggctggtccgcctgcacgcttggcgatattgtcgaaagcatcgagaccggcaagagcgttaagtgcgatgaacgcccgccacagggagaggaaaacgggctggtgaaaatcagtgcggtcacttgggggacgttcaacgagcaggagagcaagacgctgttcgactcttcccacctaaagccggaagaaaagattcagttaggcgacttcctgatttcaagagccaacacccttgagctggttggttcctgcgtactagttaaacagctatcgaagaatctctatctcagcgacaaggtactacgactcgttcttgccgatgagagcaaaccctggctcctgacttgcctgcgcacaaaaaatggcagaaagcagattgaaagtttggcaacgggcaatcagttgtcgatgcgtaatatctcccagcaggcactgaaggaaatccgtataccgctgcccccgctcgccgaacaaacccgcatcgccgccaagctcgatgaactgctggcccaggcagacaccctcaaagctcgcatcgacggcatcccagcgctgctcaaacgcttccgccaatccgtcctcgccgccgccgtttccgggcggttgacggaagagtggcggaaaactcaaacctcggccggaactggtgccgatgtcattaggaatgaccaattagcaaaggcagcacttcttgaacgccaacctgagctcaagaagaaaaaatcgtccatagagtcggatatcgacgagaactatttattccccatccctgaaagctggtcgttcacaacttggggcaaactttccgagtggattacttacggattcactcgaccgatgcccaaatcagaaaccggagtaaagcttcttacggctaaagacgttcaacgctttgaacttgagcttatgagctgcgggctgactacaacggaagcttttgtaggcctttcggataaagacaaacctgttaaaggtgatctgctaatcaccaaagatggaagcattggccgcgcagctctcgtacacacgaatgaagagttctgtattaatcagagcgttgcggtctgctggcttaggtccacaacgatgaacaagcgttacctcgaactactctcgaatggcgacttcacacaaggttttgtgaaggacaaagcacagggaatggccatccaacatctatcgatcatcgatttcgccaagtgccctgtcccagtgccttccagcattgaacaagatgagatagtccgccgtgtcgaacaacttttcgcctttgccgagcaacttgaacgcaaagtgaaaagtgccaaaagccgtattgaccacctcacccaaagcatccttgccaaagcattcagaggcgaactggtgccacaagacccgaacgacgaaccggccagcgtgctgctggagcgcatccaaacccaacgcgccaccgcgcccaaggccaagcgcggcagaaaggcttcggcgtga

SEQ ID NO: 341952 - DNA, 1287 bp, Pseudomonas aeruginosa
atggtcgatatcacctatcgattccatccggtgggccagggactattcgcatctgggcgcatcatccataactatcgattacacaattggacgccccctgctttcagctgggtctacgactgcgggacaagcagctccatcagtaagctcctcattcctgagctcaaccagttcgggggggaatcgatgttaatgggcaacggcgttgatctcgtcacgctttctcactttgacagcgaccacattaatgggcttaccgagttactcgagcgagtttcagttcgaactctcctcttgccactgatccctttatggaagcggcttgagctggcctttatggatagtgttcgtctggacagcgacaccatgggcttctacctgaatccagttgcctacctgattaaacgctttcctgaacgaattcagaccatagtgctggtgcccgcaagttccccaccgcctgaggagttttacgaggagatcaacgaacctaagccttgggtggaagccgggcgaagctatgtcgccaccgagtccaagctagagccagaaattgccgaagaacttaaagagctttcccaaaatcagatccgcaccattcagcagttagcacccgcaggcacgattcaggtttctcagttttgggagttcatgccctataacgatctagatctttgccccccactgcccaagtgcttggttgcccatgtaagggggcttcgtgacctattgctttgtagcgctatttccaaacgccagagatctgagctgttaaaggaaatcaaaattcactatgagctgcacactggcagctctgcccatgcacgcaaccgtatttcactctttctctatgcaggtcctattggacgagtcaccgtatctaaaacaattggctctaccttcatgagaccgggcggcgtggagacaaaagccaatatcaacctgccgtttagccctacggcacagcagcgactgtcggtgctttacaccggcgacggatacctcagcgatcaacgcagtgttgatgctctatttgcctatttaggatcttcacgaattgccagcctagcctgcttgcaagtgccacatcacggagccaaatctaactggacagcagggcatgccgcgcagtttgatcctcatgtggcagtattctgcagcgacccaacccggaagaaccttagacacccacacagcgaagtggtgaacgactttagtagttactcaaccgtatccgtcgataagaaaagaggggccgttatcgagggaaccctagcccttcactga

SEQ ID NO: 341953 - DNA, 927 bp, Pseudomonas aeruginosa
atgtccgtaccgacctacgaccagtttatcgaacccgtcctgcgctttcttgcggctcgcccgaacggtgcgacagcagcggaaacccaggaaggcgcggccctcgcccttgatctgaacagcgctcagcgcgaggaaaccatcgccagcggtcaagccacatacaagaaccgcgccggttgggcacatgatcgacttaagcgcgccggctactccagcagcgccaagcgcggctattggaagctgaccgaggcgggtttcgccttcgcccaaagccaccccgccccgctcagcgccgagcaggtcgagtatctggcggtgaatttcatgagcgtgaagctgaagtccgcccccgatgccgcctcgttggacgagaccgacgacacgccgacgccagccaatcttgccaccagtagcccgcaagaacgcctcgaacaggcaatttatgagctgcgggccagtgtcgccggcgacctgctggacaacctgctgcaagccagcccgacccgtttcgaacatatcgtgctcgatgtgctgcatcgcctgggctacggcgccaaccgtcaggccctgcagcaggtcggcggcagcggcgatggcggtatcgacggggtgatctcgctggatgccctgggcctagaaaaggtctatgtgcaagccaaacgctggcaaagcacggtcggccgcccagacctgcaagccttctacggcgccctggccggccagaaagccaagcgcggcgtattcataaccacctccggcttcaccgtccaggcggtcgacttcgcccgctcggtcgaagggctggtgctggtcgacggcaaacgcctggtcaacctgatgctggatcacgaggttggcgtcagttcgcagctctacaaggtgccgagactcgacagcgattacttcgacgaatcactcggatag

SEQ ID NO: 341954 - DNA, 1641 bp, Pseudomonas aeruginosa
atgcatggcatcaagggggtatccatgacgaagacgtcgaccctgacgctcgatggcgtctctttccagctgccggacggcagccttctgttttccgatctcgacgaaaccttcgacacccggcacaccgggctggtgggacgcaacggcgtaggcaagtcgctgctcgcgcgcctgctcgccggacacttgcagccgtccagcggcagcgtccggcgccaggggcgcgtgcgctacctggcgcagcagctcgaaccggccgactacccgaccgtcgccgatctggccggcgtccgcccatggctggaggcgctggcgcggatcgaggcgggtagcctcgacgccgccgactacgaatgcctgggcgagcgctgggacatccgccaacgcctggccgacgccctggccgccgaggggctcggccatctccgcgcggacaccccgagcgaacgcctgagcggcggcgaatgcatgcgcgtagcgctgctcggcgcattcctcgacgacgccgactttctcatcctcgacgaaccgagcaaccctctcgacgggccggcacgcgctttgctgcgggcgcggctggcggcatgggacggcggcctgctgctggtcagccatgaccgcgaactgctggagggcatgcagcggatcgtcgagctgtcgaccctcggcctgcgcagctatggcggtggctattccttctacgcgcagagccgggaggaggcgcgcgaggccgccgaacgtcgcctggaccagcgtcgtctggagcgcaagcggcagaccctggccatgcgcgaacagcagcagcgccaggagcggcgccaggccagcggccggcgcgaaggcaagacggcgaaccaggcgaagatcctgctcggtgggttcagggaacgtagcgaggtcagcgccggcaagctgcgcaacgcccaccaggcggagcgcgagcgtctcgaccgcgaggtgcgcgaggctgcccgggaggtcgaggaggcgtcgccgctgctgctcgattcgcccgatgccgaactggcggcacagcgccggatcgtcgagttgaagggcgcggtcctgccgcatctgcgcgggccgttgcgcgaaatcgacctgctcctgagcggtccgcgacggctggcactggtcggcccgaacggcagcggcaagtcgaccctgctgcggctgctggccgggcaacgggcgccgctggcggggacctgcgcggtgacggtgggcgccgcctatctcgaccagcggctgagcgtgctggaccacgggcgaggcgtgctggagcagttgctggaggtcaatcgcagtcgcggcgaaagctggctgcgcacgcgcctggtgcaactcggtttgccggctgaacggctcgcccagccgtgcgcgacgctgagcggaggcgaacgcctgaaggcggccctggccctggtgctctacgccgaccggccggcgcagctgctactgctcgacgaaccggacaaccacctcgacctggctgcgcggcaggccctggaaagcatgctcgggcaataccgtggggccttgctggtggtgtcccacgacccggtgtttctccgccacctggcgctggacggcgaactgcgggctactgccgcgggttggcgcctggaggaccgatga

SEQ ID NO: 341955 - DNA, 2049 bp, Pseudomonas aeruginosa
atgactaccctccgcctcgactgggaaacagccagcgagatcgatttaccaaaatacggactcgacgtttactcagcgcacccttcgacacggatcctcatgggtgcgtaccagtttgatagtggtcgcgttcagcattgggacaccgccgacacggatcgcatgcccgccgagttgcgcgaggccttggaagatccccacgtcatcaaaaaggctttcaatgcgcagttcgaacgcgtcatcgctcggcgcgtagcagggttgaaagtcccttaccagaactggcgttgcaccatggccctcgcataccagcattcgtttgtcggcaccttgggcgacattggccaacaaatggggttgccggatgagatgctcaagtcgaaagagggagacaggctcatccaactgttctccaaaccccagcgcataaccaagaaccagccgcaccgatggcgcgactcattcaccgacccggacgagtgggaacgatttggagcttacaacgtccaggacgtcgtatctgaagggttcatggaggaggtgctgtcacgctacgaaatgcttgcctccgaatggcagctctacgagctggaccagcgcatcaacgacagaggccttccagtcgacatggagtatgtggagagcgcaatccacatggctgcgaggcggaaagccgagttgttagaggaaatggcggaactgactgggctcgccaaccccaactcgacctctcaactcctaccgtggctgcaggataggggctatcccttctctgacctggtcaaggacacggtgaaaaaggtactgcgcgaggacaaacaggcacgagacgacgaggcagaaggtttcttggacgacgatgcagtcaagtgcttgaggctgcggttgaatgcgagtcgtacaagtacctcgaagtacacagccttgaaggtagctgtgggccgaaagagccggatccggttttgctttcagtttggcggggccagtcggacgaaccgatggtcggggcgacggttccagcctcagaaccttactcgtacccccaaggatattgagcccaacggcggcgatcactatcaacttgcgtttacgaccgaactgattcgccgcggggattatgacgggctatcgatgatgatcggtgagccaatggacgccctcgctggttgcatcaggtctgctattcgcgcgcctcgcggatacgaactacgcgtttgcgatctttcgtctatcgaaacctgcgtgattgcgtggctggctggctgcgtgcgcctcctcaatgtgatccgtggagggaaagacccgtacaaggacttcgggaccgtccttttccgcaaaccctacgaagaggtgacgaagaaggagcgaggggacagtaaacctgccgttcttggctccggctatcgattgggtgggggagacctcaaggaaggtaagcgcacagggctatggggttatgccgagaatatgggcgtcgacatgagtcgtgaaatggcgcaccaggctaccaagctattccgagacacctatcacgaaatccccaaactttggtttgcgctggagagagcggttgagcgctgtttgaagacatcacaggaacaggtatgcggcccacttcggtttatccataggcctccgtacttgttggtacgactgccgtcggggcgtttcatgcactacttcaagcccaagatcgttatgcgtacgccaccgtggggcggcgaaaagaaaaagaacttcagctacatggcccaaccgcaaggcaagaaaacctgggtgcgcatcacaagccatggcggaaagctggtggagaacttcgtccaggcaatcgctcgcgacatcctcaaagagggtttgctggcggcgcatgccgctggtttcaacatcgtggggcatgtgcatgacgagataatcactctgcagcctgtcgatgaccaagagcacaccctggacgccttgaaaacctgcatgacccgaaaattggactggtgccctgatctgccactcggagccgccggttggtgtggacctttttacatgaaggattga

SEQ ID NO: 341956 - DNA, 228 bp, Pseudomonas aeruginosa
atgactcacaaaccgctcgtccacgaagccgttgccggcgaaacctggctggtcagcatcggcggagatcctcgattggtccgcaggacagtgatcgagatcggcccgaagatggtcgtactggggcggagaagtaacaaacacgccttcacctacagccgcgagcgctacctgtcggagggcgtgcgtttcgtccagcaggtctgcgtgagaacgaaaggcgcctga

SEQ ID NO: 341957 - DNA, 1617 bp, Pseudomonas aeruginosa
atgactgcactcgctgaaatcgatacgacgaacctactgactgtcctcggtgtcctcgccgcggtaggggctctcatctcacccaccagcaagctgcaactccgcttttgcttgacaaggctggattgggctcttggaatcgcaatccttctgttgatccactatctggtgtttgcgccagttctagtagagcttggtatctactacagctttggcccgtggcgttggggactcagtagctcaagtgcggtttatcttcttctattggtaggcgctgtgtacttcatctggaggacacgctcgcctgccctggtaccgagcaagctgcagattttccgtgaactcgtagaaaactttgcattcaccaagcgctacgttgaactggtttcccacgtcgagcctcacctacctaagctgatccgtatgacccaagaggaaggccggctggttaactggatcgaccgtatcaaccatgtcccgttggatccgaagaaatttatcttgggcgaaaaggagccagaaccgagtgcatggcgtaggcgcctagctaacgcacttggactgctaaggctatgggctctgaggcaagaccgaccgaggactcaggcccgcgaggtcatacggaccttaattacgtcgcctgagctgactcgctacgtcgcagtctctcatccgtactactgcattaagcttctggactccgacgatgcgctcatgtctgacttcatagatgaatgcgtggacgcgatgctcgatgcacctggtagtcgcctttatgtcgagctcaagaacaacaggaatttgaaacgtggatcgcggttggcgctgcccgacgaaaatcgactgctgcggtatttctttgccaacgcagcaaaagcagctcgcagtggcgtggaccatgccataggggaatcgctacttcgccggctaaatgaagacagcaggctggctgccaagcttaacgagccgctgaactcctacgccgaccaagggaagtttcgctgcccgatcaactccggcatcaccatgttcgagatcatggtccatgagggactccatcagggggttcaggaccacatgtggctgcactacttcagtcatttcgctcgggctatcaccaaacagatggcaccacccaaccctgatctagagtatctggagtggccgaccccactccattacttgctcagccgcttggtgagcattgccctggactgggtcacgcagcccaggcatgtcgatggttcagaatttcccaaggactcggaatctggatcaggtttcgatcgtctctacatttccaaagaggcttcaaagtgcctgggagagatgcttcaagtgataatgttatgtaccaacatatcggacaaattcaagcactaccttttcgagcaagtcatccgagaccacaacaagctccaagccgactctgacttggcggagttagcaaaggtgcttcgcgtcgctgtgatttttggaaaggactggccaaccagccctgagtacagaactgagatttcggcccagtaccagcaactcgattaccacgttaaggagaaggcggccttgtttgggcaggatctgcagtacgcatatgccgagagtttaaaagtctaa

SEQ ID NO: 341958 - DNA, 348 bp, Pseudomonas aeruginosa
atgttcaaccaccgaccgctaaccatcagggacgttacccatgcgctagaagaactgcgcgacgtccagcgcccctatggcgacaacgaaggagatgcgattaaccatcctgacgtatacgccgagctgcccacgcaaacgcaacaggccgttgatcgcgcttggagctacgtacgcgattactgctgccatcctgatggtgaggtcaactcgcgctcggtgaccttgcttaagaagcgtggttaccaaatctccctcgggccttaccagtacgacccgatgctgatggccggcaaggtcacggttggcgactgggatctcgacttgagtgacgagtgtactgactga

SEQ ID NO: 341959 - DNA, 1830 bp, Pseudomonas aeruginosa
atgacggacgcggttaaccaaggcttggcaaggatcccgacctacgcagaagtgctggacgcactggcgagtggtttcggcctgattgaggcaaaagaccaaaaactgttattccagcgctcgtggcaaggaagacaggctcgctttgggcctaatacgaacaagccgtggagaggcgctaaccaaggtcgaatcggtgagctactaatgctgttgtctggtgatgccccagatattgccgacgagcttgctagcttcctcgacaatgcagagactcttttatctttcatgcgagctaagggcgtcttcactaggaagacatatcgatctggtttggcggcgttcttgggaataattgtttttcctcagctggcgttatttttatgccatatccgcgcacgtcttccagagtcatcgcccctacactatttatttgacctgcttcctgatattgatgtggaggcatatgattgcgcaaaaaatacccgccgtgcagtcagggagcagcttgaaaagatcgttggagtaagtgtcgcggattttaaaaggtcgatcagcaaaataacggaaaaatcagatataaaattaaaaaccatagaagatcaaatgaattgccttaagtttgaactagaaacgcttggcgatcatcaggggtgtaatgaaaaagtaaaagccattagagcggcatatattgctggagtcgctgttcaaaggtttataggcaagctttctggtggcgctccgagcattgcttctgtaaggtttttcggaaacataaagtactggatgaatgtgttctcaaaagaagatgagggggcggttgaagatggcttcgccaaggctcatagaatcttaagtcttgacttggctggaatccacgatcgcttctcagaagactgtctcgatgcatcgattgaagaggtattgggtgtgttttgtaggcacttggatgctaggtctatcgaggagtgcccgtctatccttgatgcatataaaatgctacttagcgctgaccctgatactgtttcaatcagggagtcactcaatcttcttgagcagcatgaagattcctatattttcaagcccgttcacaactttataaatgcacgactccagatgattgagggagatgagatgggcgcgctagcccgcttctgggacgttgtaaatcatagtgaaatgcagcaggtgggtgagattgcagagattgctgcgagctacgcaatatccttggaaatcaagaaggctggaagatgggtgaatggctgcctcgacccgttaatagtttgcatagcccagaacaaacggcaaaccatatggattgagacgcaaatgccaactccgtttgggtcattgtgtgacgctccgaagataacagagtcagagaggctgatttttgatgccgtgtcaatggttaacaatatagcaatcggtagtggatctgattttgctactgagctttgcaatccttttgagaaactcgataaatatctttcaagggctattggtgaattcagggtcattcataataatggagggagtgaggagatggcgatggaggaggctataagcttagtcttcaataggcgagtcaagtcacagtcaatttttcgagtgccccatgcgaggccttatgatgctgttagggatatttttttctatacccagaatttttttggcgaaatggggttggagattcatatggatctcaatccagggataattgagtatatatctctctcggcagatctccagttggtcatcctgagggcgctagatgaagaaagattttgtgaggactatgaacggaatgggggtggaggggtgtag

SEQ ID NO: 341960 - DNA, 1050 bp, Pseudomonas aeruginosa
atgctgccaataatggcgatgcacctctgcatgctgatggcgaccacgttgttctacggtatttccgtcgcaatgttcagccactgccgtcgcaggatcagtcgagctgcgctgtggctgcttcttccgcttgtaagtggtttcagcgcttttactgttttgctgttctacttttctgaccacttggaggcgttacttgcgattcccctgatcgctctggctaccgtactgggactcgtggtaattctgtttttccggcgctttcgaatattggttgcgctgagcacatcccgttctatcaagaacgaccggattttctttttgttttgcctcgcgggcatgctcatctgcacagtcatctctgcattcttctccacttccctgattctcggcacctatgtgggagaagactcggagaaggcagtcagttttgtggctgcgttcaccctgggcaccctgacactaagcctggttcccacatttgtcttcttcactgctaaaggatccacataccgtcggctcgctttcggctgcgcgataactctggtcttgttcctggcatatttgctgctcgcgcgcggagccatgtccagcatcacctatgctgcggctggcaatctggatatccggcaagccttttccgcccggtttgtcctgaatgaccgaatcagcctggcagaccttgataacgtgcagtggaaaactcgcctcgcaccagccaatagggtcgaggtggaggcgttccagctatttgcctttggcgacatactgctcttgtgccccagcagtttgcgacgagcgaccctttatgagctaccccgctatagccgccaatgcctcctcacgcgcagcagcaaggttgatcgcaagcccccccggcttcggtatccagcccaggccaaggtgcagctatcctggcaggcgcaggcagagcgcctcgtagactgggacctgctgcgtggcctgctagtgccggctagcacagagggctccaagagcctgcctccagggcatgcccacgatgccggacgacgtgccacctcgcattga

SEQ ID NO: 341961 - DNA, 888 bp, Pseudomonas aeruginosa
atgcatccatttgtcgttggacaggaatatgagcgcccccgccttcttgacttcattggtagccgccaaatgcaatcaggtgtcctatggggaagcaaggagccaggctgcctagtttgcacgtccggcgggaaggggggcaaaagggcgggatactcggatgaactgctaaccgatggaagctggtggtactttgggcaagggttggtcggggaccagtcactgtcgaacgcagccaatgcaaagctttcatcagggaagatgtcggtgttgttcttcacgacacgggagcccacggcacgagaggtcgcagcccgaggcggatacggaaagctgtttgcatttcgtggggacttcaatgtcgttggtttcgaaccgttcgtaccgagcgatggcaatcgaaaaggggacaggctatggcggttccgcttggctccggtaggggatagtggcgaccactggagggggagcgagaatactaatgcggaaagccaaggcgacctgcaggagctgcaacgaagcttatacatggaatccttcggatctggaggtggtattagcttgcaggaatatcgtcgtcgtagtgccgcggtacatctctacgcgacgctccgagccgaaggccgatgcgagggctgtggcctgcatgctccgttctctcgccctgatggccgtgcctttttggaagtccatcacatgactcggctcgccgacgatggccctgacctgcctgccaacgttgcggctctttgcccgaactgccatcgccgtgcccattattccattgaccggatggagtttggttgcgctcttcgagagcatgttgctcttctagaggagcgaatcgcttcagggcaaaggacttggtccgatggaataagcaagtaa

SEQ ID NO: 341962 - DNA, 243 bp, Pseudomonas aeruginosa
atgcagcccaagagaacggtaagcaagcgccccaaggctgagctgaatagaaagcctgatgcgttttccgccatttctgaagccgctgtcaatgcatccgactgctgcttggcggcaatatgccatgaccgcctcggcttgaagctcaacaacgcggccaaccccttaggacgccgctttgctggcgcgccaccgcataaggacaatctcgccccatacaagggatcgcctaaccgcacatga

SEQ ID NO: 341963 - DNA, 1944 bp, Pseudomonas aeruginosa
atgaccgaagagttaatacttaggaaacaagagattcaggaaaaagtcagccagaagctaattgaggatatcgtcaataagcttaagaagggcgaggtttctgaggctacgctttcaacggatgagaaagttttagcgagggtgacggatggtatatatcgtcagccggcttcggctattcgcgagctgatatcaaacgcctatgatgctgatgctgataatgtttggatagacacggatgcgcctcgatttgaaaatatgactatcagggatgatggcaatggtatgtcgattgaggtccttactaatctgattcatcatatcggggggagcgctaagcgtagtggcgatgagaaaaaggctttgttgggtgtaactgataagtcagattccacgttaagcccaaataagaagcgccggttgattggtaaaattggtattggtttgtttagtgttgctcagctgaccaggcatttttctattgttactaaacgggcaggtgttgattattaccttatagctgatgtggtgctaaataattactcggagcaggttgttgctagtcaggaaaagcgtggtgagggttttgataccggctttgtaaagattagaactgaaaagactgaaaatttagcggcgcacggcacggatattatattaaaaaacatcaagaagagtgctagagatcagttaaaaagtgttgatatctggttgcaggaatctgcagagttgagcccggggcaagaattaaaggcatcgcggcagtttcacattggatgtaccgatcaagaagataaagaattggtcagggtccctccatcgctgccgtggaatgaaagtgattcgggggaccgaagatttttaatgctgtataatgcgatgatcaatcgctctgcgcagaccataagtcctaaactagaaagcgatctggataattatctcggaatgctttggactctcggtctctcagttccagtcgactatattgacaagcacccctttatgttgactggggcagagtatcctaaagtatatcgactaaataacgaccctaaaagcaaagcagaggagatttctctgtcttcgggtgagacggtcaaggactattttaagttagagaccagcaccagtagtactggatttaatgtatacatagatggaatcaagctgtatcgcccggtaaagtttacagggctaccctccacgggggctgttgtaaaggacccaattctctttgttggagcggcggcgcctgatgtttcaaagtatagcgctagtttgactgggggggatctggcgttcgaggcatatatactatggtgtcccaagattattcccaaggaacataatggggttctgcttaggattaataacgctactggcatactttttgattccacctttatgcgttatcagattgctgaacatgtcatcaaggggcagctcacaatcgagatttttgtcagagaaggtttggattcggcgttaaatattgaccgagagtctttcaatattgcccatccgcattatcagatggtcatgcgttggttgcatgatgccatgcgtaaggttgtcgccaaatataaggaaatcaagagggctcgcagtcgagccgctaaggattacaaggtccaagcgtttacgcagtcagtcgatgaggtggtgggggctgttgcggagtttgttggcaaggagcgtgatgagattcggcaggtagaaatcacggctgaaggtaggcagggaatcgatgcctatcacattgattctgcagagttccagcagtgggtagggctcgtcaaggcaggaagtgagcaagaaaataacttccaagaaaaagtaaagtccgtggttcaggttctagacgcttttgatcttttggaaggactttctgagagcgagcaaaaggcgctatttgaagctatttctaagattattggtgcttag

SEQ ID NO: 341964 - DNA, 1203 bp, Pseudomonas aeruginosa
atgaagaacggatttgatgagtttgatcttgatctagaagacttcggcctgagtcaggaagaaatacctgctgatgtagttgcccctgaagagactgtggctgataacggatttttaccctggcataagccccgcaagcaatgggtaagagataaacaatggtggagccagatttcttcgcacatattgcctcatctgacgggaatcgatacggtccgatattttggtctgcctggggacgacatccttgatgtccgatatctacagcagaagctatctgatgctgggaagtctgtatttatgctagggctactaagcagtcctaaaagctgggagtccgcacagaaacagttgagcaaggctttagactcggcaggtatccacagagactcggcgattgagcagctgaactttgatcatctagatgatgctcgctctctggtttatagaaagatggaaagggtcgggtatttcgatgttgtgaatttggacttttgcgataatgtcattgctccacagctgaagtcgcgccggttgaccgctatcaaaaatctcttgggttatcagtttcaggtggttccaaggcgatggttgctatttctgacgactaggtcgtcgaaaaactcttcttgcctggaaacttttgaaatgcttgcggaatgtctggagcaaaatcttgaagttgaggatttttgggaagaatttcaggtaagattcgaatctgctcctctttccgatcgggctcttgatcgagaggctttagaggggcagcacttcataaatgcctatactgttggtatttttaaataccttgtgagggaggcggtagagaatggctataagataaaaatggatagtgtcgttcgctacagtatagagggtgaggatgctggtccagatatgatatctatgtgtttggtgtttacgaaggtgataaaagcgcctggtgttgtaagtgagccccctttgagtgagcctgtagctgcgttgcgtgggcttaagaaattgagtgaaatgcgatcggttgatgaaataatcatcgaggactcggaaaagtatgcagcctgcgtcaagcaaaaaatggggcttttagagaggtccggcagaaatgtggataattacatagaaagtgtttgtgcgtcagatattgccgctatgcacatcactgtagaagatctgaaaagcatgattcaggctctctaa

SEQ ID NO: 341965 - DNA, 1155 bp, Pseudomonas aeruginosa
atggcttacttgttctattgtttcttaactcttccgtttgcactgttcagtgtgtttttgagaagagattttcagtttctgctgtttttattttttgtggctatttgtgttttcgtgtttgggttttcttataaggttgggtcggattggtataactatttttcttattttgattctggttgtacgggttttgagtttgatgtcggttttgaatatctttgctctggcttcaactggttgggtattggatattggttttttagtttttccatcaaggctttctatatagttaccttggcttggtttctttggcggcttggcgtttttcccctgctggcattcttttcatgtattctggtttcttttgtttttctggataatatgcttcggcaacaggttgcctttggatttatccttgtttctgttgcttgtgtcagggatagaaagatccttgcttttgtttgtctatgcctggcttctagctttcatttttcggccgtatttttcattcctttctattttctgtacatcagtttctcttttcgcaacctgtttgcttttgtggctgtgctctccttctttatcggattgagcgggaatagcattgtagattatctggttaatttcttggctggagcagacggtggatatcttgggcgggcgttggcatatcttgaatttgacggatacccggtcacgcttggccactattttcgatttctgattttgttaatgttcgtgtttttagatctcgttatcagagggcgacaactgagcgaacaggactctagaatttggaggctcatatcttctggtgtgatccttatgctcttctatgaaatggtgttttatgagtttagtgttttctggatgagaatcagggagtattttctcgtcttctttatggtttcacccctctttttatttcgtgtcttcttctggcgtgaggcgcgaattttctcagctctctacgtcgtctatcctttggcagtgttctggggagtaatcactgggcttcctgtttacgacgatctttatagagattataggaattatattttctatctcgctgttggcgatgatgggttcgactctattcgagacttggctgcccaggactattgggatagatggcgccgaggcgagttgagatag

SEQ ID NO: 341966 - DNA, 948 bp, Pseudomonas aeruginosa
atgcacacctattatattcagtatacaacggattttcatctgatcgctgcgttgggagcggtgggggacctgagtgctggaaagatctatttaataggtcctcgaacgaaagttgttgatcgtgtacttggtatggagggggtgaatctagagtttcatcagacggaccccagatcaccctctatatcctggaagagggtcatcaaactcttgaagtgttctcggtcaaatgatgagagtactatcgtctctcccttcgtcttcccgttctatacctttcttatgcttctcgagaaaggcgagcgggtaggccggatcataagaactgatgaaggcgttggtagctatgcttccatgaggcactattatgtttcgttgcgatttgaaaggccgaacagtacgcgtctatactgcgccgctctggccttcctgaaaaaaagtgcagcttggagcgtctcttttctgagagtttgcacagagtcatatattttcaatcctgatctttccattaataaggctaaaacacaagccattcaggcagttgttgagaggcttggcagggcgaaagggttgaatggtcgtgtcatatatgtaagtcaaccgggtatttctcagtgtttcaatagtgctcagggctatgctgaatttctgagattgactggaaacgctcttggcgagatgcccgtggtcaagaggcatccggctgataattttgattattctatgcatgggtttgaggtagttgaaggcctgccgttggagacttatcagataaataccgctacggtttttggtttttcatctactgcacttcttatggcaaaaatcatcggtgggtgcgagcaagtgtattatataaattccggagctgctgctgcttactatatgggtttgtctgactttaataaaaggcttttcaagttcaatttgacggcgttgagtccctag

SEQ ID NO: 341967 - DNA, 1056 bp, Pseudomonas aeruginosa
atgacgtctagtattgttattgcaggtcgggaaattggttgcggatttcctccatatattattgcggaactttctgcgaatcataatggtaaaattgaaaatgcgcttgatatagtgagcgcagcaaaagcgtcaggggctgatgcggtcaagctccaaacctataagcccgaaaccattactcttcggtctgatgccgaagaatttaaaatcacggaggggttgtggcgtggtaggactctctatgatctttatgaagaagcacatatgccttgggagtggcataagcccatatttgagcatgctgcacgactagggattaccatatttagttcaccgttcgactccactgccgtggatttgctcgaggatctaaatacacctgcctacaagattgcttcattcgaagccgttgatcttccacttattcgatatgccgcaagtacgggtaagccgatgatcatttcaacagggatggccaacgctgaagaaatagaggaagctatagtcgcagcccgtgatgctggttgtgcttcattggctatcctgcgctgcgtgagtggttatcccgcgccacctgaagattataatcttctcaccattccggatatgatacgccgtttcaacttggttaccgggctttccgaccatactatcgataacactacagcaattaccagcgttgccctaggggcgtctatcatcgaaaaacactttactctgaatagagatggtggcggtcccgatgattcattctctcttgagccggccgaactcgctgctctttgcagagatagcaagactgcatggtctgctttgggtaagattgactatggcaggaagtcaagtgagataggaaacgtcaagtttcgtcggtctctttattttgtcaaggatatgaggaagggacagctcatcactcaggattcgataaggagcgtcaggccaggtttcggtgtagcacctaaatatttggaatcgattgttggaagaacagtaagtgatgatgttcgatctggaacagctgtaagctgggatctgatttcagctgagtaa

SEQ ID NO: 341968 - DNA, 1104 bp, Pseudomonas aeruginosa
atgaaggtggctttccgggtagacgcatccttggatataggaaatggtcatgtcatgcgctgcctgacattggccagctatctgagggaactgggaggggagtctctattcatctgcagagatcatccaggaaacctaattagccttatcagtgacaaaggattttcggtcaatatcctccctgttgagccattcacacctacttccgaagatggatatgagagttggttaggtgctacacaagaacgggactccgaggtttgcaagaaaattctgagggagttctctcctgattggcttgtcgtggaccattatgggttggatgctcgctgggaaatttctgtaaaacccttcttcaaatacttatttgttattgatgatcttgccaacaggcctcatgtttgtgatgtgttgcttgatcagaatctagggcgaaaggtctgcgactatttgggactagtccctacggggtgtaggttgctggtcggtgttcgatatgccttgcttcgtccggagtttcctaaactaagagatttcagccttcagcgccgtaggcaaccgtgtgtaaataagctgttggtgacgatgggtggggttgatcaaccgaatgcaaccggattggttcttcatgcgctactaggcagttctctgcctgaagattgccaagttagcgtcataatgggcgccaatgctccatggttggaaaaggtaaagctagaagctgcccgtcttccatggcaggttgaggtatctgtcaatgtcgacgacatggcacaacgtatggctagtagcgatttgatcattggtgcggccggaagtacctcctgggagcgctgttgcctgggggtcccttccatattggtggttctggcggaaaaccaacggatcgccgcgagcgcgcttcgagattgtggagcggtaaagctccttgatatcaaaaatgattttgaagaaaacttgaggatggaactacgtactctcttgacggatctggagtcgctcaaggggctgtctgcaggctccgctgcggtaacagacggtggtgggggagagttgatagctgaactcatgaaaatgtactcacatgctggaggagtcgcatga

SEQ ID NO: 341969 - DNA, 708 bp, Pseudomonas aeruginosa
atgaaaatcgccatcatcccggctcgtggaggtagtaagaggatcccgcgaaagaatataagggatttttgcgggaaaccaatgattgcttggtccatcgaggcggccattgagagtggctgctttgacaaggtaatggtttccactgacgatgctgagatagctgctgttgcgcgtaaatatggggctgatgtacccttcatgcgaccggtagagttagctgatgatcatgcaggaacattgcctgtgattcgtcaagctattgagggctatctggagaaaggtgtcttcgctgagcaggtatgctgtatatacgctaccgctccttttgtacgtcctgaagacctgtatcaaggctgtacccggcttgaggagtcaggcgcggcatatgctttctcggttactacattcgcctttcccattcagcgtgcaatacgcttgaaagaggatggtcgtgtagaaatgttccagcctgcttatatggcgtctcgatctcaagatctggaggaggcctatcatgatgctgggcagttttactgggggaggagcgaggcatggctgaaggaaatccctatctttgccggaaacgccgttcccattctccttcctcgtcatagggtccaagacatcgatactcctgaagattgggtaagggcagagtggttattcaaggccctgctctctgaggcggatgtatcttcatcatga

SEQ ID NO: 341970 - DNA, 1161 bp, Pseudomonas aeruginosa
atgattccttatggccggcaggagattacccaggcggatatcgacgcggtagtcgaggttcttaaatctgatttccttactcagggtcctatggttccccgttttgaacagaccgttgcggaacacgtaggggcgcgacacgctattgcggtgaatagcgcgacttctgctttgcatattgcttgtctagctttgggcctgggtgttggggattggttatggacgtcgccggtcacctttgtggcatcggccaattgcggcctttattgtggggcaaaagttgattttgtcgacatcgatccggcaacttataatatctgcccaaaggctctttctgaaaagcttgaagttgcaaggaaagatgggtgtgtgccgaaagtcttggttgttgtccatctctgcgggcaaccatgtgatatgaaggccatccgtgacttggcagaccaatatggcttcaagatcatcgaggatgcttcccatgccattggtgggcgctatctaggagagtatattggcaactgccgctatagcgatataaccatattcagttttcatcctgtgaaaattattacaaccgcagaaggcgggatggctttgaccaatgatgatggtttggccagtcgcatggttttgttgcgtagtcatggcattacacgtgtacccgaacagatgactcattcccctgacggcccttggtattatcagcaagtggacctgggcttcaactatcgcatgacggagttgcaagcggcgttaggtttaagtcagatgtctcgtttgaatgagtatgtcgagcgtcgccataaattggctcaacgttataacgaaaaattgtccaatttgccgctgaatacaccttggcaggatccgagcagctactctggattacatctctatgtcatacgtctcaagctaagcgagatagagaaaactcaccttgaagtgttcgagtctttgaggaagcagggtgtcggggtgaatttgcattacattcctgtacatactcagcctttttatgagcgcatggggttttctgttggagattttccggaagctgaagcttactatcgcgaagcgattagtttgcctatgtaccataccttgtctctggagcagcaggataaggttgtagaagccttggaacaggcgcttcttaaatga

SEQ ID NO: 341971 - DNA, 492 bp, Pseudomonas aeruginosa
atgggctctcgcggctctgtgattcccttctttatgtcgatcaaggacaagggcgtcttgcctatcactgatgagcggatgacccggttcatgatttctttggaggagggcgtcgagttagtgtggcatgcctttgaggacatggaaggtggtgagatctatgtcaagaaaattccttcgatgaaagtgactgacctcgctcgtgtggtcgctccggatgcaaagctggaggtagtgggaatccgtccgggtgagaagctgcatgagcagatgattagtgcggaagatgcttactacacgtatgagtatcctgagcacttcaagattcttccatctataaataactgggctacgtgcgaaaagcgtataaagaatggcataaaggttccggaaggtttcgtttacgcgagtgacaataatacagaatggatgagtgatgaaatgctgcaggattggatcgaacagaatcgcgaaaagatcgggagcatttga

SEQ ID NO: 341972 - DNA, 1251 bp, Pseudomonas aeruginosa
atgatccttgctcgcctttcgcgtctgctgaatgtggggttgagggctgtaacccttatctcgaagttcgctcttttgtttttccttgctcgttacctcacgcctacggagctcgggctgtatggacttttagtggcagtcgtcgcgtatgctttgtattttgtcggcttcgatttttatgcatatagcacgcgtgaaatgctgaagtcgccagaggcaaagcgtgggcgtatgttaagagatcagctggttttgacggctattctctatctgattttcattccatgtcttttgtcgattttcatttttaaccttctaccgtggtcctttgtctggtggtttctggcgttgctggtgctggaacattggaatcaagaggttatgcgattgttgattgccttgtctgcgccaactcttgccggatggacattgttcttccggtcagcggcttgggcattgattgtagtttttgtcatggctttcgatccgtcgctaaggaaccttcactttgttttgttaggctgggtcatgggtgacgctttagcgcttgttatctcattaagaagtttgcggcgcatgattcccttggattggcacatgccggtggactggttgtggatatggaaagggatcagggtggcactgcctctcttgatttcgactcttgcagtgcgtggccttcttaccttggatcgatactgggtgcagcaaatttccgggctggaggttcttggtgcttacgtattgttcatgggtatggctgctgccttgttggcttttctagacgcaggggtttttacattcatatatccggggatgattagtaggtttcagtgtggagaagcggattccttcaagaccttggggcgacgcctgggcctccagacaatagttgtatgcctggtatttagtggctttgctctatttcttgtcggtcccgtcatagcttggcttggcaaggatttctatgagctgcagctgcgaatgtttccttgggtcttggcagctatagtgctatatgcattgagtatgattgctcattatgcgctttatgcgcaggggcatgatcgccctataattttcagtcatattctcggtttcctggctttcttccctgttgttttctggggaggagagatcttgcagatactcaccgtacccgtagggttgtgtgtagcgttttcccttatactaatgtggaaactgatggcctattggcgcctgacgcctaggcagtatcggtttttttga

SEQ ID NO: 341973 - DNA, 1047 bp, Pseudomonas aeruginosa
gtgactgaaaatcgctattcccgccaagatgcagatggtgaaattgacttgctggcgttggtgcaagggctgtgggctggaaaatggatcatagtgggaactgcagccgtagtgacattgctagcagttgtatatgcagttttgaaggagccagtttatgaatccaaaattacgcttcttcctcctccgctaagtgccgtggcgggattcaatatcgggcgtacgcgttctgaagggttggccccttttaccgtttctgatgtctatagggttttcactcgcaacctggaggctgacgagaatcggcgtgctttctttcgcctgtattatcttcctactcttgatgaaagcgatcgcaaagggccgcaggatgggctttacagacgtttcaacgaaatatttaccatcaaagttcccgataagcagcagcctggctatacgctgatcattgaacgaaagaatccggcagaggccgctgactgggttcagaaatatgtgcagatggtggcgaagcagtctatcgatgaaatgcttcagaatgcccgacgcgaactagacgtgaaagcaagaaacatgcgtcagcaggtagatattctcaaggagagtgccaaggaacgtcgtgcggaccgaattactcagctcaaggaagctctggccatcgccaaggctttgaatcttgttaagcctcctcttgtggagggacagtctgtcaagcagctctcttctatcatggatgggagtctgacctacatgcgcggtaccgaagcgatttccgcggaaataaaagcgttggagtctcgtgtttctgatgatccatttattcctcagttgagagggctggaggagcgatacaaactctatgagaacatgagcccggaagtgcagcgtatagctgtattccgacaagatggcgctgtggaaacacccgatgtacctgttaagccaaataaagtaatgattgtttttttgggtggcgtgctggggttcgtattggggatgatgattgctctctttttgcatgtactgaggaaaagtagggtcagttga

SEQ ID NO: 341974 - DNA, 555 bp, Pseudomonas aeruginosa; identical to SEQ ID NO: 322422

SEQ ID NO: 341975 - DNA, 732 bp, Pseudomonas aeruginosa
atggaacttgcccagataaagcacatccacaattacctcgtagaatacttccaagactcggatgaccctgtctctccacctggaataaaaaacgaagagcttctagcttcagcggtaatgcgtccattctccagtgcaggcggctctgatgcgtatgttggcgtatttaataaagccgccgcattattccactcactcataaacaaccattgctttcacaacgggaacaaaagggcagcattactagctacccttgtataccttggcgaagaaggttggtgggttaccgaaccttcagacgatgaaatgtttgagtttaccagaatggcggcagcacacgagctagcggaagaacgttctctagaagtctcaataatatctgaatggctaaaaaccagctctcgcagacgaagctctggtgaacaccctttaaagttacaccaattgaaggaaatactctccggattcggcttcgaaatggatgactgctctggccgtacaatcgatctgtacaaagatggaaactttgccctcagcattcttcaaaaaggaggaaaaggaaaagaagattacgacaaacaatacatcagcaagctaagaaaaaaattaaaactaacaacagcatatggagtagacagcttcaccttctatggtgaacgaggtttcgacagtacccttggaaaatttatgaagctacgccacaaagtaatgagagagctagccaaaatataa

SEQ ID NO: 341976 - DNA, 2481 bp, Pseudomonas aeruginosa
atgcaagagttaaccatcaaggaattggccaagacccgtttcaaagacatctacctggagcttctccgtggaagccagatgtcagatggggatatcgtgaagcttttggcgattgcagtcctgctactcaaccatcaggcgcccgagataaaacgccttggttatcgaatcacgctattctacggaaacctaactggccgatatgaaccgctttatgatgtagctgttaacagcggcctattaccggttactgctgtgattggtaagtcgttcgcacaagacgagcgactcagcaggtctttcattcaaaacattgtgagcagttacgtagacacattccgtgaccagggcatggtgctgacggagcagcaggatacgctgagagtcttcgtccaagatgagtacgagaactcttcggtcgttatcgccccgacctcctacggaaagtccgagctcatcatcaagtcagtaaaagacaacccctctaagcgcattcttattttggtgccatcaaaggcacttctagcgcagacaaagaagcgtttgatctacgcggacatcccaaagctgggtaaggtcgttacccatcctgaaatgttctcgcccgagcgaaataatcgggcttttgtccttacacaagagcgcctaaatcgcttacttaatgaatacagcaccctaaaattcgacatggtttttgtggacgaggctcacaaccttctccaaggcgatagtcgcaatgagctcttggccacaatgctatgcatcctgggggccaggaaccctaagacttcattcaagttcctgacccctttcctttgtaacgaactcaacgtccgagtgcgttacctggacatgacgcccaaaggcttcagggttgatgaatacattaaatccgagcgcttttacactcgggacttcagaactggcaaaaacgacggaaagctcaagctttacgaccatttcctcaaccaatggttagagatagatagaaagtacaagagcggcttcgatctcatcaagggcgagtcgctggccaaaaacattatctatggcaataccaaaaagaaaattgagcagttcgcactcgagctcgctgagacgctgcctaacatcgagtgcccattggttcaaacagcttgcgatgagcttgaagatgcgttcgacaaacgatatcgactgatttcgtgcctgcggaaaggggtgatgtaccaccacggctccatccccgacaccatccgactgtatctggaaaacctgttccaccaatccaaggccatgaagtatctggtttgcaactccactctgcttgaaggggtaaacctccctatcgaacggcttttcgtcttcgattattcgaaaggtcgagggaacctcacctcatcgcaatttaagaacctggttgggcgtgtgaataggttcagtgaggtgtttgcgcccgaagcaggaaccaccctcaaaaagcttgagtcgagcatctacttgctggggatggacggctacacgaacaaaaaatctaacctccagacattttacgagaaagcggtcaacgtctcgaaggttgatcaggacagtgttagtaacgttctccttgaagcgaccaccatattggagggcgaggtggctgaccgccatcgtgacgctgtatcaaggctggagaaccttcagccaggggtagtcactggtcaagaatgcaagtacgtgaagacggaggttggccggttattgatcgccaacagcgtaagcgagatcgatgtcttcacctctgaggaggagatagacgacgccatcagcatgtcggttgatgcgaacggcatgatcgacaacgccgaccgcctgctgctggagatcaagacctgcttcatcgacaagttcgatgacaagcgaaaatacagcgacctgaaacgcctccagaacaaagcgacgattgatttttacgccatgttcctagactggaagctcaaaaagtatagcgttaagcaaatcctgagatacacgcttaaatactggagcgagctccctgagaagaaaggtactgactatgtttacgtgtccaactggggcgatactaaatacggtgacagtcactatgcttactgggtcagaatttcaaccaaaaatgacgtagagaaagtcaacctcgctatcgtccgtctgaaagaagaagacgatttcttcgacaataagatttttaagttcgtagaagttctgaacggtgtaggtgctgttgatcccggcttctacaagcgcatcaagtatggcaccaccgacgatgcaaaaattaagctgatccgagagggctacagtcgcgggctggctgagctgttgctggatcgatacccacggtatgttcgcctcgacaacaatggcgaaatcgaagtcagctcaagggtcatcgggctcatgagggaaaatgaggagagcgatttgctcatctttgaagcccagatgaacctgaaatccactccagaatcagtggcgtaa

SEQ ID NO: 341977 - DNA, 921 bp, Pseudomonas aeruginosa
atgtcgccgtcggacctcaagcatattgagcatccgcggtggatcgatcccgccaagggcgaacccaccctgatgctgttcagcgtggtggatgaccgcagcggtgtggcctaccaggaataccactgcgtttatggtgaggatgcggagacggcacttcgttttctgttcaactcgatggcgccgaaagcggacccgagttttccctttcagggccggcccaagctgatctatctggacaacggtccggtggccaagcgtcgcgttttccagagcgtcatgcgggcgctgggcatcgagtggcagacacacatccctgccagcaaggatggaacgcgcaccacggcccgctcgaaaggcaaggtcgaacgtcctttccgcacagtgaaggaagcccacgagaccctgtaccacttccacaagccggaaaccgaagcccaggccaacgagtggctgttgcgctacctagtgcgcacctacaaccagcagacacatcgtgccgaacccctttcacggatcgaggactggatcacccatgtgccaacagaggggatccgtgaaatgtgctcatgggatcagttctgccgctttgctcgggagcccgagcggcgcaaagtcgggcctgatgcccgaatcaccaccgacggtaccgcgtacgagcttgagccagagatggccggcgactacgtcgtgctgctctgggggctgttcgacgatgagctgcatgccgagttcgatggcgagcggttcggtcctcactacccggtgtccggccccattccgcagcaccgctaccgggctttcaagcgcagcaaggcagacgagcgctcggctcgtatccgatctctcgcggaccagttggggctgccgatcgcggcgctttccggggaagatgtacgactagatgtgaagctccaatag

SEQ ID NO: 341978 - DNA, 1116 bp, Pseudomonas aeruginosa
gtgaacgccgaggtcatcgtggtcggcgccggcatcgtcggcagcgcctgcgcccatgaactggcgcgtcgcggcctcgacgtactggtgctggacagccgccgcggcggtgccaccgcggtgggcatggggcacctggtggcgatggacgacaacccggccgaactggccctcagcgactactcgatccaggcctggcgcacctgggcggcggatctgccggaagactgcgcgtaccgcaattgcggcaccctctggctggccgccgacgccgccgaactcgccgaagccgagcgcaagcgccaggccctgctggccgccggcgtcgcctgcgagatgctcgacgccgcgcgcctgcgtgacttggaaccggtcttgcggccaggcctcgccggcgccctgaaggtgccgggcgacggcatcctctacgcgcccaacgcggcgcgctggctgctcgaacgagccggcccgcgcctgcgtcgattgcacgccgaagtcagcgaagtggacggcagccgcctgcgcctggccgacggccgctggctgagcgccgaggcgctggtgctggccaacggcatccatgccggcgagctgtgcgcggagctgccgatccgcccgaagaaaggccacctgctgatcaccgaccgctatcccggcaccctccgccatcaactggtggaactcggctatgtcagcagcgcccacgccagcagcggtacctcggtagccttcaacgcccagccgcgccccaccgggcaggtcttcctcggctcctcgcggcagttcgacacgctcgacccgcaggtggaaggcccggtgctggcgcgcatgctgcggcgtgccctggactacctgccggggctcgccggcctcaatgcgatccgtgcctggaccggcttccgcgctgccactccggacggcctgccgctgcttggcgagcacccggcgcagccgggcctgtggctggcggtcggccacgagggcctgggcgtgaccaccgcgccgggcagcgcgcgcctgctcgccgcccagttgttcggcgaaacgccgccgctggatgccacgccttatctgccgcaacgcttcctctccagctccgggagtgcccggccatga

SEQ ID NO: 341979 - DNA, 1254 bp, Pseudomonas aeruginosa; identical to SEQ ID NO: 318929

SEQ ID NO: 341980 - DNA, 534 bp, Pseudomonas aeruginosa
atgattgactacatccgcgatggccaggcgatctatcgccagtcgttcgccaccatccgcgccgaagcgaacctcgccggcatcccggccgacctggaaaagctcgcggtcagggtgatccacgcctgcggcatggtcgacgtggtcgacgacctgcgcttctcgcccggcgccggcgccgccggccgcgcctgcaccctcaacgaagcggacgtgccggcgctcgccacggaactcggcaatacccgctcggcggtggccctggagcactggcgcgagcacctggagggcagcgtggtggtgatcggcaacgcgccgaccgcgctgttctacctgctggaaatgctcgacgccggcgcgccgaaaccggcgctgatcctgggcttcccggtcggcttcgtcggcgccgcggaatccaaggagatgctcgccgccgatagccgcggggtgccctacgtgatcgtccgcggtcgccgtggcggcagcgccatggccgccgcggcggtgaacgccctggccacggagcgcgaatga

SEQ ID NO: 341981 - DNA, 1311 bp, Pseudomonas aeruginosa
atgaccaatctgctgctttaccaacgcatcgcccagcagttggccgaggacattcgccgtggcgtctaccagccgggcgagcgggtaccgtcggtgcgcaagctcagtacccagttgaacgtcagccacgccaccgtgctgcaggcctacgccaccctcgaggaccagggactgatccgcgcccgtccgcaatccggcttctacgtccaccgcaccccggcgctgaccgcgccgaccccggatatcgcgcgggtcgagcgtcccggcctggtcacccgcagcagcatcatcaaccaggtcagctacatgttcagccccggtttcgagccgctgcggcggcaggtggcgatccgcatgcgcgacgccggcgtggtggtcgacccgtcgcaggtgaccatcacccacggctgcgtggatgcgatccacatggccctgcgggtgctgacccgtcccggcgacctgatcgccaccgagtcgccgagctactacggcctgctgcaactcgccgacgtgctgggcctgaaggtcatcgagatccccagcgacccgcgcaccgggatcagccttgaagcgctgcaactggcggccaaccagtggtcgatcaaggccttggtgctgaccgcgcggctgagcaatcccttcggcgggacgattcccgaggatcgccagaagcaactgctgaaactgaccgccgaacacaacatcggggtggtcgaggacgacatctacggcgaactgatgttcgaccagggccaggcgcgctcgctcaagtcccacgaccgcgacggccgggtgatctactgctcgagtttctccaagaccatctcgcccggcgtacgcatcggctggatcatcgccgagcgctaccaggaggagatccgtcgcttgcagaccttcaccacccattcggcctgcaccgtgacccagatgggcgtcgccgcctacctggagaacggcggctacgaccgccacctgcgctacatccgccaggagtaccggaagaacatgaccgcctaccagttggcggtgcagcagtacttcccggaaggtacgcagatgacccggcccaagggcggcttcatcctctgggtcagcctgccggccaaggtcaacaccaaggaactccacgtgcgggccctggagcagggcatcagcatcgccccggggctgatcttcagcaacaccgagcagttcaacaactgcctgcggctgacctgcgggattccctggaaccgcgaggcggagcgggcgatcatgaccctcggcatgcttgccgggcagctttgccaggaaggccttatcgccgcctga

SEQ ID NO: 341982 - DNA, 126 bp, Pseudomonas aeruginosa
atgctcttgctgctgcgcgaccacgccggcggcgagaacgcgcagatcagcctggcgaactgcagcccggaagtgcgcaagatcctcgccatctccaacttcgagcagttgttcaagatcagctga

SEQ ID NO: 341983 - DNA, 1305 bp, Pseudomonas aeruginosa
atgcaagcgctgtatatgctggctctgtcccccatcgctgaaacccgaggcgacccgaatagctacggtttcaggatcgaacgttccacggcggatgcgatggcgcagttgttcttgtgtctatccaaacgggcttcggcctgttgggtattggacgcagacatcgaagggttcttcgacaacatcaaccacgactggctgttaagaaatgccccaacggaaacacggatgctgcggcaatggttaaaggccggagtcatccacaaggggcaactacacgcaacggatgcaggtacgccgcaaggggggatcatctccccgacgctggcaaatctggcactggatggtctggaaacgctcctcaaggaatacttgggagtgacaagggcgaaaaagctgaaggtgaacgtggtgcgatacgcagacgacttcgtgatcacaggggcctctccggaggtgctggaaaatgaagtaaaaccctgggtacagcagttcctcgcaacacgcgggctacggttgtcactcaagaaaacgcgcatcgtccacatcgacgaaggctttgacttccttggctggaatttccggaagtacgatggaacgttactgatcaagccgaacaagaagaacgtcaaggcgttctacagcaagatcagagaggcaatcgactctcacaagacggtcaagcaggaggatctgatccgactgctcaacccgaaactgaggggctgggcgctgtaccatcaaccagtcgtcgcgaaacaggcttacagccgaatggaccacagagtgtttatcaaactctggcgttgggcgaagaggcgacaccctaacaagtccctcgactgggtaaggaagaaatatttccggacctcaggagacaggagctgggtgtttgccaccacagtagtagatgcagacggaggtaaaaggggggtcgagctgtactcgctcgcgagtactccgatcgagcgacacaaaaaggtgagtggggattacaacccctacgatcccgccatggaggctcaaggcgagaaactgcggatggaccggatgctgagcaagctcaaataccggaaacaaatcggcagcctctttgccagtcaaaatggactgtgtctgctgtgtaagcaaccgataaccagagagacagggtggcatgaccaccacgtcgtacaccgctccctcggcggtggagacgaactggccaatcgggtactcttacaccctaactgccacaaccaactgcatactcgtggcctgcacgtgaacaaaccggcttccatcggaagcttagtgaaggcttga

SEQ ID NO: 341984 - DNA, 1410 bp, Pseudomonas aeruginosa
atggatggtcaacatctgcaccagggcgagctgaagcgtggcctgaagaatcgccacatccagttgatcgcgctgggcggggcgatcggcaccgggctgttcctcggctcggcgggcgtcatcaagacggccggcccgtcgatgatcctcggttacgccattggcggcttcatcgccttcctgatcatgcgccagctcggcgagatgatcgtcgaggagccggtggccggctccttcagtcacttcgcacacaagtactggggcggattcgccggtttcctttccggctggaactactgggtgctgtacatcctggtgggcatgtcggagctgaccgcggtgggcaagtacatccagtattggtggccggacgtgccgacctgggcgacggcggcggcgttcttcgtgctgatcaacgcgatcaacctggccaacgtgaaagccttcggcgagaccgagttctggttcgcgatcatcaaggtagcggcgatcatcggcatgatcctgctcggtatctacctgctggtcggcggcggtggcggaccgcaagcctcggtgagcaacctgtgggaccgcggcggcttcttccccaacggtctcagcggcctggtgatgaccctggcgatcatcatgttctccttcggggggctggagctggtgggtatcaccgccgccgaggcgtccgagccgcggaaggtgatcccgaaggcgatcaaccaggtgatctaccggatcctgatcttctatatcggcgccctggcggtgctgctctcgctgtatccatgggaccagttggtggagaccatcaacgcttccggcgacgactacagcggcagcccgttcgtgcagatcttctcgttgatcggcagcggcaccgcggccaacatcctcaacttcgtagtactcaccgcggcattgtcggtctacaacagcggcgtctactgcaacagccggatgctctacggcctggccgcccagggtgacgcgccgaaggtgctgatgtcggtggaccgccggggcgtgccggtgctgtcgatcctggtctcggcgctgatcaccttcctctgcgtgatcgtcaactacgtattgccgcacaaggcgctggagctgctgatgtcgctggtggtggcggcgctggtgatcaactgggcgatgatcagcctgtcgcacctgaagttccgcgcggcgatgaagcgccagggcgtggacaccttcttcaaggcgctctggtcgccgttcagcaactacctgtgcctggccttcgtggtgttcatccttggcatcatgctgatgatccccgggatcaacatctcggtgtacgccattccattctggctgctgctgatgtggttgtgctaccgggtcaagctgtcgctggcggaaaggcgcgggctcggccagcaggcctga

SEQ ID NO: 341985 - DNA, 516 bp, Pseudomonas aeruginosa; identical to SEQ ID NO: 323421

SEQ ID NO: 341986 - DNA, 759 bp, Pseudomonas aeruginosa
  misc_feature (721)..(726): n is a, c, g, or t
  misc_feature (730)..(730): n is a, c, g, or t
atgaacgacctgagcgggcttctcggccgggtcggcgagcgcaaggacatcctgctggtggtgttgctgctggcggtggtgttcatgatggtgctgccgctgccaccgctgctgctggacatcctcatcgccgtcaacatcaccatctccgtggtcctgctgatgatgtcggtgtacatcggctcgccgttgcagttctcggtgttcccggcggtgctgctgatcaccacgctgttccgcctggcgctgtcggtgagcaccacgcggatgatcctgctgcaggccgacgcggggcagatcgtcaacaccttcggcagcttcgtggtcggcggcaacctggtggtgggcatcatcatcttcctgatcatcaccatcgtgcagttcctggtgatcaccaagggtgccgagcgggtcgccgaggtcagcgcgcgcttttccctggatgccatgccaggcaagcagatgagcatcgacggcgacatgcgtgccggcgtgatcgatgtcaacgaggcgcgggcgcggcgcgcggtgatcgaaaaggaaagccagatgttcggctccatggacggcgcgatgaagttcgtcaagggcgacgccatcgccgggctgatcatcatcgtcgtcaacatcctcggcggcatcgccatcggcgtcacgcagaagggcctgagcaccgccgacgcgctgcaactgtacgcggtgctgaccgtcggcgatggcnnnnnnatgncatggtctcgcaggtgccggcgttgctga

SEQ ID NO: 341987 - DNA, 918 bp, Pseudomonas aeruginosa
atggacggtggcggccatctggttcatcgccgtggccacctgttcggtttccgcccgctggctgtcgattcccaggcgggtgcgcgtggtaacgccggacagcgcctcggaagcgccggcaatccgcccgacgccgtcctgcaactggctgacgataccgcgcaggctgccggtcatggcgcgcatcgcggccatcagttggccaacctcgtcgcgccgctcgctgtcgacccgtaccgcaaggtcgccttcggcgatccgctgcgccacacccatcgcctggcgcagcggacggacgatcagcaggctgatgccgaaggccgcgcccaggcccaccagcagcgccagcacggcggcgccgacgatcagcagggagtttgtccgcaggctgtggagcatggcctgctgctgcgcctcccagctacggtcaacacgcgccatcacctgcccggcgcgctcgcccatggcggcgtacatctgccgctcctggagctgactggcgcggtactcggcgagcttgtcggcgaaaccgcggatattggtcagcacgtccttgaccaccgacacgtaggcatcgtcggtgatcgcctgctccagccgggctgccagctccagcgcctcgcgcagcgatttcggcggcccctcctgcgcatccgcggcgcgcgcttcgagacgcgagcgggcctcgtccagcccctgaaggaccaggcgattgacctgggcgacctgggccgcctgctgcaacagcggctcgccgtcgtgcccctggctctccttcagcgcataggcgccatcctcggccaggctggactggaggatatcgaggctgttggcggcgccgttcagcgaccaactggcgctttcccaagccaattggcgtccctggatggactgctcgaagcggccgaacgcttctag

SEQ ID NO: 341988 - DNA, 324 bp, Pseudomonas aeruginosa
  misc_feature (32)..(32): n is a, c, g, or t
  misc_feature (272)..(272): n is a, c, g, or t
atgttctccgccgcgcacttgaggatgtgcgngccgaccggggtggaaccggtgaaggcgatcttggcgatgcgcttgctggtggccagggcctcgccggcctccctgccgaagccctggacgacattgagcacgcccggcggcagcaggtcgccgatgagttccagcagcacgcagatgcccagcggagtctgctcggccggcttgagcaccacgcagttgccggcggccagcgccggggccagcttccaggcggccatcagcagcgggangttccacgggatgatctgcccgaccacgcccagcggctcatggatgtggtag

SEQ ID NO: 341989 - DNA, 1704 bp, Pseudomonas aeruginosa
atgcaccatacgccgttactcactacactcgccgcggggttcgtcctcgccttcctcttcggggccctggccaatcgcctgcgcatttcgccgctggtcggctacttgctcgcgggcgtcctggccgggccgttcactcccggttatgtcgccgaccaggcgctgtcgcaggaaatcgccgaactcggcgtgatcctgctgatgttcggcgtcggcctgcacttctcgctcaaggacctgctctcggtgaaggccattgccattcccggggcgctggtgcagatcggcgtcgccacgctgcttggcatcggcctggccaagctgctcggctggagcttcggcggcggcctggtattcggcctgagcctgtcggtggccagtaccgtggtgctgttgcgcgccctggagcagcgccagttgctggacaccaagcgtggcaggatcgccatcggctggctgatcgtcgaggacctggcgatggtcctgaccctggtgctcctgccggcgctcgccggcaccctcggcggcaagaccgacggcggcgacgccggtctgctctggccgctgctgattaccctgggcaaggtcgccgccttcgtcgccctgatgatcttcggcggtcgccgggtggtgccctgggtgctggagaggatcgccgccagcggttcgcgggagctcttcaccctggccgtgctggccattgccctgggcatcgcctatggctcggcggtgctgttcggggtgtccttcgcgctaggcgccttcttcgccgggatgatcctcaacgagtccgaactcagccacgaggcggcggagaactcgttgccgctgcgcgacgctttcgcggtgctgttcttcgtctcggtggggatgctgttcaatccgatgatcctgttgcaggagccgctgacggtcctggccaccttcctggtcatcgtcttcggcaagtcggtggccgcctacctgatcgtccgtgctttcggccatccgaacagcaccgcactggtgatcgccgccagcctggcgcagatcggcgagttttccttcattctcatcggcctgggcattggcctcgaactggtgccggagcagagccgcgacctggtgctggccggggcgatcctgtcgatcctggtcaatccgctgctgttcatcgccatcgatcgcctgcagcaacgcaaggagcagcgcctggcggaggccgctggcggggtccgcgagatgccggcgcaggacctgccgccgccgatcctggagcgcgagcatgcggtgctgatcggtcatggccgggttggcgggttggtcagcgctcgcctgcgcaccgccgggacgcccttcgtggtagtggtggacaagcgcgacaaggccgacgaactgcgcgaacagggctacagcgtggtcctcggcaatgccgccagtcccggcgtgctggaactggccaacatcgccgaggcgcgctggttgctgatcgccattcccaacggcttcgaggccgggcagatcgccagccacgcccgcgcggtgaacccgccgctggacatcgtcgcccgggcgcatttcgacgccgaggtggactacctggagcagaacggcgccaacctggtgatcatgggcgagcgcgagatcgcctgcggcatggtccatcgcctgggactcgaccgtgacgagcgcggcgccgacgcaccgctgccgcagtcggcctga

SEQ ID NO: 341990 - DNA, 252 bp, Pseudomonas aeruginosa
gtgcgggtcaacgccgtgtcgccggcggatatcgccacgccgatgctcgactaccaggccgaacgctatgggatgggcaatccggatggctacaagcgcgcgctgctgaaggattatccacagggcaaggcggcacgcttcatccgcccggaagaagtcgccgagctggtctggtatctctgcggccctcaggccgaagcgatcacgggtgccgacctggcggtggacttcggcctgtccgctggccgctga

SEQ ID NO: 341991 - DNA, 501 bp, Pseudomonas aeruginosa
atgagcacgcccgtcgttcttatcactggtgcagccggcggcttgggccgggcaatcgccaagcgtttcgcccagagtcattggcgcatcgccgccacggatgtggataaggagggcctgcacgcgctgaacgcgcaggtgccgttggacgccagcggggtcgccgacctgcgcagcgcggataactgccataccctgatgtcgaagattctcgcccgtaccggacgtctcgacgccctggtgaatgccgcgggcgtctggcgcgaggggcctgtggaaaacttcaccgaggaggatttcgacctggtcctgggagtcaacctcaaggcctccttctacatgtgccaggccgcgattccctacctgaaggaaaaccagggcagcatcgtcaacatctccagcgactccggacgccaggcctaccggggttcggcggcgtattgcgcgagcaaggcggcgctgaccatgctgagcaagaccctggcgctggaactggcctag

SEQ ID NO: 341992 - DNA, 297 bp, Pseudomonas aeruginosa
gtgttcgtcaaccaacaggctgatcgtgaattccacctttccatccgctccgctgaactgaggggccagagcccttacgaagcggtctccatccatgctgccgacttggacataaggctgcgcatcctcgccgggaaccgtcaccttgtgctggtcaagacggagatgccgctcgaatccaatatagatggcccacgccttcttctgaaggtcagaccagtaggcgtcctgagcggccttgtacttcgtgtatgcctcacgtatttcgagaaaatcagtcatcacgccatcctctag

SEQ ID NO: 341993 - DNA, 2190 bp, Pseudomonas aeruginosa
atgacgacctacgccaccggtaacccgctgggctccaaagacccgcgcgatctgtacgacaacgccgagaacttcgacgcggcgatgaacgaccgggtgaataccacgtggaatgatcgtttcggcgttagtcgcccaacgatgaaagggtatgaggaacagttcaatgactggctggatgctcaaggattcgagccaggcgtcctggagtacgtcgacagcatcccgccaaccccgctgatcgtagaccgcccgacccaactgatccagcgcgacggaaacctctacagcgtcaagcgcccggcattgttccccgtcaatctgaccgggaactgggcgacggaccagaacctcctggttgcacagatagatcaaaccctcaggcaggaattgagcgaacctgacggtatgcagatgattggcgctcttgatgggaaagttggcgactatttgccgaaccgcattcacgtccgtaaattcggcgttgtgggtgacggagttaccgacgactctaatgcgttggaaactgccattatggcaggcgtgccaattgacctcggaaatttgcagatcaggattacacgctcaattgggaaccaggcaaccatccctgccgccatcgactggaaatccagtggcgcaaagattttcatggattcatctaccatcaaggagtctgttctctatttttccgtgttgccgcttgatcatagaatcgaaggcccgctgtttattgatggtgcatccaaagcctttgctggaatctatctccgcaacaactcggcagatttctatccgctaggctacggaaccatgtttgccagcgacctacgtgttgaaaatatacggagggcggatgctgcctatgcaaatggagacggtatcctgattcgtggggggtttaccagcgtcaccttgattcgtccaattgtgcgaaatgttgtgcttgcgcctggtgctggaattccaggaatggtcggcgtgtccggaattgctgtatttggaaatagcgacggaattggatatccgcgcacagtcacaattgttgacccatacatagagaatataagcagcgaagacctatcctatcaggatgatatggacggtatccgtgttttcggaccacacgcagttactccaggtgtaaatgctatagacagcacgtttagtattacgcgcggggtctttaggaactgctatggtcgcagcatcaaatcccaaatgacaaccggacaggttattggtggtaagtttattcgaacaactggcccggcgtctggagtaggtaatgaggagatttcattccaacagggtgccggttatgtcgaggacgttgtgtgcctttactacggcggtaacgttccgagcacggttataaacggcggtgaaggaactgtagagcgcaaaaggccatcccttaaagtaaagggtgtatatgtagctaaccactctaacccagcaattccgcaggttatacagacgttctctccgggggtgagtaccggcctggtatccgttgaggatgttgaggtgcaaggtccagttgaccggctagtagaatatctggtgaacggtgatcttaatgcgctaaaggtcgctaacgtgagcgtagacgggctcaccactgagctgatcagagcaaagagcagtggctcatccactccgcttggcgcaaaggtgtacgcagaaaactgtataaatacgggatcattacggccaattctcacccatcgcgtagccggaaatgctgtggttgtagagctaagcgaatacggatgcgtcggatttaccagaaatggatctgctgatacatcactggtgaatccggggagtgttatgcgtccgtatgcaattgcaggcgaagggcagtctgtaggcggcagcatgcgtgttcagtctgtaagcatccccgctggcgctgtaggtcagattcaggggcatggcgtgaataatggtgtctgctttgcgattatatctataaacagaaacgcatcatctcagggggctgtatctatatcagcaactggagttgtagcgctagcggtgggctctgatatcactgttggaaccacgtcagagccagccagcggtctttttagggtatgggctcaagcttctggggcaggagcaattaacataagaaatggagatacatcgaccagagctgttactgtcgtaagttttggttaa

SEQ ID NO: 341994 - DNA, 288 bp, Pseudomonas aeruginosa
atgaccgaccacgcagagctgcggaggctggctgaggcatgcgacgtgtctcgctgcgccgacgaaggagaagagcgtagaaggctacacgacttctacgactgcgttgaacctgagctgatcctcgccctgctggacgagatcgacaggctcaaggcggagaacgaggttctgcggggagcgctacaggccgtagtggatgatccaacctggcgcagcaacgacaacaccctgtggccgaagatcatcaaagcaatgaaccagccaggcgccactagctctccctga

SEQ ID NO: 341995 - DNA, 270 bp, Pseudomonas aeruginosa
gtgcctgacatgagagaagagtttgaagcatggattaccgaagcgatgggcggctatgccgatctgcggaagtccaacgatcccaatttcgcttatgacgacactgatgtggacttcgcctatcaagcctggcaagccagccgcgcggctctgagggtggagttgccgttccccatcatcgtcgacgagggtgccgaatttgcgctccatgcctacgacaaggacgagacagacaaagccctccagcaagccggaatcgaggtgaagtga

SEQ ID NO: 341996 - DNA, 339 bp, Pseudomonas aeruginosa
atggctgaagaactgaaaccctgtccgttctgcggatgttcgatgcgcctggagagcaaccacgactggcaccggatcgtaggcgatcacgctttagagtgcgccttcacggacagcgaaacaatggtggtgccggcaacaaaagagcagcgtgatattgctgtctccgactggaacgcccgagccgtacccgcagggcatgtggtggtaagcgaggggctgttgcgacgcttgctcgacagcgatggtatcgacggcatattcgatgcgcagcaaaactacgcagcgcatcaagaactccgcgccctgctgagcgagcaggatggagggaagccatga

SEQ ID NO: 341997 - DNA, 252 bp, Pseudomonas aeruginosa
atgtcttacgaccgttttggtgtttttttccagtgcggcttctgggagaagacagtggcctttcgagtcgacaacccattaatcgaaggcacaaagatcatcgtctgcggacaatgcattgacccagcggatgccagcgattcgcggaacattgggggcagcttcctttgtgaggattgcgggctgccgttcggtcgaccggaggctcatgaaaaggcaatcgccttgtctggcctggagaaatgcgcatga

SEQ ID NO: 341998 - DNA, 378 bp, Pseudomonas aeruginosa
atgtacaagcacgcttcgatttctgatcttctcggaaagaccataaagcagatcaccggattggaagctggaagcgattctgtcgatttcgaatgtgaagacggctctctgtttcggatgtatcaccagcaggactgctgtgagagcgtttcgattgacgatatcgagggtgacgcaagcgaccttgttggccagccgttggtggttgccaaggacgtcagtagcgaagacttcccggcgccgcctggggattacgtagaaagctacacatggaccttctaccgactggccacagccaaagggttcgtcgtgatccgctggcttggcgagtcgaacggctactactccgaatctgtcgatttcagccgcatcaactga

SEQ ID NO: 341999 - DNA, 1530 bp, Pseudomonas aeruginosa
gtggacgaggagatcgtcggcctggtcgaacgcagcacggtgaaggcgatccgcgagattttcgtcacccaccgggagatgctcgacgatccggaactggccgagcaggtgcaactgcgcctgaatcgcggcgaaagcgccgaagcggcctggagtcgggtggtggaagacagcgcggcgcaacaggaggcgctgcacgacgcgctgctcgccgagcgcgccgccgacctccgcgacctcggccggcgggtgctggccaggctctgcggggtggaggcgccgcgcgagccggagcagccgtacatcctggtgatggacgaggtcggcccctccgatgtcgcccgcctcgacgcccagcgggtcgccggcatcctcacggcgcgcggcggcgccacttcgcacagcgcgatcatcgcccgcgccctcggcattccggcattggtcggcgccggcgcggcggtgctcggcctggagcctggcacggcactgctgctggatggcgagcacggctggctgcaggtggcgccgagcaccgaacagttgcagcaggccgccgccgagcgcgacgcccgccagcagcgccaggcccgcgccgacgcgcagcggctggagcctgcgcggacccgcgatggccacgcggtggaagtctgcgccaaccttggcgacaccgccggcgccgcgcgcgcggtggagctgggcgccgagggcgttggcctgctgcgcaccgagttcgtcttcatgaacaacgcccgcgcgccggacctggcgacccaggaagcggaataccgtcgggtgctcgacgccctcgacggacgtccgctggtggcgcggaccctggatgtcggcggggacaagccgctgccgtactggccgattccccacgaagagaatccctatctgggcctgcgcggtatccgcttgaccctgcagcgaccgcagatcctcgagacccagttgcgcgcgctgttccgcgccgccggggagcggccgctgcgggtgatgttcccgatggtcggcagcctcgacgaatggtgccaggcgcgtgacctggcgctgcgcctgcgcgaggaaatcccgctggccgacctgcaactggggatcatggtcgaggtgccctctgcggcgttgctcgcgccggtgctggcccgcgaggtggacttcttcagcgtcggcaccaacgacctgacccagtacaccctggctatcgatcgcggccacccgagtctttcggcccaggccgacggtctgcatccggcggtgctgcaactgatcgacatgaccgtccgcgccgcccacgccgagggcaagtgggtcggcgtctgcggcgaactggcggccgacccgctggcgttgccgctgctggtcggcctgggagtggacgagctgagcgtctcggcgcgcagcatcgccctggtcaaggccggcgtgcgcgaactgcagctggtcgctgcgcgcggcctggcccgcaaagccctgggcctggcgagcgccgccgaggtccgggccctggtggaagcggaggtgcagtaa

SEQ ID NO: 342000 - DNA, 1458 bp, Pseudomonas aeruginosa
atgaaacggtccttcctttccctggcggtagccgctgtcgttctgtccggctgctcgctgatccccgactaccagcgccccgaggcgccggtagccgcggcctacccgcaagggcaggcctacgggcagaacaccggcgcggcggccgttccggccgccgacatcggctggcgcgagttcttccgcgacccgcagttgcagcaactgatcggcgtggcgctggaaaacaaccgcgacctgcgggtcgccgcgctgaacgtcgaggccttccgggcgcagtaccgcatccagcgggccgacctgttcccgcggatcggcgtggacggtagcggcacccgccagcgtttgccgggcgacctgtcgaccaccggcagtccggcgatttccagccagtacggggtgaccctgggcactaccgcctgggaactcgatctcttcggccgcctgcgcagcctgcgcgaccaggccctggagcagtacctggcgaccgaacaggcgcagcgcagcgcgcagaccaccctggtggccagcgtggcgaccgcctacctgacgctgaaggccgaccaggcgcagttgcagctgaccaaggacaccctgggcacctaccagaagagtttcgacctgacccagcgcagctacgacgtcggcgtcgcctccgcgctcgacctgcgccaggcgcagaccgccgtggaaggcgcccgcgcgaccctggcgcagtacacccgcctggtagcccaggaccagaatgcgctggtcctgctgctgggctccgggatcccggcgaacctgccgcaaggcctgggcctggaccagaccctgctgaccgaagtgccggcgggtctgccgtcggacctgctgcaacggcgcccggacatcctcgaggccgagcaccagctcatggctgccaacgccagcatcggcgccgcgcgcgcggcgttcttcccgagcatcagcctgaccgccaacgccggcaccatgagccgccaactgtccggcctgttcgacgccggttcgggttcctggttgttccagccgtcgatcaacctgccgatcttcaccgccggcagcctgcgtgccagcctggactacgcgaagatccagaaggacatcaacgtcgcgcagtacgagaaggcgatccagacggcgttccaggaagtcgccgacggcctggccgcgcgcggtaccttcaccgagcagttgcaggcgcagcgcgatctggtcaaggccagcgacgagtactaccagctcgccgacaagcgctatcgcacgggggtggacaactacctgaccctgctcgacgcgcaacgctcgctgttcaccgcgcagcagcaactgatcaccgaccgcctcaatcagctgaccagtgaggtcaacctgtacaaggccctcggcggcggctggaaccagcagaccgtgacccagcagcagaccgcgaagaaggaagatccccaggcttga

SEQ ID NO: 342001 - DNA, 1596 bp, Pseudomonas aeruginosa
gtggtcaccccggcgccggccctggccgccagcaagggacacctgctggccatcgccgacggtgtcagccagtgcgccgatggcggcctggcggcgcgcagcagcctgcaagcgctggccctggattactatgcgactccggaaacctgggccatcgtgcagtccctggaccgcctgctgctggcgcagaaccgctggctacaggccaacggcggcggccagccgctgctcaccaccctcaccgccctggtgctgcgcggcacccgctacaccctggcccacgtcggcgattgccgggcctacctgtggcgcgacggcgagttgctccggcagaccagcgaccacgtctgggaacagccgcacatgcaacacgtgctgacccgcgccctgggactggaccagcatctggtggtcgactatctggaaggcgatctggagcccggcagccagtggctactggtcagcgacggcgtctgggcgacgctgggcgacagcggcatccgcagcatcctgcgcaacgccgaggagccgcagcgcagcgccgaggccctggttcgcgccgcccacctggcaggcagccaggacaacgccagcgccctgctggtacgcgtggaagccgtgcccgcaggcagcctcggcgacgccctcgcgcaactgggccactggccactgccgccaccgctgaagcccgaccagctcttcgaaggctggcgggtccggcagttgctaggcgaatcccgccagtccctgctctaccgggtcgaagatggccagggccaaccctggctgctgaagacccttcccgccgcacgtgccgacgatccgctggcaacccaggccctgctgctcgaggaatggttcctgcgccgcgtccagggccggcatttccccgagctgtacggattggcgcaacgccagcatctgtattacctgatgcgcgagcaccccggagagactctcgccgagcgcttgcgcaaccatggcccgctgtcgctgccggagtggctggggctggccaaccagctgctgcgcgggcttggccagttgcatcgacgcaacctgctgcaccgcgacctcaagccggaaaatctccacctcggccgtgacggcgagctgcgcctgctggatttcggcctggcctggtgtccgggattgtcgcgcgaagacccccatctgctaccgggtacgcccagctacctggcgccggaatgcttctccggcacctcgccctcggtgcgccaggatctctacgccaccggcgtctgcctctaccaggcgctgaccgggcgctatccctatggcgagatcgaagccttccagcacccgcgcttcggtcgccccgtcccgcccagccgctatcgccccgacctgccggcctggatcgacgacctgctgctgcgcgccgtcgcctgcgaccccgcacagcgcttcgagaccgccgaggaatggctgctctcgctgcaacagggagaagcgttgccggtcgcggcaccccgcccattgctggagcgcgaaccgctgcagacctggcgcgccatcgccctgctgtccctggccgccaacctggcgctactcctggtctggctgaagggctga

SEQ ID NO: 342002 - DNA, 579 bp, Pseudomonas aeruginosa
atgctgcgtatcctgctgatcgacgacacgccgaagaaagtcggacgcctcagggccgccctgctcgagagcggtttcgaagtggtggacgagtcagggctgaccatcgacctgccggcgcgcgtcgaagcgctgcgtcccgacgtgatcctgatcgacacggagtctcccggccgcgacgtgatggagcaggtctgcctggtcagccgcgaccagccgcgcccgatcgtgatgttcaccgacgagcacgatccgggagtgatgcgccgcgccatccagtccggggtcagcgcctacatcgtcgaaggcatccaggccagccgcctgcaaccgatcctcgacgtggccatggcgcgcttcgagagcgaccaggcgctgcgcgctcaactgcaggcgcgcgaggcgcagctggccgagcgcaagcgcatcgagttggccaagggcctgctgatgaagatgaagcattgcggcgaggaggaggcctacacgctgatgcggcgccaggccatgagccgccagcagaagctgatccaggtcgccgagcagatcatcgccatgcacgacatgctcggcggctga

SEQ ID NO: 342003 - DNA, 1209 bp, Pseudomonas aeruginosa
atgacagacagagcgatacgcagccaggcctgggccggcggttccgacgcaccggaaaagagcgccctggacatcggtttcatggcgctgaccgattcggcctcgctgatcgtggccgccacccagggcttcgcccagccctacggcctcacgctcaatctcaggcgccaaccgtcctgggccaccttgcgcgacaagctgctcagcggcgagctggatgccgcgcagtgcctgtacgggcttgtctacggcgtccagctcggcctcggcggcagcgcggcaagcgagatggcggtgctcatgggactgtgccagaacggccaggcgatcaatctttccgaaccgctgaagcaggctggcgtgaccagtgcggaggcactgctccggcatcggcgccagaatggtgcacgcctgaccctggcgcagacctttcccaccggtacccacgcgctctggctgaactactggctggcgagcatcggtctgcatccgctgcacgacgtgcacagtgtggtggttccaccggcgcagatggtcggccatctccaggccgggcgcatcgacgggttctgcgccggcggcccctggggcgccctggccgtggaccagggccagggcttcaccatcgccaccagccaggcgatctggccggaccacccggaaaaggtcctcggcactacccgcgccttcgtcgacgcctacccgaacaccgcccgcgcgctggtcatggcggtcctcgacgccagccgcttcatcgaacagaacgccgagaaccgcctgggcaccgcgcaactgatcagcggccgcgactatgtcgacgctccgctcggcgcgatccagccgcgcttcttcggccgctaccaggacggcctcggcaacgcctggcaggacccacatccgctgcgtttctacgccgacggcgaagtcaaccggccctggctctcggatggcatgtggttcatgacccagttccgccgctggggcctgctgcgcgaagacccggactacctgggcatcgcccgcagggtccagcagaccgcgctgtaccgcgatgccgcgacggcccttgggctacgcctggacggcgccgacatgcgccgctcgacgctgatcgacgggcgcacctgggacggcagcgaccccgccggctacgcccgcagcttcccgatccacgccctggccgaaaccggccagggcatcgccccctga

SEQ ID NO: 342004 - DNA, 2610 bp, Pseudomonas aeruginosa
gtgcttgaagcctaccgcaaacacgtagaagagcgtgccgcccagggtgtcgtgccccaaccgctgaacgccgaacagaccgcaggcctggtcgagctgctgaagaacccgccggccggcgaagaagaattcctccttgacctgatcaccaaccgcgtaccgccgggcgtcgacgaagccgcctacgtcaaggccggtttcctttccgccatcgtcaagggcgaagccacctccccccttatcgacaagcaacgtgccgccgagctgctgggcaccatgcagggcggctacaacatcgccaccctggtcgagctgctggacgacgccgaactggccaacaccgccgccgaacagctgaagcacaccctgctgatgttcgacgccttccacgacgtcgccgagcgcgccaagaagggcaatgccgcggccaagtccgtgctgcaatcctgggccgatggcgagtggttcaaggccaagccggaagtcccggaaaagctgacgctcaccgtattcaaggtccccggcgaaaccaacaccgacgacctctccccggcccccgacgcctggtcgcgcccggacatcccgctgcacgccctggccatgctgaagatggcccgcgacggcatcgagccggtccagccgggttcggtcggtccgctgaagcagatcgaagcggtcaaggccaagggcttcccggtcgcctacgtcggcgacgtggtcggcaccggttcctcgcgcaaatccgccaccaactcggtgctgtggttcttcggcgacgacattccgttcgtgccgaacaagcgtgccggcggcttctgcttcggcaccaagatcgcaccgatcttctacaacaccatggaagatgccggcgccctgccgatcgagttcgactgcaccaacctggccatgggcgacgtcatcgacgtatacccctatgaaggcaaggtcgctcgccacgacagcggcgaagtggtcaccaccttcgagctgaagaccccggtcctgctcgacgaagtccgcgccggcggccgtatcccgctgatcgtcggccgtggcctgaccgagaaggcccgcgccgagctgggcctgggcgcctccgacctgttccgcaagccggaagcaccggccgatagcggcaagggcttcaccctggcgcagaaaatggtcggccgcgcctgcggtctgccggaaggccagggcgtgcgcccgggcacctactgcgaaccgaagatgaccaccgtcggttcccaggacaccaccggcccgatgacccgcgacgaactgaaggacctcgcctgcctcggcttctccgccgacctggtgatgcagtccttctgccacaccgcggcctatccgaagccgatcgacgtcaagacccaccacaccctgcccgacttcatcatgacccgtggcggcgtgtcgctgcgtccgggcgacggcatcatccacagctggctgaaccgcatgctgctgcccgataccgttggtaccggcggcgactcgcacacccgcttcccgatcggcatctcgttcccggccggctccggcctggtggccttcgccgccgccaccggcgtgatgccgctggacatgccggagtcggtgctggtgcgcttcaagggcaagctgcaaccgggcatcaccctgcgtgacctggtccatgcgatcccttactacgcgatccagcagggcctgctgaccgtcgagaagaagggcaagaagaacatcttctccggccgcatcctcgagatcgaaggcctcaacgacctgaccgtggagcaggccttcgagctgtccgacgcctcggccgagcgttccgccgccggctgcaccatcaagctgccggaacaggcgatcgccgagtacctgaagtccaacatcaccctgctgcgctggatgatcggcgaaggctacggcgacccgcgcaccctggagcgtcgcgcccaggcgatggaagcctggctggccaagccggagctgctggaagccgacaaggacgccgagtacgccgcggtgatcgagatcgacctggccgacgtcaaggagccggtgctctgcgcgccgaacgatccggacgacgcgcgtctgctgtcgagcgtacagggccgcaagatcgatgaagtgttcatcggctcctgcatgaccaacatcggtcacttccgcgccgccggcaagctgctggacaaggtcaagggcggcatcccgacccgtctgtggctggctccgccgaccaagatggacgcccaccagctgaccgaggaaggctactacggcatctacggcaaggctggcgcgcgcatggaaatgccgggctgctcgctgtgcatgggcaaccaggctcgcgtccagaccggttccaccgtggtctccacttcgacccgtaacttcccgaaccgtctgggcgatgccaccgatgtgttcctggcatcggccgagctggcggcggtctcctcgatcctcggcaaactgccgaccgtggaggagtacatggcctacgcgaaggacatcgacagcatggctgccgacgtctaccgctacctgagcttcgaccagatcgccgagttccgcgaagcggctgcgaacgccaagatcccggtcgtccaggcctga

SEQ ID NO: 342005 - DNA, 468 bp, Pseudomonas aeruginosa; identical to SEQ ID NO: 319041

SEQ ID NO: 342006 - DNA, 864 bp, Pseudomonas aeruginosa
atgcaagccattcgcagcatcctcgtggtgattgaaccggaccagctggaaggtctcgccctgaaacgggcacaactgatcgccggcgtgacccagtcgcacctgcacctgctggtctgcgagaagcgccgcgaccacagcgccgctctcaacgacctggcccaggagctgcgcgaggaaggctacagcgtctcgaccaaccaggcctggaaggactccctgcaccagaccatcatcgccgagcaacaggccgaaggctgcgggctgatcatcaagcagcactttcccgacaacccgctgaaaaaggccatcctcaccccggacgactggaagctgctgcgcttcgcgccctgtccggtactgatgaccaagaccgcccggccctggacgggcggaaagatcctcgccgcggtcgacgtcggcaacaacgacggcgagcaccgctccctgcacgccgggatcatcagccatgcctacgacatcgccggcctggccaaggccacgctgcacgtgatcagcgcccacccctcgccgatgctctcctccgccgacccgaccttccagctcagcgaaaccatcgaggcccgctatcgcgaggcctgccgcaccttccaggccgagtacggtttcagcgacgaacaattgcacatcgaggaaggtccggccgacgtgctgatcccgcgcaccgcgcagaagctcgacgcggtggtcaccgtgatcggcaccgtggcgcgcaccgggttgtccggcgcgctgatcggcaataccgcggaagtggtgctggataccctggaaagcgacgtgctggtgttgaagccggacgacatcatcgcccacctggaggagctggccagcaaggagtga

SEQ ID NO: 342007 - DNA, 612 bp, Pseudomonas aeruginosa
atgttgcccgagatcgaccaattccttgcctgttccactcccgccgcctgggtcgaggcggccctggagcgccaggacgtcatgctgctggaccacaaggcctgcgagatgaaggccgcggcgacggcgatgcaactgatcggcaagtactccggccgcctggacctggtgaacaagatgagccgcctggcgcgcgaggagctgcgccacttcgagcaggtgctggcgatcctgaagaaacgcggtatcccggtggtcaatgtcagcgcctcccgctacgcctcggcgctgcgcgacctggtgcgcaagcatgagccgcagcggctgaccgatacgctggtggtcggcgccttcatcgaggcgcgttcctgcgagcgcttcgccgccctggtgccgcacctggacgcggagctggcgaaattctacggcggtttgctgaagtccgagtcgcggcatttccaggactacctgaagctggcctaccagtacggcgacgaggccgacgtggagcggacgatcgaggtggtgcgggccaaggaggccgagctgatcagcagtccggacaacgaattccgcttccacagcggccacccggtgggcctggtggcctga

SEQ ID NO: 342008 - DNA, 1200 bp, Pseudomonas aeruginosa; identical to SEQ ID NO: 335198

SEQ ID NO: 342009 - DNA, 1065 bp, Pseudomonas aeruginosa
atgaacacgcgccggtcatccgcagcatcgtccgcagcgccttcggcgctgctgggcgacattcgggcactgatcgaggcggcgcgcaagcgcgccgcctcgacggtgaatagcgaactgacgatgctctactggcgcatcggccagcgcatccatacgcaggtcttggacgggcgccggggcgcttatggcaaggaagtcctgcctaccctggcggcgcagttggtgaaggagtacggcaacagctttgccgagcagaacctgcgccgcatggtgcagttcgcagccaccttccccgacgagcagattctcgtatcactgatacgagaattgagctggacgcacttcatcgccctgatcccgctgaaagacccgctccagcgggactattacgcgcagatggcgagcgtcgaacgctggagcgtgcggacgctgcgcgagcgcatcgactcgatgctgtacgagcgcacggcactgtcccaaaagccgggcgagacgatcgcacaggagttggcgacgatgcgcgatgcgcagcgcatgtcgcccgccctggtcatgcgcgacccgtacatcctcgacttcctggggctgcgggacacttggcaggaaggcgacctggaagcggcgatcatccgggaaatggaatccttcctgctggagctgggcgcgggtttcagcttcgtggcccggcagaagcgcatccaaattgacggcgaggatttccacctcgacctgctgttttacaaccgcaagctgcgccggctcgtggcagtggagttgaaggtcggcgagttcaaggcggctttcaagggacagatggagctttaccttcgctggctggacaagcacgaacgggagccggaggaagcctcgccgctgggaatcatcctttgcaccggcaagaagcgcgagcagatcgaattgctggagctggacaagtcgggcatccacgtcgccgagtacctgaccgccttgccgccgaggggcgtgctggtggagcgactgcaacaggcaacgcagcgggcacagttgcagatcgagcagcgcaaaatcgacaacgagtag

SEQ ID NO: 342010 - DNA, 507 bp, Pseudomonas aeruginosa
atgtcgcaactgaccctctctcacgataccccgctgatggtgcgcgatggccgtgggcgctatcggccggcggacgccgaccagattctggaagccgcgcgccaggtcatcgaacagaagatgcagcgcggcgaggcgttcacttcgccggcggcggtgaaggactacctgcgcgccaagctggccggcttcgagcacgaggtcttcgcggtgttgttcctcgacacgcgccatcggctgatcgactacgtggagatgttccacggcacgatcgacgccgccgaggtgcatccgcgcgaggtggtgaagcaggcactgcggctcaatgcagcggcggtcatcgtttcgcacaaccatccgagcggaaaccccgagccgagcgcggccgataaggcgatgacctcgcagcttcggcaggcgctggcgctggtggacgttcgcacgctggatcacatcattgtcgctggaagccgtaccacgtcattcgccgaacgcggcctgctttga

SEQ ID NO: 342011 - DNA, 258 bp, Pseudomonas aeruginosa; identical to SEQ ID NO: 335301

SEQ ID NO: 342012 - DNA, 1311 bp, Pseudomonas aeruginosa
atgctctccgttctgaagaaccgcacctatcgccacctgttttccgcccaggtgatcgcactcgtcggcaccggcctgatgacagtggcgctcggcctgcttgcctacgatctggccggcgcggatgccggcgcggtgctcgggacggcgctggccatcaagatgctcgcctatgtcggcgtcgcacctgtcgcgcaggctttcgccgaccggctgccgcgacggtcgttgctggtcgccctcgacctggtgcgagcatccgttgcgctctgcctgccctttgtcagcgaaatctggcaaatctatctgctgatcttcgtgctacaggcggcgtccgcaggcttcacgccgacctttcaagccaccatcccggacatccttcccgacgaagacgaatacacgaaggcgctgtctctttcccggctggcctacgatctggaaagcctgatttccccaatgctggccgccgcgctgctgaccgtcatcagctttcacaatctgtttgcgggaacggttctcggcttcctcgtctcggccgcgctcgtggtcagcgtggggctgcccacaaccgtacccggcccacgccggggcatctgggatcgcactacgcgcggcacgcgcatttacctcgccacgccacgcctgcgaggtttgctggcaatcagcctcgccgtggcggcagcaggatcaatggtgatcgtcaacacggtggttatcgtcaaggcgcgcttcggcctgggcgaatccgaggtggcgtgggcgctggccgccttcggaggcggctcgatgattgcggcattcgcgctgcctcgcttgctcgacaagattgctgatcggccagccatgattgcgggggcaacgatgctggtgttggggacagcagccggagcgatgattccgacctatgccgtcctagtggtgatctggctggtggtcggctttggctacagcgtggcgcaaacgccatccggtcggttgctgcgtcgctccgctcaccccgaggatcgtcctgcggtctttgctgcgcaattcgccctgtcccatgcgtgctggctcatctgctaccccttggccggtcgcttcggtgctgcctttggactgcaatcgaccttcatcgtcatgtcgctgatcggtcttgtaggagtgggattggcgttgcggctctggcccgctagtgattcttccgacatcactcacgatcaccctgatctgccgtcagatcatcctcacttgcgcgaacacgcagatcgcggcgggcatcgccaccctgcgatcgtggacgacctgcaccgggactggacgcgcgtttag

SEQ ID NO: 342013 - DNA, 351 bp, Pseudomonas aeruginosa
atgaacaacgcactcatcaccgacgagcagcgcatcgtgctgctggccaacggccgcgaatccttggagaacccggacttcgatccggcacccgtggtcaagctgttcacgccggacgctggcgcgacctggctgctgaccgagattgatcccgacgaccacgaccacgcctttggtctttgcgacctgggcctgggggagccggaaatcggctgggtcagcctggacgagctggcggcggtgcgcggcgggctgggcctgccgatcgaacgtgacctgtctttccgcgccgagaagcggttgagcgtctatgcgcgcgatgcgcggctggccgggcggatcgttgtctga

SEQ ID NO: 342014 - DNA, 279 bp, Pseudomonas aeruginosa; identical to SEQ ID NO: 335299

SEQ ID NO: 342015 - DNA, 825 bp, Pseudomonas aeruginosa; identical to SEQ ID NO: 335298

SEQ ID NO: 342016 - DNA, 2061 bp, Pseudomonas aeruginosa; identical to SEQ ID NO: 335297

SEQ ID NO: 342017 - DNA, 519 bp, Pseudomonas aeruginosa; identical to SEQ ID NO: 339223

SEQ ID NO: 342018 - DNA, 1728 bp, Pseudomonas aeruginosa
atgctatgcatcctgggggccaggaaccctaagacttcattcaagttcctgacccctttcctttgtaacgaactcaacgtccgagtgcgttacctggacatgacgcccaaaggcttcagggttgatgaatacattaaatccgagcgcttttacactcgggacttcagaactggcaaaaacgacggaaagctcaagctttacgaccatttcctcaaccaatggttagagatagatagaaagtacaagagcggcttcgatctcatcaagggcgagtcgctggccaaaaacattatctatggcaataccaaaaagaaaattgagcagttcgcactcgagctcgctgagacgctgcctaacatcgagtgcccattggttcaaacagcttgcgatgagcttgaagatgcgttcgacaaacgatatcgactgatttcgtgcctgcggaaaggggtgatgtaccaccacggctccatccccgacaccatccgactgtatctggaaaacctgttccaccaatccaaggccatgaagtatctggtttgcaactccactctgcttgaaggggtaaacctccctatcgaacggcttttcgtcttcgattattcgaaaggtcgagggaacctcacctcatcgcaatttaagaacctggttgggcgtgtgaataggttcagtgaggtgtttgcgcccgaagcaggaaccaccctcaaaaagcttgagtcgagcatctacttgctggggatggacggctacacgaacaaaaaatctaacctccagacattttacgagaaagcggtcaacgtctcgaaggttgatcaggacagtgttagtaacgttctccttgaagcgaccaccatattggagggcgaggtggctgaccgccatcgtgacgctgtatcaaggctggagaaccttcagccaggggtagtcactggtcaagaatgcaagtacgtgaagacggaggttggccggttattgatcgccaacagcgtaagcgagatcgatgtcttcacctctgaggaggagatagacgacgccatcagcatgtcggttgatgcgaacggcatgatcgacaacgccgaccgcctgctgctggagatcaagacctgcttcatcgacaagttcgatgacaagcgaaaatacagcgacctgaaacgcctccagaacaaagcgacgattgatttttacgccatgttcctagactggaagctcaaaaagtatagcgttaagcaaatcctgagatacacgcttaaatactggagcgagctccctgagaagaaaggtactgactatgtttacgtgtccaactggggcgatactaaatacggtgacagtcactatgcttactgggtcagaatttcaaccaaaaatgacgtagagaaagtcaacctcgctatcgtccgtctgaaagaagaagacgatttcttcgacaataagatttttaagttcgtagaagttctgaacggtgtaggtgctgttgatcccggcttctacaagcgcatcaagtatggcaccaccgacgatgcaaaaattaagctgatccgagagggctacagtcgcgggctggctgagctgttgctggatcgatacccacggtatgttcgcctcgacaacaatggcgaaatcgaagtcagctcaagggtcatcgggctcatgagggaaaatgaggagagcgatttgctcatctttgaagcccagatgaacctgaaatccactccagaatcagtggcgtaa

SEQ ID NO: 342019 - DNA, 423 bp, Pseudomonas aeruginosa
atggctgagctgcaacgcgcgagtgtgacgggaggtgggctgtacgagaggctgctgcagcgtctcgccctggctctggatgaagcggatacggccgagcgcctgcgtgacgagcatcccacggagctcgagttgcgtggtttgagcgaagcggagatggggctgatacgcgcctatctcgaccaggacctgcactggttgcgcggctggcatgcggccgccgaggagctggcgctgctcgagcgccagcccggcaggacaccccggccgcaaccgccggcgccccgtcggcacgtctcgttgaaacagcggcaactgctctgtgcgctctgcggtgcgccggtgcagtggagcaaggggcatggcgtgttgccgtgcggccattgcggctcgcaactgttccgttcgggcaacgaccgctag

SEQ ID NO: 342020 - DNA, 444 bp, Pseudomonas aeruginosa
  misc_feature (336)..(345): n is a, c, g, or t
atgcaagggacgagcgtgctgttcggtcagatcgccgtggtatttggcatcgtgatcgccggagtgtggggcgccacacaatggacagcagcagcccttggctaccagctacgccttggctcgccctggttcgatcttctcggcacgccgatctaccacccatggcgcctgttcgagtggtggttcttcttcgacgcctacgcgccgcgcgtgttcgacaccggcggcgccatcgcgggcggcagcggcctgctggcggtggtggtcgccatcggcatgtcgatctggcgctcgcggcagtcgcgcctggtcacgacctacggctcggcccgttgnnnnnnnnnnatgacattcgcaaagcgggcctcacgctgccggccggcgtgttcctgggccagcacgaccgccagtaccttcgccacgaaggcccggaacacgtcctga

SEQ ID NO: 342021 - DNA, 1005 bp, Pseudomonas aeruginosa
atgacctcccagatcaatcggcaataccagttggcccagcgtcccagcgggctgcccggccgcgacaccttcagtttcgtcgagaccccgctcggcgagccggccgagggccagatcctggtgaagaacgagtacctgtcgctggacccggcgatgcgcggctggatgaacgacgcccgctcctacatcccgccggtggggatcggcgaggtgatgcgcgcgctcggcgtcggcaaggtgctggtttcgaagcaccccggcttccaggccggcgactacgtcaacggcgccctcggcgtgcaggactatttcgtcggcgagcccaagggtttctacaaggtcgacccgtcccgcgcgccgctgccacgctatctctcggcgctgggcatgaccggcatgaccgcctacttcgcgttgctcgacgtcggccagccgaagaacggcgagaccgtggtgatctccggcgccgccggtgcggtgggcagcgttgccgggcagatcgccaggctcaagggctgccgggtggtgggcatcgccggcggcgccgagaaatgtcgcttcctggtcgaagaactgggcttcgacggcgccatcgactacaagaacgaagacctcgccgccggactcaagcgcgaatgcccgaagggtatcgatgtgttcttcgacaacgtcggcggcgaaatcctcgacacagtgctcacccgcatcgccttcaaggcacgcatcgtcctctgcggggcgatcagccagtacaacaacaaggaagcggtgcgcggcccggccaactacctgtcgctgctggtcaatcgggcgcgcatggaaggcatggtggtgatggactatgcccagcgcttcccagaaggcctgaaggagatggccacctggctggcggaaggcaagctgcaatcgcgcgaggacatcgtcgaaggcctggagacctttcccgaaacgctgctcaagctgttcagcggggaaaacttcggcaagttggtgttgaaggtctga

SEQ ID NO: 342022 - DNA, 762 bp, Pseudomonas aeruginosa
atgagcaaacttctttccggccaggtcgcactggtcactggcggtgcggcgggcatcggccgcgctaccgcgctggccttcgccgccgccggggtcaaggtggtggtcgccgacctggacagcgccggcggcgagggcacggtcgaagcgatccgccaggcaggtggcgaagccctcttcattcgctgcgacgtcacccgcgacgccgaggtcaaggcgctggtagagggttgcgcggcggcctacggccgtctcgactacgccttcaacaacgccggtatcgagatcgagcagggcaagctggccgacggcaacgaagccgagttcgacgccatcatggctgtcaacgtgaagggcgtctggttgtgcatgaagcaccagatcccgctgatgctggcccagggcggtggcgcgatcgtcaacaccgcctcggtcgccgggctcggcgcggcgccgaagatgagcatctacgctgcttccaagcacgcggtgatcggcctgaccaaatcggcggcgatcgagtacgcgaagaagggcatccgcgtcaacgccgtgtgtccggcggtgatcgacaccgacatgttccgccgcgcctacgaggccgatccgcgcaaggccgagttcgccgccgcgatgcatccgctgggtcgggtcgggcgggtcgaggaaatcgccgccgcggtgctctacctgtgcagcgaccacgcgggcttcaccaccggtatcgccttgccggtggacggcggggcgacggcgatctga

SEQ ID NO: 342023 - DNA, 1197 bp, Pseudomonas aeruginosa
atgaccgaaaccacccagccccagcctcgtctgcgtccgttcgccgactcctctcccgccgccgtggtggccggcttcgtcgccatgctcaccggctacaccagctcgctggtactgatgttccaggccgggcagaacgccggtctcagcagcgcgcagatttcctcgtggatctgggccctgtcgatcggcatgggcctggcgaccatcggcctgaccctgcgctaccgggtgccgatcgtgatcgcctggtccacccccggcgcggcgctgctgatcagcagcctgcccggagtgccgtacagcgaggcgatcggcgccttcatcgtctgcgccctcctgatcaccctgtgcggcgtcaccggcagcttcgaacgcctgatgcgccaggttccctcctcgctggcctcggcgctgctggccggggtgctgttccgcatcggcatcgagatctgcaacgccgccgagcaacagaccctgctggtgctggcgatgttcttcagctatctgctgtgcaaacgcttctcgccgcgctatgcggtgttcgctgcgctactggtgggggtgctgctggccgggatactgggccaactggacttcagcaggttccgcctggaactggcggtaccggagtggaccacgccgagcttctccctggccgccaccatcagcatcggcatcccgctgttcatcgtcgccatggcttcgcagaacatgcccggcatcgccgtgctgcacgccgacggctaccaggtgccagcctcgccgctgatctcgagtaccggcatcgcctcgatcctgctggcaccgttcggctcccacgggatcaacctggcggcgatcagcgcggcgatctgcaccggtccctcggcccacgaggacccgcacaagcgctataccgcggcgctctggtgcggcttcttcaactgcgtcgcaggaaccttcggcgccaccctggcagcgttgttcgcggcgttccccaaggcactggtactgtccatcgccgccatcgccctgctcggctcgatcatgaacggcctggccaactcgatggccgacgagcgccagcgcgaggccgcgctggtgaccttcatggtaaccgcctccggcttcaccctgctgtccatcggctcggcgttctggggcctggtggccggcctgctgactcagttcgtgctcaactggcggcgcggctga

SEQ ID NO: 342024 - DNA, 1683 bp, Pseudomonas aeruginosa
atggcgtcagacacatcattgattgccgagcaaggcgtggccaccctgcccgatgcggcttgggcgcaggcccggcaacgggcggaaatcatcgggccgctggcagcgcttgatgtggtcgggcatgaagccgccgatgccgctgctcacgcgcttggcctgtccaggcggcaggtgtatgtcctaatccgccgtgcccggcaaggtgctgggcttgtgacggacctggctcgcagccgatccggcggcggaaaaggcaagggacgcttgccggaatcagttgagcgcatcatccgcgagttgctgcaaaagcgcttcctgaccaagcagaagcgtagcctggcagcgttccaccgcgaggtcgcgcaggcttgcaaagcgcaaaagctgcgggcgccggcgcgcaacaccgtggctctgcggatcgccggcctcgatccgctcaaggctactcgccgccgggaaggtcaggatgcgtcccgcagcctgcaaggtgtcggtggtgagcctcccgccgtgaccgcgccactggaacaagtgcagattgatcacacggtcatcgacctgatcgtggtggacgagcgcgaccggcaaccgattggccgtccgtatctgaccatcgccatcgacgtgtttacccgctgcgtgctcggcatggtcgtcacgctggaagcgccgtcatctgtttcggtcggcctgtgccttgtgcatgtcgcctgcgacaagcgtccctggctggagggtctgaacatagaaatggagtggccgatgagcggcaagcccaggctgctctacctggacaacgcggccgagttcaagagcgaagcgctacgccgaggctgcgagcagcatggcatccggcttgactatcgcccgctcgggcagccgcactacggcggcatcgtggaacggatcatcggcacggcgatgcagatgatccacgacgaattgccagggacgaccttctccaaccctgaccagcgcggcgactacgattccgaaaacaaggccgccctgacgctgcgtgagctggagcgctggctcacattggcggtcggcacctaccacggctccgtgcacaacggcctgctccagccgccggcagcgcgctgggccgaagctatcgcgcggaccggcgtgccaaccgtcatcactcgcaccacggcttttctggtcgattttctgcccatcatccgccgcacgctgacccgcaccggcttcgtcatcgaccacatccattactacgccgatgcgctcaagccgtggatagctcggcgcgaccgcttgcctgcgttcctgatccggcgcgacccgcgcgacatcagccgcatttgggtgctggagccggaggggcagcactatctggaaattccataccgcaccttgtcgcacccggctgtcaccctctgggaacaacgacaggcgctggcgaaattgcggcagcaagggcgcgaacaggtggatgagtcggcgctgtttcgcatgatcggccagatgcgcgaaatcgtgtccaccgcgcagaaagctacgcgcaaggcgcggcgcgacgcggatcgacgccagcatctcaaggcaacggcagttcttttcaaaaccacgccaccaccggacgcggacatggctgacccgcaggcagacaaccagccacctgccaaaccgttcgaccagattgaggagtggtag

SEQ ID NO: 342025 - DNA, 852 bp, Pseudomonas aeruginosa
ttgcagggcgatccggatgcccgcgaagtggtgcgccgctgccatgccgccgacgcgccgccgttgccgcccgccaccgagcgcgcccgggccctgtggttgcagcgcagcgggagcgcgcagccgcgcctgcgcctgatcgcgctgccgcccgcgggcggcaacgccggcactttccgtggttgggacgcgcgcctgccggcggacgtggagctgctggcgatccagtatccggggcgccaggaacgccaggacgagccattcgtcaccgatgtagaggccatgctctgtgccatcgacgacgcgctcctgccattgctcgaccgtccgttcgccctgatcggcgccagcctcggcggcatgctcgcctacgaactggcggcacgcctggaaagcctgcacggcctgcgcgccaggcagttgttcgtgatcagcagccgcgctccggggccggacctggaatacccgcgcttccatgcgatgggcgacgccgagttgctgcgaaccctgcgcgagtacgacgtgctgccgctggaagtgctcgacgacccggagctgcgcgagatcagcctggccaccctgcgcgccgattcgcgcctggccgccgactatcgctaccgcccgcgcgagccgctggccataccgatcaccgcgatcctcggcgagcaggacccgggcgtctccagggtggccatcgacggctggcggcggcacgccagccgctacgagctggagaccctggccggcggccacggcctggtggtgacggcggcggaggaggtctgcgcgatcctgcggcagcgcctggcgcccgatgtgcctggcggcgtgccggcgaacctggcaacctga

SEQ ID NO: 342026 - DNA, 1974 bp, Pseudomonas aeruginosa
atgagccgtccacgcctggtcaaccgtacctccgcgactccttcgacgcttctgcagcgggctatcttcgacggctacgacttcggcttgaagatcccctacatcgcaggcagcaaccgcgcgctgctggaactgtccggcttcttcatcagcgcccgggagcatccgttgcaccgctactggcgggtccccaagggcaagttgctgcccgaactggactcgctgtacaaccgactcgccgagctcgctggaggcctccactcacagtcctggcgggacttcagcggcatggtcgaatctgcacaggcctcgcttgaccgacaggccttcacctgtggtttgctgctgcgcatcgcgccgctggccgagggcggcgtcttgctgtcaggcgagttccatcccggtgtggtggcggtggctcggcggatgcgcggggtgttcctgcgcccatcgagctcctggcgcatcgacgccacacctgagctgctccgcagcaacctgatcctggagcttggcctcgccgaggaacaattcgagatactggataccgtccaggagctgctcagcgacggtagcttcgcgccggcgaccgagctgcccagcatgagcatcggcggtccacagcaggaaccggcagcgccatccctggaggacgagtcagcttgtgacatctacctcgccgcggtgccagagatcgagcgcaccgagtacagctcggctgatatcgaggcggcgcttcagggctactcgctactggcccaccagcctgccggcatcgctcacttgctgcagagaaccagcgccctgttggccgacgacatgggattgggcaagacccgccaggcggtcatcgccgcttcgatccgagcggcgggcaggccaattctggtcatcaccctggccaccctgttgatcaattggcagcgcgaaatccaggaggtctatccctcggccaccgtggccatccagcaggacaacccagaggcgcagtggatcctggtcaactacgagcagttgagccccttcgtcgccaacgcttcgcgcttcgccgtgatggtcatcgacgaggcgcagcggatgaaggaaccgacggcgcaatgcacgcggcacggtttcgacattgccgcccaagtgccgaaccgctacctgcttaccggcacgccggtgctcaaccgtgaaaccgagctgcacaccctgcttcgcctctcaggccaccccatcggacaactgccgctgaaagagttctgcgaccgtttcgccggcaacccggagttccgccagagtctgcgggcggagctgggtgactggatgctgcgcaggcgcaaagatgtgctgcccagcctcaagggcaagcagcggcagttgctgaaggtggccctctccaccgaggaacgccagcaatacgacgtgctgcgtctcgaggaccgaccggtcttcgcgcgactcggcgcgctgcggcgttacctggaaacggtgaaggttcgcgtggcgatggacctgttgagcgagctcgacgccgaggacaaggtgatcctgttctgcgagttcaagccgaccgtggctgcgctgaaggaactctgcgagcaggccgggcacggctgcgtcacgctggtgggcaatgactcgctcaccaagcggcagaaagcgatcgatcgcttccagcaggatcccgactgccgggtgttcatctgcaccacggcggccgccgggacgggcaacaacctcactgcggcgaactacgtgtttttcctcggcctgccctggactcccggtcagcaggaacaagccgaggatcgcccgtaccgcaacggccagctccgcatggtcgtggtgaagatccccttagtcgaggccacgatcgacgagcagctgtggcaactgctcaacgcgaaacgccaggttgcccaggacctcatcgagcccgagcaggtcgacggaaaccgtgaactcgttgctaagacattgatttcatag

SEQ ID NO: 342027 - DNA, 384 bp, Pseudomonas aeruginosa
atggccatcgagaagcacaacatcaagctggccaccttcatcgccgcgctcttctatgacctttccacccagaaacaggtacgcattcccacccagatcgaaaaacgggatcgcgaactgtacgaactggtaaagaagagcaagcgccccgtggccctgctcgttgatgaaacccatgatctcaatggtcataccttgaccggtctgaagcgactgctcgaactggccgaagacgacagcggccggcgacgcttgtccattgtcctggctggccatcccaagctgtgtaacgatctgcgccgccccacgatggaagaaattggttaccgcaccgacattttcgagttgcaggaaaagatgcaaagtgccggattaccggtatga

SEQ ID NO: 342028 - DNA, 1479 bp, Pseudomonas aeruginosa
gtggctgctggcggcgttccaggcgctgctgcatcgccacagcgggcagggcgagatccgcatcggcgtgcccagcgccaaccgccagcgcctggagacccaggggctggtcggcttcttcatcaacaccctggtcctgcgcggcacgccccgggcgcgccagccgttcgccgcattgctcggcgaggctcgcgaggcgaccctcggcgcccaggccaaccaggacctgccgttcgaccaggtgctcgcggcctgcggccagggcggccagttgttccaggtgctgttcaaccaccagcagcgcgacctgtcggcgttgcgccggctgcccggcctgctcgccgacgagctgccctggcacagccgcgaagccaagttcgacctgcaactgcagagcgaggaggacgctcgcggtcgcctgaccctgaatttcgactacgccgcggacctcttcgacgaggccagcatccggcgtttcgccgcgcaatacctggagctgctgcgccaggtcgcggaagacccgcagcgctgcctcggcgatatcgccctggtcgacgccgagcaggcggcgcacctcgccgaatggggcagcgcgccctgcgagccggcgcgcgcctggctgccggagctgctggagcggcaactggtgcagtccgccgaacgcgtcgccctggagtgggacggcggcagcctcggctacgccgaactgcacgcccgggccaaccgcctggcccactacctgcgcgacaagggcgtcggcccggacgtgcgggtagcgatctgcgccgagcgttcgccgcaactgctggtcggtctgctggcgatcgtcaaggcgggcggcgcctacgtgccgctggacccggactaccccagcgaacgcctggcctacatgctcgccgacagcggcgtcgagttgctgctgacccaggcccatctgttcgagcgcctgcctggcgcggagggcgtcacgccgatctgcctggacagcctcaagctcgacaactggccgagccaggcaccgggcctgcacctgcacggcgacaatctcgcctacgtcatctacacctccggctccaccggccagccgaagggcgtgggcaacacccacgcggcgctggccgagcgcctgcaatggatgcaggccacctacgccctcgacggcgacgacgtgctgatgcagaaggcgccggtgagcttcgacgtgtcggtgtgggagtgcttctggccgctggtcaccggttgccggctggtcctcgccgcccccggcgagcaccgcgatccggcgcgcctggtggaactggtgcggcagttcggggtgaccacgctgcacttcgtgccgccgctgctgcaactgttcatcgacgaacccggcgtcgccgcctgcggcagcctgcgccgcctgttctccggcggcgaggcgcttccggcggagctgcgcaaccgcgtgttgcaacgcctgccggcggtggccctgcataa

SEQ ID NO: 342029 - DNA, 777 bp, Pseudomonas aeruginosa
atgcaggctaccattggcggcgatacgccccttggaactgttcgcctcatcggccgccagcttcaggccgcgttcggcgatcagcgtgccagcgtcgttttccaggcgggtcacaccgatatcgatggcacccttgctgccgatggagccactacggttgtccaggacgaatgcctggatatccagacctccggcaccggagacaatcccctcgaggctgttgtccagggcctgcgcgatacgcaaggtcagggctccgccgctgagcaggcgtccctcctggttgttcaacgcggaggtggcaagagtgaacgcgcggtcgctggagatttccccaccgctgttgtccaccacgccgagttggcgcaggagcaaagtgccaggcgtggcgatcaggccttgagcgcgattgaccaggcttcccttgttcagatcgagcgtgatgccggtatcgctgaccaggttgcccctgtcatgctggtccaacccttggagatccgcatcgatcgcacccttggcagcgatccggcccgcctggctgttgtctacccgagcggcgaccagggtgagtcccgcatcgctgccgatactggctttccggctgttgttcaggttgccggtacgaatctccacggcccccttgccactgatcgcaccggtctggctgttgtcgaggctggcgctgctcaagctaattccggcgtcgctcgccagtctgccgccctgattgttcagggcgccctggctggtcactgccaatgcccctgcgctggatag

SEQ ID NO: 342030 - DNA, 714 bp, Pseudomonas aeruginosa
atgcatgatgagagagagggatatctcgagattttgtcaagaataacaaccgaggaagagttcttctccctggttctcgagatatgcggtaattatggattcgaattcttttcattcggtgcgcgggcgcctttcccgctgaccgcacctaaatatcatttcttgtccaattacccaggggaatggaaaagcagatatatctccgaagactacacatccatcgacccgatcgtgcgccatggtctcctggaatacaccccgctgatctggaatggcgaagacttccaggagaaccgtttcttctgggaggaagcgctgcatcacggcatccgtcacggctggtcgatcccggtccgcggcaagtacgggctgatcagcatgctgtccctggtgcgttccagcgagagcatcgccgccacggaaatcctggagaaggaatccttcctgctctggatcaccagcatgctgcaggctaccttcggcgacctgctggcgccgcgcatcgtcccggaaagcaatgtgcgcctgaccgccagggaaaccgagatgctcaagtggaccgcggtgggcaagacctacggcgagatcggcctgatcctgtcgatcgaccagcgcacggtgaagttccatatcgtcaatgcgatgcgcaagctcaactccagcaacaaggcggaggccaccatgaaggcttacgccatcggcctgctcaactga

SEQ ID NO: 342031 - DNA, 1719 bp, Pseudomonas aeruginosa; identical to SEQ ID NO: 330916

SEQ ID NO: 342032 - DNA, 1317 bp, Pseudomonas aeruginosa
atgccatccgcgaatgctcccgaggcgccggcccagcgtccattgacccgcagcgactacaagaccctgtccctctccgccctgggtggagcgctggagttctacgacttcatcatcttcgtgttcttcgccaccgtggtcggcaagctgttcttcccggcggacatgccggaatggctgcgtcagctgcaaaccttcggcctgttcgccgccggctacctggcgcggccgctgggcggcgtgatcatggcccacttcggcgacctgctcgggcgcaagcgcatgttcaccctgagcatcttcatgatggcggtgccgaccctgatcatgggcctgcttccgacctacgcgcagatcggcatctgggcgcccctggcgctgctcctgctgagggtgatccagggcgccgcgattggcggggaggtgccgggggcttgggtcttcgtcgccgagcatgtaccggcacggcatgtcggttatgcctgcgggacgctgacttccggcctgacggcgggcatcctgctgggctcgctggtggctactgcgatcaatagcttctatagcgcgacagaggtgcaggactacgcctggcggattcccttcctgctcggcggggtgttcggcctgttctcggtctacctgcgccgctggctgcacgagacgccggtattcgccgagctgcagcagcgcaaggcgctggcagaggaagtgccgttgaaagcggtggtccgcgatcatcgtggcgccgtcctggtgtcgatgctgctgacctgggtgctgtcggccgcgatcgtggtggtcatcctgatgacccctaccgtgctgcagagcgtatacggcttcgatgccgccacggcgctcaaggccaacagcctggcgatcgtctgcctgacccttggctgcatcgtcgccgggcgcatggcggatcgtttcggcgcggggctgactttcgttgccggtagcgtgctgctggcgctggtgtcctggagcttctacggcaacctcaaggcccacccggactggctctttcctttatatgcactgaccggcttcttcgtcggcatcgtcggcgccgttccctacgtgatggtcaatgcgttcccaccggttgtgcgtttctccggcctgtccttttcctacaacctggcctacgccgtcttcggtgggctgacgccgatggcggtggccctgctgctcaagcagagcccgatggggccggcttactacgtggtcactctgtgcctggtcggcttcctcgtcgggctctacctgctggcgcagaaaaagccggctggcgaggcggtttcggtgggctga

SEQ ID NO: 342033 - DNA, 621 bp, Pseudomonas aeruginosa
atgcgcgaggagtacaagctgggcgacgactccgggctgagcagcttcctgatgccggggatcggctactcgctgctggagaccgacaacaaggtcgaccccagccatggctaccgcctgcagttcaacgtcaagggggcgaaggaaggcctgctggccgacgccgacgtcctccatgtcgacgccatggccaagggcctgaccagcttcgccggcggccatcgcctgctcggccgcctgcaggtaggcggaatcgccaccaacgactacaagtcgatcccgccctcgctgcgcttcttcgctggcggcgaccagagcgtgcgtggctacgactaccggacgctgtcgccggagaattccgatggcgacaagatcggcggccgctacatgatcgccggcagcgtcgagtatcaatatccgctggccgagcgctggcgcctggcgaccttcgtcgaccagggcaacgccttcaactcgctggacttcccgtcgatcaagaccggggtcggcttcggcgtgcgctgggtctcgccggtcggcccgttgcgcctcgacctggcccatgcgctcgacgacgacggcggtttccgcctgcacttctccatggggccagaactgtga

SEQ ID NO: 342034 - DNA, 645 bp, Pseudomonas aeruginosa; identical to SEQ ID NO: 330051

SEQ ID NO: 342035 - DNA, 570 bp, Pseudomonas aeruginosa; identical to SEQ ID NO: 330052

SEQ ID NO: 342036 - DNA, 441 bp, Pseudomonas aeruginosa
atgcgctcgaactcgattaagggcctcgcgctggccgcggccgtcgccgtgctcggcggttgcgccaccagcaaggaagaactgctgacccatagcgaccgcaccatgatggacatctggcagcaggaaacgggtggcggcggcagtggcaccggccaggtcgcgcgccggcagttgctcgacgcgcgccagagcctgcgccggccgctgaccgacgccgatgtgcaggctgcgcccgtcgagcagatgcgctacacgcgcttggcgcgcaacgaggtttatcgccagttccagcgcctgcccaaccccgatctcgtcatgtatgtgtacccgcacctagcgggcacggaccccgtgccggttccgggctacacgacggtcttcccgctgtaccagcgcgtgcagtacgccatgcccggtgaacggctggaggactattga

SEQ ID NO: 342037 - DNA, 2880 bp, Pseudomonas aeruginosa
atgcgctggaaacttccctggccgaagctggccgcatccggcaccggcgacgaagagaagccggacggctggcagcgccacgtcgaggccttgcgccaggccggcgtccctgaacccggcgcagcggtccagggccgcaggccggcgacggtagccgacgagcaggcgctgtacgacgtcgcgccgtcgttcgcggaactgctgccttgggtggagttcttgccgcagtcgaagtccatgctgctggaggatgggcagtcggtcgctgccttctacgagctggtgccgctgggcaccgaggggcgggagcccggctggctcgcgcatgcccgcgatgccttggagaacgcgctccaggactcgttcgatgagctggacgagaacccctgggtgctccagctctacgcccaggacgagcccagcttcgaccagtacatgcagaccctgcgcgactatgtgcagccgcgcgcccgcgatactgcgttcaccgagttctacctgcgcttcttcggccaccatctgcgcgcggtcgccaagccgggcggcctgttcgaggacacggtggtcacgcggctgcgctggcgcggccagacgcggcgggtgcgcatggtgatctatcgccgtgccaccgggcaggcaagccgccgcggccagacgcccgagcagatgctgaacatcgtctgcgaccgcctgtgcggcggcctggcgaacgccggcatccaggcacggcgcatggtcgcagccgacgtccacgactggctgctgcggtggttcaatccgcgccccgcgatgctcgggcctggagccgaggatcaggagcgcttctatgcactggcgcgctaccccgacagcaccgaagaaagcgaggccggcgaaatcgagctggcgagcgggcgggatttcagtcagcggctgttcttcggccagccacgctccgacgtggagcacggcacctggtatttcgacggcatgccgcaccgcgtgctgatcaccgaccggctgcgcatgccgcccggcaccggacacctgaccggcgagacccgcaaaggggatgccatcaacacgctgttcgaccagatgccggaagacaccttgctgtgtctcacgatggtcgccacgccgcaggatgtcctggaagcggatctcaaccacctggcgaagaaggccgtgggcgagacgctggcgtcggagcagacgttgaaggacgtgcaggaagcccgctccctcatcggcagcgcgcacaagctctaccgggggacgctggcattctacctgcgcggacgcgacgaagcggaactggaccggcgcggcctggacctggcgaacgtgatgctcaatgctggcttgcagccggtgcgcgaggacgacgaggtggcgccgctcaacagctacttgcggtggctgccatgctgctacaaccccggccaggatcggcgcaagtggtacacccaactgatgttcgctcagcacgcggcgaacctgtcgccggtgtggggccgcgctcaaggtacggggcacccgggcatcacgatgttcaaccgcggtggcgggccgatcaccttcgacccgctcagccgcctggatcggcagatgaacgcccatctgttcctgttcggccccaccggctccggcaagagcgccacgctcaacaacctcttgaatcaggtcacggccatctaccgaccgcggctgttcatcgtggaggctggcaacagcttcggcctgttcagcgacttcgcacgcaggctcgggctgacggtaaaccgggtcaagctggccccaggttcgggcatcagcctcgcgccattcgcagacgcgcgtcggctgatcgagacgcccagcgacgtgcagacgctcgacgccgacgcgctggatgaagacccgccaccagatgcctcggccatggaggcggacgagcagcgcgacgtgctcggcgaactggagatcacggcgcggctgatgatcacgggcggagaggacaaggaggaagcccggatgacacgggctgaccgctcgctgatccgtcagtgcatcctcgacgccgccgagcactgcgtggccgacaaacgcacggtgcttacgcgcgacgtgcgcaacgcgttgcgcgcccgcggccaggacccgacgctgcccgaaatgcgccgcgtgcggctgctggagatggcggatgcgatggacatgttctgtcaaggcacggacggcgaaatgttcgaccgcgacggcacgccgtggcccgaagccgacatcaccttggttgacctcgcgacatacgcccgcgagggctacaacgcgcagctctccatcgcttacatcagcctgatcagcacggtgaacaacatcgccgagcgcgaccaataccttggacgcccgatcatcaacgtcaccgacgaaggacacatcatcacgaagaacccactgctcgcgccctacgtggtcaagatcacgaagatgtggcgcaagctgggcgcatggttctggttggccacgcagaacatcgacgatctgccgcgcgcagctgagcccatgctcaacatgatcgagtggtggatctgcttgtcgatgcccccggatgaggtggagaagatcgcgcggttccgcgaactcagcccagcacagaaggcgctaatgttgtcggcgcgcaaagaggcggggaaattcaccgagggcgtcatcctctccaagagcatggaagtgctgttccgtgccgtgccgccgagcctgtacctcgcgctcgcgcagaccgaacccgaagagaaggccgagcgctaccagctcatgcagcaatacggctgctccgaactggaggcggccttcaaggtggccgagaagatcgaccaggcacgcggcatcgattcgccagccctggaactgccctactaa

SEQ ID NO: 342038 - DNA, 786 bp, Pseudomonas aeruginosa
atggaaccgaaacgtccttccattccgatgcaggtccaggtgttccgccgtcgcaacgggcgtccccgctggccctgggccttggccgctgcattggtcgcattgctgttgatctggctcgtcccccggtcgcccgatgaatcctcagcgccgtcgccctcgccggtcagcatgacgcagacgccggggtcaccctggcagatgggcaacccagagggccgcttcacgctgacgctctatgccgacctggaatgtccgttctgccgggagtatttcccgcagctcaagcgctgggtcggcaacaacaccgacgtggccctgcaatggcaccaccagccgctggccgcacacgagcccgccgcgtcggccgaggcgcgtctggccgagtgcgccgccgaaggtggcgggcatgcggcgttctggcaggcgatcgaatgggtctatgcccacacgcgcagcgacggccagggcttgcccgatggcctgcgctaccccgcatcgacgccggccgtcgagcggtgcctggcgagcgagcggccagatgtgcttattcgcgcccaggccgctgaagccaccaagagcggtgtgaccgccacgccgtcgctgcggctgctcgatcgccagacgggtcagaccatcctgctgcaggggccgatcgagggcgatgccttgctgtcggccattgacatgctggcgaccgggaactcggccagcgacacggcggccgcacccaccatccccacatccgaaatgcctgccgacgttgtcggcgacatgcccaggtag

SEQ ID NO: 342039 - DNA, 495 bp, Pseudomonas aeruginosa
atgtctctcgtcgtaaatgactcctgcgtggagccacgttttgccccagcgtcccaatctgatgattggatcatccggcaggccatcgcgctgctggaacaacgtgttttcaaggccgggccgcttcttggccagccacaggccgtgaaggactatctgcgtctgaaactcgtcgcagaaccgaacgaagtgttcgccatcgtgttcatgaacagccagcaccgggtgttggcctatgagccgatgttcaagggcacgctcgattcgactgcagtttatccgcgcgctgtcgtgcagcgtgcattggagctgaatgccggcgcggtgattttttcgcaccagcatccctcgggatgcactgagccgtcgagctcggatcgcgctttgaccgaccgactgaaggctgcgttggcgctcatcgatgtgcgagtgttggaccacatcatcgtcggccaaggcgctccatactcgttcgcggaatccggtctgctgtag

SEQ ID NO: 342040 - DNA, 948 bp, Pseudomonas aeruginosa
gtgacccgaccattcgacctgatgcgccgtctgcatgctggcgtggcttcgttgctgctgctcagcgccacgggcagctacgccctcaacactgccaccatcgtcggctcggtagcgtcacccgactgcctcgaataccgcgtcgttggcatctgctactggctctattgcacctggaccggctgcacggtgcgcacgtccatcaaggtgcgccactacatccccgatgcggtggtgtcgtcgtactcgaataccggcgaaaacccctgggtcgaggtccgggcaatgagcacgcccaacccgtccgcccaagcgggcggcgatggaaccacgaacgaggatcacgaaaacaacctcgccaagttcaaaaactcggacgttatcggccaccccggcgtcgaggtgttcaaccagttcgtctcgtcgtcgggttacttctgcgagggcgcgggcacggcgttcatgccgtacttgctcagcaccttggacacgctggcctggcgctacaacgtgcccgagatggcctacccggaagcgctgattccgggccggcgtgaggtcggcgcacgcaccacgatgaacctgtggggcaacgtgtatccccgtggcggcttcctgcaccagaccgacgacttcaaggccggcgcagtggtggcccagcgtgcaggcgatgtggtcacgcgccgggggcagatccacgtctatcagccgttgcttgccaactcccgcgacggctactggccggcaggcgcgctgatggagggcgatgcctcgaccggaaagtggcaagaactcacgcccgtcctgtcgtcgtcctgcacggtcttcccgcgcagcggctttcttacccaggcgcagcaaggcgactacgcatgggcgctgtggcggccgtatgcctgctgcgaacgccggggccaagtgttcctgggcagcgtcgattttctctga

SEQ ID NO: 342041 - DNA, 1398 bp, Pseudomonas aeruginosa
atgaagttccgtcctgcattcaatccgttctcccgccgggcacgtcgcacggagatcgtcctggcgctggccggcgccctcgcgctgggcagcggcgtggcctggggtcaactgggctaccagaccagcggcagtgtcatcggcgatgacgtcatgtactcgatcggtggcggcaacgccgtgtcgatgggccgtgcggccggcatgcgctctctcggtgtcggcgtgggttggaacagcaacttgatctgcggcgacatgagcatccagaccacgttgaagaaccaacttaacggcatcaccaacggcttccagcaaatcatgtcgtcggtgatccagagtgccaccagtgcggtggcatcgttgcccgcgctgatcatccagcgggccgatcccggtttgtacaacctgctcaccaatggcgtgctgcaggcgcgactcgatttcgaccgcagcaagctgacgtgccgtgccatggccgagaagatggccgaaatggcgggcggccagctcggctggagccagatggccgaagggctggcgctgcgcgatgccgtgtcgagcacggatgcggtctcggccatcgagcaagccgagacgcgccgcggcaatgacggcgtgccgtgggtcgggggcagcaacgcgggcggctccggccagcccgcgatcaaggtcgtcggcgatgtcacccgcgccggctacaacctggtcaacggccgcggcgtgaccgacacctcatccatcgcgccggccagttgcagcagcctctcgtgccagacctgggcctctccgcaggccgccgtcgagtgggccacgcgcgtgctcggcgagaaggagcagcgcacgtgcgatgcctgcaccaagaccgagacgacgccgggcgtcgggctcacgccgctgatccaggaggagtacgacgccaagctgcaggcgctccaggacctggtgaccaaggccaagaacacgacgccggagaacctgcgcgaagctggcagcgcgtcgctgccgatcacgcgcggcgtgatcgaggcgctgcgcgacgagcccgaccagcacctgctgtcgcagcgcttggcgtccgaagtcgcgctggcgtccgtgctggagaaagcgctgctgctgcagcgcacgctgctcacgggcaagaaggagcccaacgtcgcggccaacgagcttgccgttgaggcggtgaaccacgagagcgacacgctcgaccgtgagattcgcaacctcaagaccgaactggagctgcggcgcgagctggcgaacaactcacccatggcgatcatccagcgccacggcgcacgtgcggccggctcgcgcggcatctacgagggcgatcctgtgccggaccgtctcgaccagctccagaagggcaacccggggagtcggccatga

SEQ ID NO: 342042 - DNA, 372 bp, Pseudomonas aeruginosa
atgagcccggcgcgcatggcctggcggccgctgcgctggttgttcagccggcgcgcggcgaagacgctgctgtggctggtgctgatcgttgccgccgccgtgggggcgaacgtcgcgggcatctacctagtcggcagcgttgcaggctgggaacggtggctgacggcctccgcagggtatttcttcatctggcggctgtgcgtgtacgcggcaacggcctatggatggttctggatgcgccgccgggtgctcgcccgcgaagaccaaagcgggacagatgggcaggcgcggcgccggctgatccgcaccgaggtcgccagcgtcgtcgccatcgtcgcgctggaaaccagcctgttgatggaggccgcttga

SEQ ID NO: 342043 - DNA, 372 bp, Pseudomonas aeruginosa
atgaacacgacgacccgcaccagcaccgcagaacgcctcggccgcgcctttggccgcggatggcgcgcctatgcgcgcggcgaacggcgggcgtcgaattggctggtattcaggggtgtgccgcgagctggtgctaccgcacttgtgtgggtcttcaagctggctgtgctcggggtgctgctctacgttgctttctggttcgcactcgtgctgctgggcgtggtggtggcaggatgggctatgaatcagcaccatcccgatgaagaagggtttgaactgcagtacccaaccattgaggaactgcgggccacgcctggctacgatcccaacctgtacaacgatacctcccacgagatgtaccaagacgactga

SEQ ID NO: 342044 - DNA, 1872 bp, Pseudomonas aeruginosa
atgctctccctgttccagcggaaacggcctccggtcgctgccgcgacgtctccagcccccgccatcgacctcccgaaagggttgatgcggccggagtcggccgcatcgctgctggccaccccgcgccggcagaagctgctggaacacatctggcagcgcacctcgctctcgcgccggcagttcgccaccctgtaccgcgcgccactggagcgatacgccgagctggtccaggtcttcccggcctccgaagcgcaccaccacgcctacccgggcggtatgctcgatcacggcctcgaaatcgtcgcctacagcctgaagctgcggcagtcccatttgctgcccatcggggccagccccgaagaccaagcggcgcaggccgaagcctggactgcggccgtcgcctatgccgcactgcttcatgacatcggcaaggttgccgtcgatctgcacgtcgagctggccgacgggagcacctggcacccatggcacggcccgctgcgccaaccgtaccgcttccgctaccgcgacgaccgcgagtaccggctccatagcgccgcgacaggcttgctctaccggcaactgctcgaccgcgatctgctggactggctcagtggctatccttccctgtgggcgccgctactctacgttctggccgggcagtacgagcacgccggggtactgggcgagctggtcgtgcaggctgaccgcgcctccgtcgctcaggaattgggcggcgatcccgcgcgtgccatggccgcgcccaagcactcgctccaacgcaagctggtcaacgggctgcgctacctgctcaaggaagagctgaaactgaaccagcccgaagcctccgatggctggctcaccgaggacgcgctgtggctggtgagcaagacagtctcggacaagctgcgcgcgcacctgctgtcccagggggtcgatggcatccccgcgaacaacacggccgtgttcaacgtgctacaggatcatgccatgttgcagcccaccgcctccggcaaggccatctggcgcgcaactattaccagtgagagtggctggtcccatgccttcacgctcctgcgcctggccccggcgctgatctgggagccctcggagcgacccagcccatttgcgggaaccgtgaccgtggacaacgccggcgaggccgaggacgggccgcgcccgtccgcgcacgacgctgcactgcgacccggaacagcggcggcaacagagaaggagcctgcagcaagcagccatccagatcagtcgggcgggagtcgcgccatacctcccagcccgcagcgcaatccggccgacccgctggaaagcatgctggcgatgttcgaggcaacgcctgagccggagcagtccgtcgaagccccgccagagggtgccgacgatgcagcggcgccgctcgaccatcccgcatcggcccctggtccttcggcgccgaccgccgcgcctgccgcgcacgattccgcctcatttaccgggcggccatcgggcgagcatttcatggcctggctgaaacaggccgtccagacccgcaagctcatcatcaatgacgccaaggccctggtacataccgtgtccgacacggtttacctgatcagccctggtattttccagcgctacgcacaagagcatccaaacattgggccgcttgcaaaggacgcggccctgcagaactggcagtgggtgcagaagcgctttgaaaaactcggactccacaggaaacagccatcgggtctgaacatcaggacgtgcgaggtcatggggcctcgcaaaacgcgccaggtgcatggatatttgctcgaagatccatcgcacatattcgatgccgttccaccgaacaatccttatctgtcgctcaaatag

SEQ ID NO: 342045 - DNA, 873 bp, Pseudomonas aeruginosa
atgcgatcgatatcatcagccacctccctgcacgtcgccatttcggagggcatcacagtcgccaacgacctgccgttcgtgctgttcggcggcatcaacgtcatcgaggatctcgatacgaccctggctgcggccgagcacttcgtggaggtgacgcgcaagctggaaatacccttcgttttcaaggcgtcattcgacaaggccaatcgctcgtcgatccattctttccgaggtgtcggcctggacgaagggttgcgggtcctcgatgcggtcaagtcgcggttcggatgcccagtcttgaccgacgtgcatgaggttgagcaggccgtgcaggtcgcagccattgccgatgtactgcaagttccggccttcctggcccggcagaccgatctggtggtcgccattgctcgcaccggtcgggtagtgaatgtcaagaagccgcagttcctgagcccgggccagatcaggcatgtcgtccacaaactgcacgaggctggcaacccgcgcgtcctgttgtgcgagcgtggcacgcagttcggctacgacaatctcgtcgtggacatgctgggcttccgcgaaatgagccttgccagcggtggcctgccactggtgttcgacgtcacccatagcctgcagcggcgagaagcggatgcgttggcttcgggtgggcgtcgccaacagttgcccgaactcgcgcgggccggcatggcggtcggcatcggcggtttgttcctcgaagcacacgccgacccggcgcatgcacgctgtgacggacccagcgctctgccactggacgcgctcgaaccgctgctgcggcaggtcaaggtggtggaccaactcgtcaagtcgttcgagcctcttcggatcgactga

SEQ ID NO: 342046 - DNA, 258 bp, Pseudomonas aeruginosa
atgccccaggccaacaccccgtacatcctcatctacagcactccgacgtgcccggactgccgggcgctgaaggcgtggctgtcccagcagggcatcgcgtttgaagagcgcgacctgaccgacccgaagatttccgcggaggctaagtcacgaaccggcgtgcgtgtggccccgatcacgatcgtcggcgacgacgtgttctatggcaccttcgcgagccagaagccgaggctgatgaaggcgctcggtcttcagtga

SEQ ID NO: 342047 - DNA, 699 bp, Pseudomonas aeruginosa
atgaatctaaacaagctcagtctcatgttcattgctggcgccgtgctggttgctggaggtttgacagtcgtccaaagcggcctggagtcctccggcaaaattgaaccgccgaccagtgccagcggcggacatgggcatgacataccttccagcatgtccgcgatcaatagcccctccaccattgcctatcgtgccgtgaccaatgagatgcacgcgggaatgggagcgcagttcactggcaacgccgacggcgatttcatgcgcggcatgatcccgcatcaccagggcgcgatcgacatggccaaggtggcgctgcagtacggcaaggacccggaggttcgcaagctcgcccaggacgtcatcaccgcgcaggaagacgagatcgccatgatgaaaaagtggctgggcgacaacggccagcaggcgacgaccggcagctcgggcgatgcctcgacggccgcctatcgtgccggcaacgaccgcatgcatgcggacatgatgatcgacttcagcggcgacgcagatgtggatttcatgcgcggcatgatcccacaccaccagggcgcgatcgacatggccaaggtggcgcttcaatacggcaaagatccagaggtcagcaagctggcccaggaagtcataaccgcgcaggaaggcgagattgccatgatgaagagctggctagccgctcggggcaagtga

SEQ ID NO: 342048 - DNA, 417 bp, Pseudomonas aeruginosa
atgtcgcaacagcaacagccaaaagttcacgacgccagcgacttccctatagtccgattcgaaggctccagcatctacgaaggctacggcgccccctggtgcgcggagatggatgagttcctcgctcgcggcaagccctttgtcctcatctacgtcgcaggcgggccggacgaggcacacgacgatcgcgtcatgcgcggtgcttggctgaaaagccacaaggagatgctggacggcatcttgctggcgctcatacatgtagaacccgaaccgaccaagcgagcgcagttggaggaaatgctgccgatgctcgtaaaggcctttggcacgccgcaagccgcgcgcgccagccgtgacgaggcagagagtctgggccggcacgttctcgccggtggtcgcatgaacgattcggtatga

SEQ ID NO: 342049 - DNA, 2259 bp, Pseudomonas aeruginosa
atgaaaaagtcagaacataaatcgcgtgctacaagcacgaattacgtgggtcgcaaggtcatcggcccgttcagtctcgcgctggtgctggccgcgccaggggcagatgcacaagggctgggtgacccgggaaagggcgaggtgcctgaggctgtaacgctcccagcggtaacggtcaccggggaaacctcctcggagaccaccgaaggttcaaattcctacaccacaccacgcacgtctgccgccacgcgactgccacttgccatcagggacacgccccaggctgtaactgtcataacccggcagcacatggaggatcagcagctcaacacaattcaggatgccttagcacagtcaacaggcgtcggctctcgcaccttgggcagcgagcaagtgactttccatgcaaggggcttttctattgatagcttccaatacgacggtatcccgaccggcttcgtcaatggcgcaagctttctagacacggccttctatgaccgcatcgaaatcgtgcgcggcgccacgggcttgctcacgggcgcaggcaacccgtctgcatcgatcaacctggtgagaaagaggccgacgcgcgagttccaagcaaatgcctcggtgagcgcaggatcatgggacaactatcgcagcatgctagatgtctccactccgatgaccgaggatggccgtgttcgcgccagaatcgtgggcgtcactcaagatcggcattcatatcaagatcgataccagcagaagaagaacgccttctttggtttagtcgaggtcgatctcactcccgataccgtgctgagcatgggctatgactatcaggacatcaagcccaaaggcgtcacctggggcggcgtgccgctttggtttagcgatggatcaaacacaaattggtcgcgctcgaaatccatggcgcctgattgggcccgctgggacaaccggttagaaaacgcgttcattggtatcgaacacggattcgaaaatggctggaaactgaacgcgaccattaccaatcagcggtcgaagtccaatgctcgactcctctcgccactcggttatccagaccgagacactggcttggggatgatcccgctggcgatctctgattcaactccgtccaggcagaacagcttcgatacaatggtcagtggtccattcgagttacttggccgcaagcatgaactggtcctaggggttctggcgtctcgtcgaacggaggatgaatacaacagtggatttgtttatcctttaacgcctatgccgagtattttcggctatgacggccagtatcctgaaccaaatttcgcagcgaacggtttcaccagcacgcataccactatcgaacaaagcggcgtctatggcgccgtgcgcctttccctaacggattccctgaaagctattctaggcgggcgattcaacaactataaactcgacgaattcgacggcatcacatctacgcattacaaaaagactgccaagttcaccccatatgcaggtgtcgtgtacgacatcaacgacacttactcagcctatgcgagttacacggaaattttcaatccgcagtcgtcttaccggaatgtcaacaaccaggtgctcccgccaaccaatgggaaaaacaccgaagtcgggttgaagggtgaatatttagacgggcgcctgaatgcttcgatcgccttgtttgaaacgcggctcgataacttggcgcaggcggaaaactacgcactaccaaatggtacgtgggcgtatcacaccgtgaatgggacaaagtcgagaggtgtcgaattcgacctccagggggaactggccgatgactggaacatctatgggggcgttgcccacttcaattccactgacgctacgggcgagcggctaagtgcgtaccttccgcgcacaactgcgcgtctattcaccacctatcggcttcccggcgattggtctaagttgaccgttggcgggggggtgacgtggcaaagcggcacttaccagagcgcaacaaacccgcaaggtgccagcgtcaatgtggaacagaaatcttacgcactagccatccctgatggccaagtatcgggcaacacgcaacatagacctgatgctgaccgtcaacaacctaaccgatcggcgctacacgcttatgagcgggttctacaaccaagtcgtctatggcgcgccgcgcaactttatgctgacgctgagctacaagctctgactgcacgatctatccctcgctatccatcgtcgggcgacaagatagcctga

SEQ ID NO: 342050 - DNA, 699 bp, Pseudomonas aeruginosa
atgactgatggcaccacacttccgcacgcgccgaggcgctccctggtcgacacgacgattgagctgatccgccgtcagatcgagaatggcgtctggccggtgggtgagaagattccgaaagagcaggaactggctgacatgttgaacgtagctcgcaacaccgtgcgggaagctattcgcgtgctgtcgcatgggcaggtgcttgaagttcggcaaggagatggcacctatgtgcgcaccaatgtcgatcctgtcgaggtcgtgcgtcgtattggccgttcgagcctgcgcgagcaccttgcgctacgctgcatgctcgaaatcgaatccgcgcggctggcagctatcaaccgctccaaggcggacttggcgatgttgcgccgtctcctgaaggcgcgcggggagcaaagcgatcatgaatcgcgcgccttgttcgtggacgccgacacggcctttcactgtgccattgcgcgggtatgcggcaataatgcgctgtccgagttgtaccgctacttttcgaactccgttcgaatgaacactttggccgtactggaggatgaagacttgcctgagcctggcctggatgtccatgaggcgatcgtcgatgcgatcgaatgccaagacccagacggagccgcagaggctgtgcgtaatgtcatggcaccgctggtcaccgcgctgaatcatcgttcggcgtaa

SEQ ID NO: 342051 - DNA, 2064 bp, Pseudomonas aeruginosa
atgaacatgttgcttctgaaaggtcggagctatgcgcaacatgcgctcacggcgctgacttctgtgaacgtgcttacgccgggttgggcctatgtattccgctccgcggctgcggtcgcgctgacttatgccgtggcctattcgctccaactagaccgcgcctattcagcggcgaactcggtcatgctcgtcgccagcgcaagtcaaggtgccacgctcggcaagggcgcgtcgcgcctggccggaacgatcattggcgggattgccgctatcgttctgctgggtctgaccattcaggcgccggcactctttctgatcggctatggcctgtggctgggcatgtgcagcgctgcggcgaccgtatcgcgccacttccgctcgaccacctttgcggtccttggctacaccgttgggttcgcggcttatgaggtactggaaaatcccgcacatgccttcaacggtgtggcaacccgtatagcgactgttgcagtcggtgtcgtctgtcttggcgtggtcagcgccctgttctcacgccgtgcaacacgtgagaagctggagtcggccatcgctttgcaattggggaaagtgggtcggctcatccttgcgcggactcgtaatggcggcgaacctgcctcccaagccacacccgagcagatcgccgcactgtttgccattgacgacctcctcgaagtcagccgcgcggagtcaccggaggtcgccgttcgtgccgttgccgtcagggatggcctggccgcactctttggcgcactcctaggagcgacggagtcctccatacgactggatatggaagaccacacccagcgcgcggcagcgggccaaactgtcgagttgctagcccaagccatcgagctggtcgagagtggcgaagaaagccaacttaaagaggcccttaaaaaagtggctcagcttcgtcgaaggctaaaccggatggtggacgagaccgagtcgcaaggaggaagttccaccgcactcatcaaactggaccgtctgatagaagtgatcagcgactgggaggctgcactcatcgggttggtccaactgcacagcccgcgtgcgcaccgtactgccagctttcgctttcatcgggactggcatagcgcgatcaaaaacggaatccgcgcactgatcttcatcactctcgtcggcgaactgggtttgctgacgggctggcgcaattggcaaactgcgatcttgctgcttgctccttacggcattctcatggcgatgacaggcaacccggttgcaggcgcagtgtccttcgtcaaaggtacggcggcagccatagcgcctgccttcttatgcggatttttcctgctaccacatgtgcagggctttccgttgatgatcgctgtgatgctgccattctggatcgctggcttctacgcaatcacgaaaccaaactatgcgtttgccggaatgggatacctggtcgccttcaacacgctgattggagagaaaaacctgatgagttacgacatgtcagcgttcttcaattacgcgcttggctggatgatcgcagttatcgcaaccgtctatgtcctaaaactgatcctaccgcacgatccgcgcagaaatgccggccgcttaagcaatgcgattcgcaacgatgtccgccagttgatcagtagcggatacagcgggccgcggctagtgtgggaacacctgcagcaccatcgattggccgggattgtggcgaacctaaaaggagataaagattacgcctctacgctgctgagcaagtgtgttggtgtgctgcatttaggtcggtcctcggcgaggctgcacctaacgctgcaggatactgaggtgcccgcctcggtgcgacaacaagcgtccgaggcgttgaacgaggccgggaatcccacgcaagggacgggcaagcgtctggccgttatcagtgaagtcgtccacgcttctgcagatacccaccagacgaatcgaagggctatccatcgtatttccgcctgcatccgagatatgggtgggttagtcgaacttcacggcgactggttcgccaccaacgatagaaactcgcaatgttaa

SEQ ID NO: 342052 - DNA, 912 bp, Pseudomonas aeruginosa
atgaaaatgacattaaaacctctattcaggatttctctcacgcttctggcagtcgctggaatggcatggctgatctcggtgctatggcgcgagtatgtagtttccccttggacgcgcgacgggcgcgtgagtgccgaagttgtacagattgccccggaagtttccggcaccgttgtcgaagtcgcgatcaaggacaaccagcatgtgaaccggggagacgtgctctaccggcttgacactgaggatctcgaacttgaagttatggagaagaaggctgagcttgagcagcatgaagccgacctcgcaattaagatgaatcttgctaaacggcgcaatacgctcggtggcgacatcatcgccaacgaaagaatcgatcaagccaacggtgacgtgcgtgcagtgcgggcggcagtggatcgtgtacgagctgagctggccaaagccgagctagatgtcaggcgagcgacggtcgtggcacccgttgacggctatatcacaaatctccacctacgcactggcgactatgcgaccaagggtaccagcaaggtcgcgatcctagatccggacagtttctggattaccggatatttcgaggaaaccaagctcaggcatatcgctcccggagaccaagcgcaaattcgtctcatgggcttcgattcactgatccaaggtcacgtttccagtattggtcgcggcgtggcggacaccaacgactactccgatcagcatggcctgccgagcgtcagtccagtcttcacctggattcgactggcccaacgcatcccggtgcgtgtgcatatcgacaaggtgcctcccgacgtgaggcttgctgccggcatgacgtgcagtgttgccgtgggcacgtcaatccccaaggggcgtctgctcgcttgggctcaacaggtcctgtga

SEQ ID NO: 342053 - DNA, 1464 bp, Pseudomonas aeruginosa
atgcgaattccaattacagctgccatcgtcctcgcattgttatccggttgtgcagttcctcacgccgttcgctacgaaaagccggtaccactcgtgccgaacgcttgggccgagcaggagaaaatgcagcatgcctccgacaatgtggccgagcttcagacgtggtggaaagccttcaacgaccctctactcaatcgtctcgttgaccgcgcgcttgcaaacaatcttgacctcaaaatcgcctcgcagcgcctgctggcagcgcgcgccgagcgcgatgccatttctgcggatcgtgggccgaagttaggcattgcagcgagtaccttggatcaacgcagtagtccactcgttgattggcctagaggaattggcgtgtctaacgcccaaacagtcgagtttgaggcaagttgggagcctgatctgttcgggcgaatcaagcagtctattgaggcggctgatgctaccgcaggaagcattgaggaggatcggcgggccattctcacgagcctgctggccgaaattgcgtcaaactacatcgagctgcgttcggagcaacagcgcttggcgatcgctgaacgcaatgtcgcacgtactaaggccacctacgacacgaatgtgcgtcttcgcagtgcagggatcgttgacgcatctagtctcacgcaggcacacgcggaatggcaggccgcggtcgcgcagttgccgatctggcatgccagggtgagcaaacattctcacgcaattgccgttctcgtcggcggatttcccggcgattggcaagtcgagttggcgcaatccacctctccggttcccgcccccccagcgttgcctgtgtccattccctcccaggttctacgggatcgacccgacattcgggcagcggaacgaaaacttgccgcggcaacagccaaagccaatgtcgccgttgccgatctctttccccgcttccggatcccactgacactgggaacagcggcgagcggttacggttcacttttttcagccgggagcctgatctggagcgtgacgctggcaggctcggaaactttgtttgactcagggcaacgcgaggcgcgcattcgtgccgcgaaggcaaccacggaaggccaaaggctggactaccagcgaaaggtccagatcgctttccgcgatgtcgaagatgcgttgacccaaacccatcaggaaggtgttcgcgaggagtccttgatgagggcacaggaagacagccaactgacctacgatcgcgccttgagagaacgcaaggttggaacgattgattacctaacgttgctaaccgccgaacggtcgctttatttggctgaagaccagttgatcgaaagtaaggccaagaaagcgctcaacatggtcagcctagccaaggcattaggtggggggtggcaaacggcttatccagaaaccccttccgaaaccgcgcaatccaccaagcagagcacaatcaattag

SEQ ID NO: 342054 - DNA, 456 bp, Pseudomonas aeruginosa
atgtttcttatcctggccccgttcgcctatagcgccacctcgcaggaagcacaagagccagagaatgtgaaagtggttcgacaataccttgaagcttggaatagcgggaaaaccaatgatatgaaaaaagttctcgactccaacgtcgtctatttcaatactagtaatgaagtaccccgcaccgggccggaatccatcaccgaagtctcgcagtttctgaagcaaattttgcctgatcgaaaaatgaaaatccgctcgcaaccgatttcatccgacgatggcgtagcgattgaatgggaattcaccgccaccaagagaaacagtggcgagacgtcaccctccagcacgaatatcagttatttcggtgcgagttttttccgcgttttgaacggaaaaattgtctacgcaagcgattactacaaccacaacaccatgcagaagcagcttcagccgtag

SEQ ID NO: 342055 - DNA, 504 bp, Pseudomonas aeruginosa
atgaagctaccgactacaaaacaagaactcctagataaggttcgcaccagccaccgaaagctggaggtggtaaccgccacggtccccgcggaccactacaggcacatcgccatgatctggcaagaacagcgccgtcacaccagcgctgcaatgatcctggtggacgtcatcgtctggaacacgatgatcctgcagttcgcgcatgatcggacgcctggaccttcggcgtccttttactcgccgagtgcgatggcgcagcgggccgagcgtctttctgccggcttccagcgccgtttcgcgggcagagaccttcgcgagctggaagccatgctcacggagggacaggaccgggtgctcgactgcgtggcgcaccattcgaacgcctcgcttttcgatcccgcgttgagcccgatgaagaccctcgggcgcaagatccagttcttcacctccaccgcctacgacgacgcgctgtcgaggctgcgccagtggaagcaggtgctgtag

SEQ ID NO: 342056 - DNA, 387 bp, Pseudomonas aeruginosa; identical to SEQ ID NO: 162924

SEQ ID NO: 342057 - DNA, 3177 bp, Pseudomonas aeruginosa; identical to SEQ ID NO: 162926

SEQ ID NO: 342058 - DNA, 2190 bp, Pseudomonas aeruginosa
atgcgcgtcgagggcatggactgcgccagttgcgtcggcaagatcgaaacggcgctcgctcgcatggatggcgtgtccgatgcccgcataaacttcaccgcagaaacgctggaattgacgctcgcgtctggcggccccacgcagctcggccacatcgagaagaccatcaagagcctgggcttcggcgtctccgacgtgcgccgccatgatggctcagcacccgcggccccagcagcagcatcgacggcgcgccatcagcgctggtggcagacgaagaaaggcaagcacgtgctgggcctgggcggcctgatgggctcggcctacgcgatcgcgcagttcgttcctggctacgctgaatggatcttcgccgctgcggtgatcgcgggcgtgctgccgttcgctcgcaaagccttcgcgctggctgtgtcaggctcgccgttctctatcgaaacgctgatggtcgtcgcctcgctgggcgcgctcgtgataggcgaggccgaggaagctgctgccgtggtgttcctgttcgcgatcggcgagctgctggaaagcgtggccgccggccgcgcgcgcgccggcatcaaggcgctggcctccctggtgcctaagacggcggtactgctcgatgccgcgggcgggcagcgcgaagtgcccgccgcttccctgcgcgtgagcgaccgcgtgctggtgcgccctggtgaccgggtgcctgcggacggcaagatcctccgcggtgaaagcagcctggacgagtcgcctatcaccggcgagtccgtaccgcgtcaaaaggctatcggtgccgacgtgttcgccggctccatcaacgtcgatggcgtgctcgaagtacaagtcgagaagacggcatcggacaacaccatttctcgcatcatccaactggtggagcaggcgcagtcctccaaggcgcccacggctcgcttcatcgaaaagttcagccgctactacacccctgccgtcatggccatcgcggcgttgatcgtggtggttccgccacttgccatgggtggcgactggggtacctggctgtaccgcggcctcgcactgctgttgattgcctgcccatgtgcgctggtgctctccacaccggcggccatcgcctcgggccttgcggtggccacgcgacggggcctgctgatcaagggtggcaacgcgttggaaaccatcggccgcgtgcgcgccattgccttcgacaagactggcacgctgaccgagggcaagccgcgcatcaccgaggtcctgcccttcgggctgttcaagcatcaacaggtccttgcgcttgccgccgctgtcgagtccggctcaaaccatcccttggcgaaggccattgtcgcccatgccaagagcctggacgtggcgattccccaggccacgggcgcatcggccattgccggcaaggcggtgcgcgccaccgtgaacggcagtgcgctcgctgtcggatcgcccgcccatgcggaacagacggccacgctgacagccgcgcaccgcagggaaatcgacaagctggaggatggcggcaagaccgtggtggtcctgttcgacgaagccagcaagaacgttctgggcctgctggccctgcgcgacgagccccgccgcgacgcgcgcgaaggcgtggcccagctcaacgccatgggcgtgcgctcggtcatgctgaccggcgacaaccgccgcaccgcgcaggcgatcgccggcaagctgggcatcgagtgggaggccgagctgctgccgcaggacaagctgcgcttggtcaacgagatgaagcgtgatgccaaggtggcgatggtcggcgacggcatcaacgacgcgccggccctggcgaccgccgacgtgggtatcgccatgggcggcggcacggacgtggcgctggaaaccgccgatgccgcgctgctcaagagccgcgtcacggacgtggcccacctggtggccctgtcgcgggcgacgatggccaacattcaccaaaacgtcgtattcgccattggcctcaagggcttgttcctggtcaccaccgtgttgggtatcaccggcttgtgggttgccgtgctggccgacaccggcgccacggccctggtcacgctgaacgcactgcgcctgctgcgcttcaagggcgcgccggaggccaaccacggcgacgacgccgggcgtcccaccaccttgtccgtgccgtctgcccgctga

SEQ ID NO: 342059 - DNA, 348 bp, Pseudomonas aeruginosa
atggtcatgcccgctgcaggccccgtgatcgtgaccgtggtcatgggcatgggcatggccgtgagcatggccatgcccatggtcatcaccgcacgctttgccgtgcgaatgatcgtgcccgtggtcgtgggcatgcccatggtcatggtggccgccgcagccggcgtggtcatgcgcgtgggccgcatggcacggtgcaggtgctgcggacatttcggacgcgggcagtgcctgcacgtcgaagcccagggaccggattttcttggcaatgtcgcgtgcagtatttcggctacttgtgctgcgcgtcaacgtcagcgtctcatttgtaaaattaacctgtacatttga

SEQ ID NO: 342060 - DNA, 570 bp, Pseudomonas aeruginosa; identical to SEQ ID NO: 162930

SEQ ID NO: 342061 - DNA, 378 bp, Pseudomonas aeruginosa; identical to SEQ ID NO: 162931

SEQ ID NO: 342062 - DNA, 1023 bp, Pseudomonas aeruginosa; identical to SEQ ID NO: 162932

SEQ ID NO: 342063 - DNA, 1329 bp, Pseudomonas aeruginosa; identical to SEQ ID NO: 241724

SEQ ID NO: 342064 - DNA, 1116 bp, Pseudomonas aeruginosa; identical to SEQ ID NO: 241722

SEQ ID NO: 342065 - DNA, 3147 bp, Pseudomonas aeruginosa; identical to SEQ ID NO: 241721

SEQ ID NO: 342066 - DNA, 399 bp, Pseudomonas aeruginosa; identical to SEQ ID NO: 162939

SEQ ID NO: 342067 - DNA, 1428 bp, Pseudomonas aeruginosa; identical to SEQ ID NO: 162940

SEQ ID NO: 342068 - DNA, 357 bp, Pseudomonas aeruginosa; identical to SEQ ID NO: 162941

SEQ ID NO: 342069 - DNA, 228 bp, Pseudomonas aeruginosa; identical to SEQ ID NO: 162946

SEQ ID NO: 342070 - DNA, 597 bp, Pseudomonas aeruginosa; identical to SEQ ID NO: 162949

SEQ ID NO: 342071 - DNA, 894 bp, Pseudomonas aeruginosa; identical to SEQ ID NO: 162950

SEQ ID NO: 342072 - DNA, 309 bp, Pseudomonas aeruginosa; identical to SEQ ID NO: 162951

SEQ ID NO: 342073 - DNA, 288 bp, Pseudomonas aeruginosa
ttgctggacgagaggttggcctccctgatgccagtggaccaagagaacatcctgcctgcaacttcattcgagatgatggcgctgtgggtttcagccggctacggcatcggcgtatgcgcgcaatcgcgcatcgagcgtgcccatcaatggggggtaagcatgcgaccgctcgccgatggcccctatgagatcgtgacgtacctccaacggccccacgcgcaagcagattctgctgccaagcgtttcgagcgcagggcgctgcagatcgccgaggcaggcgccctgtag

SEQ ID NO: 342074 - DNA, 519 bp, Pseudomonas aeruginosa
atggcaacccccgcctatatgtccatcaccggcaccaagcagggcctgatcaccgccggcgccttcaccgaggattcggtcggcaacacctaccaggaaggccacgaggaccaggtgatggtccagggcttcaaccacgaagtgatcatcccgcgcgacccgcagtccggccagccgaccggccagcgcgtgcacaagccggtggtcatcaccaaggtcttcgacaaggcctcgccgctgctgctggccgccctgacctccggcgagcgcctgaccaaggtcgagatccagtggtaccgcacctccgccgccggcacccaggagcactactacaccaccgtcctggaagacgcgatcatcgtcgacatcaaggactacatgcacaactgccaggacccgggcaacgcccacttcacccacctggaagacgtgcacttcacctaccgcaagatcacctggacccacgaagtctccggcacctccggctccgacgactggcgctccccggtcgccggctga

SEQ ID NO: 342075 - DNA, 732 bp, Pseudomonas aeruginosa
gtgttgcgggccgcaacacccagcttgccggcggcgccgaggtcgatccctggtgaagtggttcgggccgaatcacccagctcgccgccggcgctggggtcggtccctggtggggtgattccagtggaatcacccagcttgtcggcggcgccgaggccggatcctggtgaagtggtgccagtggcaccacccagctcgccgccggcgccgaggccggatcctggtgaagtggtgccagtggcaccacccagctcgtcgacggcgccgaggctggatcctggtgaagtggtgccagtggcaccacccaactcgccgccggcgccgaggccggatcctggtgaagtggtgccagtggcaccacccagctcgtcgacggcgccgaggccggatcctggtgaagtggtgccagtggcaccacccagctcgtcgacggcgccgaggcctggtcctggcggagtgttgccagtggcaacacccagctcgccgccggcgccgaggttggttcctagtgaagtggttccagtggagccacccaattcgccggcggcgccgaggtcgatccttggcagagtgtttccactggaaacacccagttcgccaccggtgccgaggtcaggacctggcagagtgatgcgggccgcatcaccaaaaaacacgacgcccgaccgagactttctcatggctcatcaccccgctcggatggcacgctcgatccgtgcctgggccgaatga

SEQ ID NO: 342076 - DNA, 351 bp, Pseudomonas aeruginosa; identical to SEQ ID NO: 336003

SEQ ID NO: 342077 - DNA, 1122 bp, Pseudomonas aeruginosa
atgaataatacgatacttccactgaacggtgaattcgccccgctttccgttgatcgcctcgatgccgaggcccgtgccgccgctgccgcattcgttgccgccggtaccgccgccaataccgtgcgcagctaccgcagcgccctcgcctattgggccggctggctgcaagtgcgctacggccagacactggagatggggccgctggcggacaccgtagcggtgcagttcatccttgatcatctggcgcgcccggcagacggtgactgggttcacctgctaccgccggcgctggatgccgcgctggtcgacgcaggcgtcaaggccaaactcggcgccctgagctacaacacggtacgccatcgcctggcggtgctcgccaagtggcatggtctgaagagctggccgagtccgaccgagacggcggcggtgaaaacgctgctgcgcgaggcgcgcaaggcccaggcgcgccagggtgtcagcgtgcgtaaaaaaaccgcggctgtccgcgaaccattagaagcgatgctcgccacctgcaccgatggcgtgcgcgggctgcgcgatcgcgccctcctcctcttggcctggagcggcggcgggcgccggcgctcggaagtcgtcggcctgcaggtgggcgatgtacgtcagttggatgccgccacctggctctacgccctgggcgtcaccaagaccgagactgaaggcgtgcgccgggaaaagccgctgcgcggccctgcggcacaggcgctcgcggcctggctagcggcggcgcctgccgctacggggccgctgtttcggcgggtctaccgtggcggccgggtcgggacggcaggcttgtccagcgaccaagtcgcgcgcatcgtgcagcgtcgggccaaactggcggggctcgagggcgactgggcggcgcatagcctcaggtcgggcttcgtcagcgaagccgggcgtcagggcgtgccgctcggcgaggtgatggcgatgaccgagcaccgcagcgtcagcacagtgatgggctactttcaggcagggacgctgttgggtagtcgtgcgaccaacctgcttgccccggtcctccctatgagagcggatgtaaacgcgcgctccgatgagccacaacgttga

SEQ ID NO: 342078 - DNA, 252 bp, Pseudomonas aeruginosa
atggcggtaggtgtaccggaaaccgatgtattcgctgcggcggacgcggtcttggcccgcggtgaacgcccgacggtggagcgggtgcgtctggaactgggccgcggcagcccggcgcgggttggcgctttgctcgatcaatggtgggcgcttctggcgcagcggttgcgcggcgaaacccgcctgccggcgctgccggcggaggtgtcgcaggcttttgtcgcggtatggcagggggtcatgccgagataa

SEQ ID NO: 342079 - DNA, 1632 bp, Pseudomonas aeruginosa
atgggaatgtcggtcagctacaacgagccactgatgccgctccccacggacgcggccgaactggcgcgctgcctggctgaccctgagtggcgcctgttctccggctgcctgtacaagatcatgatcaagggcgacgacaagatcggccctgacggcagcatcgaggaaggcgacagctttgtgctgcccttcaagccaaaccgggcgcagaagcggtttatccgtcgcctatggcaccgcaacctgatcctcaaggcgcgtcagctcggctttacgacgctgatcgcgatcatgtggctggaccatgcgctgttcaacggcgaccagcgctgcggcatcatcgcgcaggaccgcgacgcggctaaggtgatctttcgggacaaggtgaagttcgcctacgacaacctgcccgaggaaatccgcgagcgcttccctacggccgcagccaacgcggatgaactgctgttcgcccacaacaacagcagtgtgcgcgtggccacgtccatgcgctccggcaccatccaccgcctgcacgtctccgagttcgggaaaatctgcgccaagtacccggacaaggcgcaggaagtcgttaccggctccatccctgccgtgccaaccaacggcatcctggtcattgagtccaccgctgaaggccgcgaaggcgagttcttcaagatggtgcagatcgccgaggcgaatcacgccagccgcaagaagctgacgccgcgcgactaccgcatgcacttctacgcctggtggcaggagccgaagtaccgcctggactcgcgcagcatcgaactgacccgcgaggaacacgaatacttcgagaaggtggaagccacggtgctgcgcgacatgggcgagcgcatcactatcgatgcggaccagcgtgcatggtatgtggccaccaagcgcgcggacttctccggcgccgaagagaagatgtggcaggaatatccatccttccctgccgaggctttccagatcagcacggaaggcaactggtacgccaaggacatggcgacgctgcgcaagcgcaacggcatcaccaaggtgctgatcctggacatgccgatcaacaccttttgggacatcggccgcagcgatggctgcgccatctggttccaccaggaactacacggcgaagaccgcttcatcgactactacgaggcacacaacgaagacctgcggcactacgtcaaggaaatgcgcgatcggggctacctgttcggaacgcactttctgccgcatgacgctgagcacaaacgcctgagcgacttcaaccgcagcacgctagaaatgctgcaagacctgatgcctggcgagcagttcgccatcgtgccgcgcataaccgaactggtgacgggcatacagcagacccgaaagcacatgaagaccgcgtacctggacgaaaccagatgcgcaaaggggatccagcggctggagggctaccgcaagaagttcaaccgcgccgagaaccgattcaccaatgagcccgacaagagcaatggatgcagcgagggtgctgacgccttccgtcagtgggcgcaggcgaaggaactggggatgctgtccagcgcaacgatgaattaccaataccaggaagccgagcccaccgactggcggctgtga

SEQ ID NO: 342080 - DNA, 213 bp, Pseudomonas aeruginosa
atgaagcgaaacgccaacccggcggcgaccgttgctgcctggaattccgcataccccgccggcaccgaggtcgattaccggttccatcgcggcgcaacgccgaaacgcacccggacgacaaccgaagcccaggtgctcggcggacacactgctgtcgtctggctcgctggcgtgtccggttgcgttgccctttcccactgcgagccggcctga

SEQ ID NO: 342081 - DNA, 504 bp, Pseudomonas aeruginosa
atgatcgacccacgagcgaacagcccggagaaacttgtgcctccggcaccgctgcctcacgtaagccgcggcgcgctcaagcgcatcaagcatcctcagccaatccccaccggctgcccgcactgcggcggcctggtccgtctggtcagcaaccgggtgatctacggccgagagtacggcgactggccgtatgcctacgcctgcactggcacgggctgcggcgcttacgtgggcctgcatcccgacaccgacatctcgttgggaacgctggccgacaagcccctgcgcgacgctcgcaaccgctgcaaacggccattcgaacgcatctggcgcgacaagctgatgacgcgcagtcaggcctacgcctggctcgccactgaactccagatcacgccgcccgaatgccacttcggactcttcgacgttgaccggtgcgagcgggccaaacgcatctgcgaccagtacctggaagcgatctacaccagttcagcgaggtggggatga

SEQ ID NO: 342082 - DNA, 156 bp, Pseudomonas aeruginosa
atgatgtggacataccgcgagcgccgcaaccgcgcggctttcagcaacgcccagcacgcctgggacttcgccagagacccgctctgggaccagccggacccggaaccagagcacgacgacgaagagcaggaggacgacgatggcctgggcgaatga

SEQ ID NO: 342083 - DNA, 1017 bp, Pseudomonas aeruginosa; identical to SEQ ID NO: 326786

SEQ ID NO: 342084 - DNA, 429 bp, Pseudomonas aeruginosa
atgaacactgagcagttcattcgggagtccgcagcgcgcgggctttcccgccgcgccacccggctggccctgggcatcggcccctgggtattccgcgaaatgctgaccctgatgccggacatcgagtggccggcgaagggccagtcgctggaccacaagcgggccaactcgcagaaacagggctactgcacgccggcactcgcccgcgcactggaccaggcccgccaggcacgcaaggaaaagcacacccacaccgtgcgcggcagaaccggaaccctcgaagagttggtcgacctgctgccgagccccgtctcggccagcaccgtccgccggcgactcgccgcaggcatgtccctcgaggacgcgctgctcaccccacacctaccgccgaaaccaggccatcgcccacttcagcaggtgcagccatga

SEQ ID NO: 342085 - DNA, 228 bp, Pseudomonas aeruginosa
atgagccagcctcccatcgactaccagatcagcgccgccgacgcgcacgaactggccggcgccgtgcttctgccggcggacctgcgccgccaggtgctggagaagatggccgcccagcgcgacccggccaccatgctcgatttgttcgcccaggtgctgggcatggccaacgccgtcgccgagaactgccgagcgatggtcgagttgatcctcatcgagcgcggctaa

SEQ ID NO: 342086 - DNA, 234 bp, Pseudomonas aeruginosa
atgcgcaacacccagcagcaccaagacgtcccccgcttcatcgacttgaatatggtcaagttgagaacggggatgggtaccacgttcatctacgaccatatgaagaaaggggacttccccaaagggcgcaagtttggccgcgccactcgctgggcagaggttgaaatcgaccagtactgcaacggaacctggacgccgccggcgccggcaaacgaagcgggagccccggagtga

SEQ ID NO: 342087 - DNA, 195 bp, Pseudomonas aeruginosa
atgaaactgcgcggcctgtacgccatcaccgatagccagctactggacgacggccgcctgctgccctacgtcgaagccgcgctccgcggaggcgcgcgcctgctgcaataccgcgacaaatccagcgaccaggcgcggcgcctgcgcgaggcggaaagcctgcgcgaactctgcgaagccacggcgcgcagttga

SEQ ID NO: 342088 - DNA, 597 bp, Pseudomonas aeruginosa
atgaattacgggttcatctactgcctgggcaacgccgcaatgccgggcatctacaagataggcatgacagagcgtgctccactgcagcggtgcgacgagctatccagttctacaagctcgccactcccattcaagcttttgtgttttggccaagttgaagaccccaaggacgtagaggctgagattcatgaaggcctggttgacagtcgagtcaaccattccagggagtttttcagaggtccatttaaatcgatagccaatgtcattcagggctacagcagcggctttgctctgacctcagatggatacgaggaagaagaaaaggagcggctgcacaacctcttcatctgtgcaggcccatcagatcggactagcgctctgaatgaagcagcgaagttcagcggcattcacatgtaccagaaggatggccagatctggtatcgcgggcgagctaacccaaacagctggatctatggggcaatcatctgcctgaggcaagaactccttgagcttgttcccgctcaggagccagagatcagcgcgcctcagcatcaacctgatgctctcgaagagaaagaagaggagctcgactggtga

SEQ ID NO: 342089 - DNA, 189 bp, Pseudomonas aeruginosa
atgacaatcattcacgaatgcgaccggtgcaacgcgcccggtcgcgtgatcgagacgtccgacggattccgctgcgagggttgctacgaggaggcgcaggagcaggtgcgcagcgatgcgagctgccccgagtgtgggcgcctgggggtgacggctaccggaatttgttacgcctgcgagaacacttga

SEQ ID NO: 342090 - DNA, 645 bp, Pseudomonas aeruginosa
atgccaaattgggtaaccaatagggttaaggctccgcagcaagtcatccaggcgatggtcagcgaagaaggccgcatcgacttcggaaaaatcatcaagttcggcggcgagtttccatgggacggtgtttcggtcgatgcagaaaccgctgctgagcgcgtactgaacctgccactgaattcgcatcccttggtcggcagcctgcagaaatccagtcgtgaccgcgttgacgtttcaaagctgagcgatgagagcttcgagcagttcatccagatgctgcgcaatcaccgccagaccggctacttgcacgacatggactttgccagatcggcctggggcaccaagtggaatgcctatgagtccagggttgacggacctgagtccgcaagctttgaaacagcatggtctttccctgagccgatcttcctcaagctgagctcgatgttccctgaggcaaccatcgaactcaactacgcagacgaagacatcggcagtaactgcggcacggtcaggttcaagggtggagaggcaatttatcgcgacgagtctgcgggctggaacagcatgtccggggccgaccgcgagaggtggaccagctttgcctacgaggtcaagggctgggagcgcgaccaagaagacgactga

SEQ ID NO: 342091 - DNA, 288 bp, Pseudomonas aeruginosa
atgatgaagcacacgcaagggccgtggagcactaggttagttcgaaacgttggactcaaagcaggttcgcatgtccatgttctaacggaccgcgaaggtttcaacatcgcgctgatctcttcgtggatagacaacacagatacagcagaagaagcaatcgcaaattcacgcctgatcgaagccgcgcccgagctgctggaggcccttgtcgctctggttgagtgcgagcaaacgacaccagagctttgggaagcagcccgagccgcaatcgcaaaggccaccgcctaa

SEQ ID NO: 342092 - DNA, 687 bp, Pseudomonas aeruginosa
atgagcattgactggagtgtgaatagctcttgttatggctgtgaagactttcaggacgagagcggtatgtgggtctcaagcttcagagcatcagatgggtcgatcagcacccagtaccacacgcggtccggatatctatggtttgacctccttaagcgaaccgaggttggcggacggtttcagcgaaaatacccggcttacgctggggtcaagcttgggtttgagtcttatcaacagttcgcagaatgggcgatatctcagcctgggtacggttgccgcgacgccgaaggaaaaatcttccagctcgataaagacattctcgttccaggtaacaagctctattcgccagcgacatgcgcattcgttccagcacacttgaacagcatgttgaatatctcaagacgcgctagaggccctcttccggtaggcgtaagtatcgatagatcgacaggaaaataccgggcacgagccaagaaaaaaggagtgacagttggcttgggaacattctccagcacttctgaagctcacaaggcttggcagaggttcaaggctgaatgtcttatggacgctgcttgcgagtaccggagaaatgagtggtcaaggctggatgtagcccaggcattaacggatagagcttaccgtctgctggccgatgctgatgaaggagttcagacaacatgtctatag

SEQ ID NO: 342093 - DNA, 1371 bp, Pseudomonas aeruginosa
atgactgacaaactcgacctcgcggtcaatcacgcgatgagcagtgctatcgcgcgtgcgcgaatgagcctgctgaaccagggcatcggccatgacgccaagcggccgcaggcatggtgcgagtacggttttccccaggaaatcacgttcaacgacctgtacaccatgtaccggcggggcggcatcgcccatggcgcggtcgagaagatcgtcaccacgtgctggaagacaaatccgcgggtcatcgagggcgacgatcaagaccgctccaaggacgaaaccgagtgggagaggaagaacaagccgttgatcgccggcgggaggttctggcgggctgtctccgaagccgacaggcgccgtttggtgggtcggtattccgggctgctcctccacatcagggatagccagccgtgggataggcctgtcacgggaaaggtcaagggcctggcgaaggtcaccccggcctgggctgggtgccttaagccgaagtcgttcgacgaaaagctagatagcgagacctacgggcagcccaccatgtgggaatacaccgaggcctcccaagccgggcgccctggcctggtgcgggatatccatccggatcgggtgtttatcctcggcgactggaccggcgatgcaatcggcttcctggagcctgcctacaactccttcatcagccttgagaaggtcgagggaggcagtggcgaatcgttcctcaagaacgccgcacgtcagctcctgctgaacttcgacaaggagattcagctcggcgagatcgccagcacctacggcgtgacgatcgatgcgctcaacgaacgcttcaacgaggcggcgcgtcagttaaaccgcggcaacgatgtcctgcttccaacccagggggcgaccgtcacgcagatggtgtccgccgtttcggaccccagcccaacctacaacgtcaacctgcaaaccgccgccgccggggtcgacatcccgaccaagattctggtgggcatgcagaccggcgagcgggcgagcagtgaggaccagaagtaccacaacgccagatgccaggcgcgccgggtgcaagaactgacgttcgagatcaacgacctcttcgcgcacctgatgcgcatcggcgtggttccgctgaaggctgagttcaccgcgatctgggatgacctcaccgtgccgaccaaggccgagcgcttggccaactccaagaccatgagcgagatcaacagcgccgcgatcggcactggcgagcccgtgttcacggcggaggaaatacgcgaagaagctggatacgacccgctcgaggggggcgatccgctgcctgacaccgaaccggaggatgaagatgccgcgcgcaccgatcctaccggcgagcagcagtga

SEQ ID NO: 342094 - DNA, 1119 bp, Pseudomonas aeruginosa
atgtacgcggaggctggaatcagtggcgtgatcctcggggcgcgcgagtacatgaactcgcttgaagagtcctccatggaggagatcaagcaggcaattcgatccgagccatggctggacgcgtacttcgacattggtgagaagtacatccggaccaagaatcgccgaatttcgtatgtgttctgcggattgcgccataacctcgacagcatcaagtcgaaggccagaatcctgatcgcctgggttgacgaggctgaaaacgtcagcgaaacggcgtggataaagctcctgccgacggttcgtgagaacgactcggaggtctggattacctggaacccggagcgcgatggaagcgccaccgacacccggttccggaagaacatgccggcaggcgcaaaaatcgtcgagatgaactacacggacaatccgtggtttcccgatgtgctcgatcaggagcgcctgaacgaccggcagacgctggacgaccagacctatgcctggatctgggatggcgcctaccgcgagaacagcgacgctcagatccttgctggcaagtaccgggtggccgagttcgagcctggtcccgattgggatggcccttactacggcatcgactgggggttcagccaggacccgactgtcggcgtcaaatgctggatttacgaccgcaggctttggattgagcacgaagccggaaaggttggacttgagaacgacgatatcgctgagtacatgatcaggcgcttgccagggatcgaacgacatgcagtccgagccgactcggccaggccggagacgatcagccacgtcaggagtaaagggaaagatggcagtcgtgcatgtctgcccaggatcgaaggtgtcgagaaatggaaaggcagcgtcgaggacggcattgcccaccttcgcagctatgtcgagatcgtgatccatgagcgatgcacgaaaaccctccgcgaggccaggctatacagctacaaggtagaccggcagaccggggatgtgcttaccgatatcgtcgacaagaacaaccactactgggacgccacacggtatgcgcttgggccgctgatcaagcgaagaagtgctgttggcatccttcttcccggagcccgctga

SEQ ID NO: 342095 - DNA, 468 bp, Pseudomonas aeruginosa
atggcagtcctgaacaatgaggtgaaagccttcatcgtgcaggccctggcctgtttcgatacccccgcacaggtggcggcatctgtccgagaagaattcggcatagaggtgagccgccaacagtgcgaatcgcatgacccgaccaagagcgctggccgcgatctggctaagcgctggcggactctgtttgaggacacccgcaagcgcttccgcgaggagatcgccgacatcccgatcgccaaccgcgcctaccgactgagggcattggctcggatggctgagcgcgccgagggcatgcgaaacatggccctggctgcccagctttacgagcaggccgccaaggagtcgggtggcatgtacagcaacaagcaccagctcgagcactctggtcctggcggaggaccgatcctgacaatgccgaccaccatccaacttgtggcgccgggccatgaccacggcgaagattga

SEQ ID NO: 342096 - DNA, 609 bp, Pseudomonas aeruginosa
atgagcagacccatgccaccggccgatctgctcgagtccatcttcctgacgctctgtcctgcgactgaggtgtgggagtggatacagcaggagatcctggcttccaccggcagcatccacaacgaagaccatgctcacctgatcgacgcaaacgtccaggtgctgtgggcatcgcagggattcgccaggcagggaaggatggtgttgggtcaggccgagaaggtcatgcaccgggcaggcgggtggcagaaggctcgccaggaacagcagatgcgggaatggttcggtgacgagcccgagttcctgatcaccctggccgccgactactgcgcccagtgctccgacgccgagttctgcgccctggtagagcatgagctttaccacatagcccagaagctcgatcagtacggcgcgcccaagtttacccaagatggactgcccttcctgacgctccgtggccacgacgttgaagagttcgtcggtgtggtcaggcgctacggtgccaacgaaggtgtacagcaactgatcgacgctgcaagccgcccgcccgaggtggccaagatcaacatttcgagggcctgcggaacctgtctgctcaagtcggcctga

SEQ ID NO: 342097 - DNA, 183 bp, Pseudomonas aeruginosa
atgggtaatgtcatagccatcgagagcaagcagccccatgtgctggttcatgccagtgacgcggcgcacgtcgtccccctggcgctgctcgaagatgtcgccaagggcgccaagccatccgagatcctgaccgagcccgtcatctgccgaatcattgaagagtggctggagctcaccgcatag

SEQ ID NO: 342098 - DNA, 192 bp, Pseudomonas aeruginosa
atgtccaatatcacccgcttgcatcatgccctgccactgccggcagacgtggtatccgccatcaacggcctggatgcgagcctgataaaggccattgacgaagccaaagcagccgccctgccgcagggcatgatcgtcgcgcttctgcatggtcacgctcacgccgagacacacaagatgatcagtagttag

SEQ ID NO: 342099 - DNA, 225 bp, Pseudomonas aeruginosa
atgaatacttttattggcatctgcctgggctttttcctttgcatgttcttgaacgctgccatgcgcaacgaacgtgatagcaccgatgctcctggcggacgcagtggaatgcggctgcacactgaccacgctaccggcttgcagtatctcagtgttccaggcgggggtatcactccgcgactcggggtggatgggaagcaaatgcgcgcggatggtgccgaatga

SEQ ID NO: 342100 - DNA, 237 bp, Pseudomonas aeruginosa
atgccgaactatcgcaagccggacatgtactcggacgccgattgggaaatggttcagggctacatggccggcaaggacggcctgcgcgcccagcgctcgaatgccgcctacatgcatggctatcgcaacggggtttctgatcggattggaatccagcatgagcgggcagaggttcttcgccgtcgcgcagagatgatccctggcatcacaccgagggaggaaattctccatggctga

SEQ ID NO: 342101 - DNA, 375 bp, Pseudomonas aeruginosa; identical to SEQ ID NO: 334553

SEQ ID NO: 342102 - DNA, 1326 bp, Pseudomonas aeruginosa
atgaagttgctgttgcgttgcctgctgctgggggcgtgggtcgtctcgccgagcctgtgggcctggtccaaccatacggtgggcagctacctggcattgcgcgagctggcggccatccgcgaggcgccggaagtcgaggtggagccgctggaggcgttcctcgccgccgagcgcggcggactggccgccctgctggacgagcaggaagcctacgcccgagcgcatatcggcaactacccggcgcgtccggacgccctgcgcttcgctgccgagggcgaggccggcgacttgcgtcaggcgttcctcgcggcgctgcgggtcaacccggagatccgcctggcgctggcgctccagccgcttcccgggcaggaccagccgcagcgcccgcacctcaagccacaggaggtgctggtgttccagaacctctcgccgtggaccgcctggcgtttcatccgcctggagcccggcgagcgagtcgcgcccctggcagtgctggccaccgccgccgacgaaccggactacggccacgacatcaacctgttcagcgacaaccccggcgaagccggccagcgctacggcttcggcacccagccattcggcgacccgcgcttcgagttcagctcccaggcgccgttccacatgggcttctatcacgaggcggcggtgatctacagcggcgcgccgttcctcgcccgggcctggccggaatggcgtgcctaccagtacttcggcctgtcccgcttcgccttcgccaacggtcatccttactggggctaccggttccttggctggggcatgcactacatccaggacatcacccagccctaccactccacgccgctgcccggtgccagcctggcggcgatgctacagatggagggcaaggcattgctcggctacccggaggaaaagcaggcggccatcgagcgtgtcgcgaaccgccataccgcggtggagaaataccagttcgactggctgcgccaactgctccgcgacggccgcccgcagccgatgctcgacgcctacgccgacacccgccgcgacggtgcctatccggcctattcgccgacctacttgcgcgaggtggtggccgccgagtcgaacgcccacgccgcggccttcgacgccgccatcggcgaatggctggccgcccgcccggcctccgccgcgcaggacttcagcgagagcaaccagccacgccctgaggcccacgacaatgcggcgctgaacgcgcaactgatcgagctgatcgggcatttcggcgcgcatagccggaacatcgtcagggcggcgttggagacggaggagggtggggcgaaggagtga

SEQ ID NO: 342103 - DNA, 288 bp, Pseudomonas aeruginosa
atgcgtactttggcgatatctgcatggttccaaggcgctgatcgccgccgtggcgcgcagtccgtgcatccccaggccctcattctgttcgtgttcgtgttcgtgttcgtgttcgtgttcgtgttcgtgttctggtgccaggtgctgccagcgctgctgttcgtcttcttggttgccagtgcgaatgtccacggtcagtcgacgccggcactgacgaagcgcctacgcgctttctcccaaaagccagtggacgtgccgaccttgtgcatgggcgtcagtggcgcctga

SEQ ID NO: 342104 - DNA, 399 bp, Pseudomonas aeruginosa
atggctgccgcgcagcgggcggatgtgctcgcttccgccgggctggcgcaactcatcggcccaggccccggtggccagcgccagggcgcggcagcgaaagtcgaaaagctcgccgctctcgcggtcctcggcgcgcaggccgaccacctggccgccctcgcgcagcaattcgcgcacacgcatgccgttgaatgcctcgccgccgtcgtgacgcgcctcggccagcacccgcagcaccaggcgcgcatcgtcggtcaccgcatcgaagaatcgcgtgccgccgagcagccgttgttccttcaggcccggcgccaggtagcgcaacgcggcggcgtcgtagaaacggtggttgcgccgcccggcaagggcgtcgtacacgctcagcaggccgccgaatag

SEQ ID NO: 342105 - DNA, 705 bp, Pseudomonas aeruginosa
atgagcctgaatacttcagtcattgacgacttggttgctttaaacgcgccagtgttgtgcgtggatacatgcaccgtccttgacgtcatccgtgacatcacgcgcgaaacagcggtagcacacgatgccagcgccgggcttgccttgcttgcggcagccgaggccggctccgatctgattgttctgatggcagaacaggtgaccatcgagcttgctgctcatgtcgctggcgtcgaggtagaggctcgaaacgctttggcaaggttccgggcacaagctcaacgtatccatgaagtggccttggcctacggtgcccagggaatgttgccgctggaccaccttgagggacacgtcgcgcgggccaggacagtgctgaacaggtggcgggacgttgccagcgtggtgccgcacaacgatggggtcgccagccgtgcgttcaagcgagtcaacgaacctcgtgctcccgcccgactgggtaaagaatcaatgaaggattgcgtgatcgtcgaagcctatatcgaggcggctggccagcttcgctccgcagggctggtggcgccgatcgtgttcgcctcgtcgaatacgaaggagtatttcgcgccgaacacccgacgtcttcaagatgaaatcgctgccgatctagaggacgttggtgtggagtacgccccaaacttcggcgcagcgaagcacagtctcggcctatag

SEQ ID NO: 342106 - DNA, 594 bp, Pseudomonas aeruginosa
atgcgcagtggcatcctcgcgcaggtgggtggctcttggcgtcacgacgctgagcgggaagaagacctcaagcaacacatgggcgacgacgatgtgatcgtgcttgtacgatctgcattcgacgacgtcgatgaatcggctctggtgctgtggcaagagcctgatggctacaaggtttccaatattgtgccgcgaaacgtcggtgagcttggtattgacaagtacaacgcgattcttcgcgacttcgtcgcccaagtcgcggaaccggcgtcccgggccggcggtttcggcgtcgaactgacctctcccaaccagactcttgatgattggctggatgccgaaccggcagcagccctgcggcgcttttcgcggctcgccaataagtccacaggtgcggcccatcccatggacaaggagcgctggtacgcgttcctgattgccgcgcaccgtgcatcgaaacgactggatagtgaccaattggcacggtggcttgtcgaggtggaggcctggtccgcagggcgggcgcaggacttggccatcgactatgaattcgcactcggactgcttgaacagtatgaccagtcgcatacatga

SEQ ID NO: 342107 - DNA, 762 bp, Pseudomonas aeruginosa
atgagaaagtcatcttcttccggcgcccaagccaaggtcttctatcgtccgatcgaggcggccatccagtgggcgggactgtcacgcttcgagcgccgtatccttgatattgccgaagggatgaaccggctgccggagcacgctgcgctggcgcgctggccacagcttcgcctgaacgcggaacggatctacgacgcactggtgcatctcgaccttccctacggcaaggatggcctcacgagcaacgatcccgccttgctcgatgatcctggcctcacgatccgccacgtcgatctgaaggcttggatgatccgtttctatcccgaccagcgaccggcattcctgttcgatgccttcgagcgtcacctgcatccggccgtcagtgtcgatgccgtgcaggcactggtcatggatcgcgaggcgttgaagctccagcttgccgacaaggtgcaggcctgggacgcgctctatgagcagttccagacgctcagccaggagcaccaggcgcgcagggagcgcgagaagcgatccgggatgccgggcgcccgcagtgaatccacctacctgaacatcgttggcggtcttctgaccctgctgttgggcaagtcacccaatggcgttccctattcgtctttcgagacgctggaatcggtcatcaatgcgctggttgcccattacggcgacaaatccggaatcagcgagcgaacgctgtgggcgaagttttccgcagccaagcgtcatctcgctacccaggaccgctga

SEQ ID NO: 342108 - DNA, 219 bp, Pseudomonas aeruginosa
gtgactgcccagaccatcgccaccgcgacgccgaacgaacaccgcatcctgcgccgcgcggaagtcgaggccaagaccggcttcaaacgcgcccacatctacaacctgatcaaggagggcaagtttcctaagcccctgcgcctcggggtacgcgccatcggatgggattcggtggagatcgatcagtggatcaccgatcgactcagggagcgggcgtga

SEQ ID NO: 342109 - DNA, 867 bp, Pseudomonas aeruginosa
atgcaggtggtatccatcatttcgaccaagggtggcgtcggcaagacgaccaccgcagcgaacctgggcggcttcatcgccgatgcgggactgcgcgtgctgctgctggacctggacgtacagcccaccttgtcgagctacttcacgctcggcacgcatgcgcctgccggcatctatgagatgctggccttcaatgagcagcgtatcgagcaattggcttcgcagaccgctgtggcgggtctcgacctggtggtgtcgaacgaccatcgcggcgaactgaacacactgctgctgcacgcacccgacggtcggctacgcctgcgtcacctgctccccgcgctggcgtcgcactacgacctgctgctgatcgatacccagggagcgcgcagtgtgctgctggaaatggcggtactggcctccagtctggcgctgtcaccggtgacgccggaaatcctggcggcgcgtgagctgaggcgcggcacgctgcaactgatcgaggacatcgctccgtatcggcacctcggcatcgagccgccaccgctgcgcttgctcatcaaccgtgtgcatccggtttcgtcgaacgcccgactgatccagcaggccctgcgacaagtgttccaggcgcacgctggcatacaggtcctgagcaccgacgtcccggccattgaagcctacccacgtgccgcaacacgggggctgccagtgcatcgcgtcgaataccggcaaccagtgggccgtactgcgcctgcggcgttggagacgatgcgtgcgctggctggcgagctgttcccggcatggcgggagcgctttgcatgcgttaccggcagaggccgcgcaggaggagccagtcatggcgatcgggcatga

SEQ ID NO: 342110 - DNA, 249 bp, Pseudomonas aeruginosa
atggcgatcgggcatgaactggcccgcggccatgcgcggctacgcgcgctgatcgagttcgcgctgggcgaaggttggcacgtgaaacgcacgcgcggcgggcacctgatgttcaccaagcccggctgcgccgcgatctataccagctcgactgcgagcgattaccgcgccagccgcaacgcacgcgcgcagcttcgccgcgccgatcgacaggcactgacggcatctcgggagagcagcgatggctga

SEQ ID NO: 342111 - DNA, 1707 bp, Pseudomonas aeruginosa
atgaagctggagctgtgcgaaaaacgcaaggcggtcatcgcacaaggcggacaccttttggtcctcggcgggcccggctccggcaagaccacgatcgccctgctgaaggcccagcgccagtctgcgacgctcaagccaggacagggaatcctctttctcagcttctcgcgcgctgccatccgccaggttctcctgcgctgcaaggagatcctgacgccagccgaacggcgggccgtcaccgtccagacctatcacgccttttgcatggagattctggaagcccacggccgcctcctgcacggccggccgatccgctttctctaccccggggaggaacgtcttcagaaatcggcgttcgatggggattggatggtcgagcgacgacgtctggcatcggagcaagggctctactgcttcgatctcttcgcagcgggcgcggcagacctactggagggatgcgcggcgctgcgcgagctcattgccgatcggtttccgatgatcatcgtcgacgagttccaggacaccgacgacaaccagtggcggatcgttcgcgctctggctgaagtcacggacgtgttctgccttgccgatccagaacagcggatctttgattaccgggatgatatcgatccgcgccggctggatattctccgagaggatatccaggtcaccgagttcgatctgggcggggaaaaccacagaagcccaaacgcgggaatccttcagttcgccgacgcagtactgcacaaccacagtccgctgccggccaccccggacatcaaacaggtttcgtactggcagaacacgtttgccgcaacggtccatgcagcggtgatatggaccttcagcgcgttgcggaagaagggggtcgagcatccgagcgtggcggtgctgtcgagaagcaattcgctcatcgccgacctttcggtgatcctgtcggagacgcacacttacaacaagcagaccctacccgtcatcgaacatgatgtcgtttgggatgctgagctttccgcggcggcggcggtggtcgtggcgtcaatcctagaatggccgaccggcccggccgaagagacccttgcgcggacgctccgggtcattgctggatattacaagctgaagaacgcggaggagccgaccaacgccgcggcggagcacgcacgtaagtatgacgaggcggcagccaaggtggcgacgggcgaaggaccgcgcatcaatgccgcgaaagccctcgtcgcggtctacaaggctggcatcgatctggtcggagaacctgtcgcggactggaaagcggcgcgctgggtgcttcacgatattccagcgctgaatgagctgttccgcgaggcccggctagtgcggctgttcagggcgaccgacgctctggcctccggactcggcgagcgttggctcgccttgagcagctatgcaggtgcgagcgaactagtcaaacgtatcctcgagcaggagcggctcgtggcagccgagcgcgacccccaaggctgcatcctgatgaatatgcacaaggccaagggaaaggagttcgatggggtcgttctcgtggaaggcgctttcaagtcgagcttcttcgatgagaggaatgagcagccgccgtttgaacgtagccgccggctgctgcgggtcggcctgacgcgggctaggacgctagtgacgatcgtgcgaccgcagaatgcccggccgctggtcgattga

SEQ ID NO: 342112 - DNA, 1845 bp, Pseudomonas aeruginosa
atgcgcgtcaggcgtttgaagattgaaaacttccgatgcgtctctcaagggagtgttgattttgctgggcacacacttctggtcggaggcaacaacattgggaagtcaacggtgtgcgaggctcttgatctcgtcctcggtcctgagcgcatattccgcaggcctgtcgttgacgagcatgactttcattgtggccgctatctgaatgcggaaggcgcgccggttgaaattcgcattgaggcgatcctggtcgatctttccgaagaggcgcagcggcgctttggtggccatctccgcaggtgggacgacttggcgggtacgttcatagacgaggagcaggatggtcttggaaaggccgatggtccggcagtgatctgggctctaccacttctgtttgtcggtcggtacgacccggaagaggacgatttcgtcggcaacacattcttcgaccatccaaccaaagaggtcgatgctctcgacgaagaaaccgaggtcaagctcggtcagggccgtgttccgttcacgcgtgtgcacaagcgcctttgcggctttgtgtttttgcggacgttgcggaccggttcacgcgctctcagcctgcagcgcggttcgttgctcgattccgtattgaagctgggcggcgccggtgccgtcgagatgtggcgggacactctggccagactacaagcgcttgacccggcaatcggcgagatcgagcaactgaagcatatccgctcagagttacgatcccggatgggacgcttcgtcaacttggcgcctggtgacgatgcgacggccttctttgcttcggacctgacgcgcgagcatctccgggaagtcgtgcggctgtttatcgcagctcaacctggtcagcatctcgtaccgttcggtcggctgggtactggttcaatcaacctgctggtcttcgctctcctgaccttcattgccgaattgaaggacaagcaatcggtgatcttcgcgatggaggagccggaaattgcgctcccgccacacacgcagcgccgggtgacgcggttcgtgctcgcggaaatggggcaatcgattgtcacttcgcattcaccctacgtgatcgaacagttcgatcatgagcagattgtcatcctgaaccgcaacgagaccggcgctctgacaggccagccgatcgatggccaggcgattaagtccaagacgttccgcgtcgaacggcgtcaattcgccgaggcaattctgagccgggcggtgctggtcgtggagggatcgacggaggcagccctatttccggtagcttcgtcgatcatggaggcgtccctcaatccggaggactacacccacctcgatctggctggcgtcagcattttcaatgccggcggggatggctcggtaccgcgtcatggtccggtgttttcggcgctcggaaagctcgccttcggtttctacgacaaacccaacgccccgctgaaccaggatgcgatggacaagctgaagagctatacgcaggtttgggagtcccccgagaagggcattgaggagctgctcgtaaaggagacgcccatcgcagttgtgaggcggtttctcaatgaggtgaaggatcgacccgactatcccagtgtcggcgtctatgatccggctgcgggcgatggtgaggtaactgcattggcgacgaaggttttgaaggcgcgcaagggcgacgcttacggctatgccgccatgatgatcagccagtgccagcacgccgaccagctaccggcgacgatccgagaaatccttgaaaccatccacaaggcgctgagcgccgtttccgaagatgtcgcagcaccgccgccggacgacttggaggatctcttctaa

SEQ ID NO: 342113 - DNA, 732 bp, Pseudomonas aeruginosa
atgagcaactatgtacgttcagccgccttcgcggcttcccgggtccttgctgcgcaaggcttgacggtcaagcgttcccacctctccgaggtcattgccgcgttgctgggataccgcacgcacgcggcactgtccgttgaggaggcggatcccaagctcgactaccacctggaggatgccgagatcctcgtgctcaacctgccgatgggcgagaggcgggccgcggaactcggccttgcagcggcgggcgcggcaccgtcggccgtcaccacggcttgcgtcgaggcgttgaaggccagcgccggctccacggacgtgtacgtcagtgtggccgacttctacgacttgcatgcccgccaggcattggccgaaacgatctacaacgccgatgatgtggccggtgcgatggctgagagcaatgcctcgttccccgacgagcccgatatggacatcgagtgccccccgacgacggacctgtgggcggcggtcgacgaatggacgatcgaggccgacggcaccatgacgggcgaatacgaccccgaaggtgatcgcatgttcaatggggacacgctgaactgccgtggctggctgatctaccgcaaggcaggtcgcgccgggctggtgttcatcgagggcgatggaacgggtggagccgacgacagttggcgtgacctggatcgcgatgacgaatgggcgtatcagcagagcttgggcagcaatccggcgaactga

SEQ ID NO: 342114 - DNA, 927 bp, Pseudomonas aeruginosa
atgcgtcttctggtgctgggtgcaggtgggatcggaggctatttcggcgggcgtctggccgcggccggcgtggacgtgcgttttctggttcggccgagacgcgccgcacagctcgccgagaccgggctcgtcatcaagagccctttgggcgacctaatccttcccgtcaaaacagtcgtcgaggcgccgccttccgtcgatgccgtgctgctggcctgcaaggcctacgatcttgagggcgcgattgccgccatcgcgcccgctatcggtccctcgacatgcatcgttccgctgctcaatggggtgcggcatctggatcacctggatgcgcgcttcggcgccgagcgcgtcctgggcggcctgtgccatatcggtgttgcgctcggcccggccggagaaatccagcatctcaatacgctgcagcgcctcgccctcggcgcactcacccacagccagcaggacgcggcgcaggcgctgcatggattgatggagcgcggcggcttcgcaccggtgttgagccaggacatcctgcaggagatgtgggagaagttcgtattcctcacgacctatgccggcatgaccacgctgatgcgcgcgcccgttggcgcaatcgtgcaggcacaagatggcgaagcgctggtgcgccagatgcttggcgaatgcgtggcgaccgccgccgcctcagggtacatcccatcgcaggacgcctatgcccgcatgttcacaacgttgtccgagcgcgggtccaccggcaccgcatcgatgctgcgcgatctgcaacgtggtggccccaccgagcatgagcacatcattggggacatgctgcgtcgtgcgcatgaagctcgactggatgcgccgctgctgagggtgagccttgcacacatgcaggcctacgaggcgacccgcatggcccatggcggtggatga

SEQ ID NO: 342115 - DNA, 597 bp, Pseudomonas aeruginosa
atgccgaactcctccgctccccagaccaggcagaaaggtgagcgcgccgaagcgctcccggccaatcttcgacgtctgcgcctggaggcgcagctcaccctcgatcggctcggggcgttgtcgggcgtgagccgcgcgatgatctccaagatcgaacgtggcgcctcggtgcccactgccacggtgctgggcaagcttgccgcggcattgcaggtcagcctgtctcaactcctggggggattccatgcgcgccagcccaggctgcatggcagggagcgccaggcggtctatcacgaccccgcttccggcttcgaacgccgttctctttcgccgctgttcgaggacggcgcggtagatctggccttcaacgtgttgccaccgggcaagtccgtcgagtttcccccgcaccatgcgggcgtggaggagtttctcgtcgtgcatgagggggcgcttgccgtggtcatcgacggaaggcgcttcgacgtcgctgccggagatacgttgttctttccttcggattgcgtgcatgaatttcgcaatcaaggcggcgagccggctgtcttctatatcgtgatcaacgatcggacgcggcggtag

SEQ ID NO: 342116 - DNA, 585 bp, Pseudomonas aeruginosa
atgcgcccatcccgccagcccttccgtatcgccgtatgcagccatctgatccgtttgcccggattgctcctggccgccatggccagcggctgcgcaacgacgaacgccgtgcctccggcacccgcatccgaagccgtcgacatcgcgtccgaagccgtggcggagttcgtgccggtgacgcggtatggccgctacaccctggtcgaactcgcgcccacagcggcccagcacgacctgttgctgcaagtggtggatgtggagatccccggcacgctgggcgccaccgtcggggatgccctccggcacctcgttctgcgttccggctaccggctgtgcgatgagcagtccgccgatctgttggccttgccgctgccggcggctcactaccggctcggcccggtcctgctgcgcgatgcgctcttgaccctggccggtcccgcctgggatctgcaggtcgacgacggtgagcggaaggtgtgcttcatccgcagcctcagggaggcgcgtacgccgcacgagtccaatccaccccaaaccgacaatccggcagagacctctccgttgatccgggaggtttcgccatga

SEQ ID NO: 342117 - DNA, 648 bp, Pseudomonas aeruginosa
atgaccatcccggaatcggcgaagggccagcgcatgaagctactgcgggtcgcggccgcaacctggttgttgctcgtcagcgcggtggtgctggtggatcacatggccttgtccagactggcggaacaggcccaggccgccgcgtccaccgcgcaggtgtccctgctcgaatcccgactggacggcctctcgcatcggatcgaacaacgccatactcagcccgccgccttaccgcaggcgcgctacgagcaggacaccgcggcattggaccagcggctggcggcgatcgagctggcgcaggctcattacgccgccaccgatgcgctgcacgcattggaaacccgcgtcacacgactggaagcccgcccggtctcgcgccagcccaagccgcccgcaccacggccatcccaacctgtggcggtccaacccaagcctgttgagccgtcattccgcctgatcggagtggaactgcgtgcgggagaacacttcgtgtcggtgatgcctgccgatggcaccgggctggccgatgtccgcctgctgcgcgccggagagtcggagggtggctggcgactggacgggatcgagcgcgatggcgccgccttccggcagggagacgagatccgccggctgcccattccgccccgataa

SEQ ID NO: 342118 - DNA, 747 bp, Pseudomonas aeruginosa
  misc_feature (103)..(103): n is a, c, g, or t
atggtcccgcgccacttgaccccgccgttgctggccgcgttgctggccgcctccgccatgcaggctgcgctcgcgcagcccaccggcgcaaccaccgcggccnggacggcgccgagccgtgaagcgcctgcggccatcgctggcagcgacgaacagcgggcgcaggactgggggctgcgcacggatgaatggacacgctatcgcgagttgatgcaggggccgctgggcgtctactcgcccagcctcgacccgctcacggccctcggcatcgaggcacgttccgacgaggagcgccgccgctacgcggagttgcaggttcgggccgaagcccggcgggtcgagaagacgctggcctaccagcgtgcctacgacgccgcctggcaacggatcgcgccgggcatggcgcgggtcaacctgcccggtgccaagccgaccggcgcggtcaccgccatcgcatcaggcaccgaccgaaccgccatcttcgtgaaggacggctgtaccgcttgcgaccaggccgtgcagcggctgcaggcctcgggcgtcgagttcgatgtctatgtcgtcggcagtcgcgccgacgacgcgcgcatccgtgaatgggcacgccgggcccggatcgacccggcaaaagtgcgcgcccggcacatcaccctcaaccacgacggtggccgctggctgtccctcggcctgcagggcgaactgcccgccgtcgtgcgccaggtcggcggccaatggcaacgacagtag

SEQ ID NO: 342119 - DNA, 579 bp, Pseudomonas aeruginosa
atggcaacgacagtaggcctcgcccgtttcgcgctcctgctgctggcttgctgggcactcggccaggcgaaggccggggaggttccgccgccggcctaccagttcgcggcacagcgcgcgggcattccggcggcggtgttgtacgcggtggccttgcaggagagtggcacccggtaccacggccgcctcgtgccctggccctggacgctcaacgtggccggggcatcgcatcggttcgccacccgtaccgaggcctgcgccggcctgcaccaggcattgcgcgacgtgccgcgcacccgcatcgacgccggcctgggccagatcaacctaggctaccagcgtcaccgctacgaccacccctgcgaactgctcgatccctatcggaacctggcgctggccgcgcagatcctgcgcgagcagcacgcgccgggccaggactggctgatcacgatcggccgctaccaccgtcccgctggtggcgcacccgctgcgcgctaccgccaaagcgttggccgccacttggcccgcgtactgggcgagccggcgcggggctcggatacccggagaaccctgccatga

SEQ ID NO: 342120 - DNA, 552 bp, Pseudomonas aeruginosa
atgaagcctcgaatcttccgtccggctgtgcggtggctgatcggcttgctgccgctcgtgtccgtgccagccaccttcgcgcaatcgccgcccttgatcgtcgtcgaggatcacggcggtgcctccgcgctgccttactaccaggccctggacctgcaaccgcgcaccggaagcaggccatctcccccgatcgagatgccacgcctgcccgaagggccttctggcgaggcggccatgctgccggtgcgctcggcccatttggcccctggcgatgtggctccccgggcgatccaggcgccggggctcacgccgatgttcctggttggtgatgaccagcgctcccatgcctggctgcgccagcgtgccccggcgctgcgcgagctcggggccgtggggttggtggtccaggtcgagtcaccgcaggcacttgcgtcactgcgtgccctggcgcccgggctgatgctggcgccggcgtccggggacgaactggccaggcgcctggggctgcgccactacccggtgctggtgaccgccaccggcatcgaacagtga

SEQ ID NO: 342121 - DNA, 2157 bp, Pseudomonas aeruginosa
atggcccagccgcacgccgtcgaagtcctgctgcggccagcggtggagctatacaccgttgccgtatgcgcaggcgccgcggtggtgtgcgtggtggcaccgtggtcgctcgcgttgaatccggtactcggcctcggcagcgcgctggccttcctggccttcggcgcgattcgcctgcgcgacgcctgggccatcctgcggtaccgccgccacatccgtcgtctgcctcgctacgtgatgacgagccgtgacgtgccagtgagccagtaccgtctgttcgttgggcgtggcttccgctgggagcaacgacacacccatcggctgacgcagacctacaagcccgagttccggcgctacgccgaaccgacgacgttctaccgcctggcgcgccgcctggaggagcggctggagttcgcgccgccgccgctgcctaggctggcgcgggcactggcctgggacaacccgctcaacccggtccggcctttgccgccagtgggtggcatgccgcgcctgcatggcatcgagccgcacgagaccgacgtcaccctgccgctgggcgagcgtgtgggccacaccctggtgctcggtaccacgcgcgtgggcaagacgcgcctggccgaactgttcatcacccaggacatccgccgcaaggtccatggcgagcacgaggtggtgatcgtcttcgatcccaagggcgatgccgatctgctcaagcgcatgtatgtcgaggccaggcgagccggacgcgagggcgaaatgtacgtgttccacctgggctggcccgacatctcggcacgctacaacgccgtgggccggttcgggcgcatctcggaggtcgccacgcgcgttgcggggcagctttccggcgagggcaacagcgccgcgttccgcgagttcgcctggcgcttcgtcaacatcatcgcgcgcgccctggtggaactggggcagcggccagactacctgctgatccagcgccatgtcgtcaacatcgacgcgctgttcatcgagtacgcccagcacttcttcgcccgaaccgagcccaaggcctgggaggtgatcgtccagctcgaaggacgcctcaacgacaagaccatcccgcgccacatggtcgggcgagaaaagcgggtggtggcactggagcagtacctgtcgcagacgcgaacctatgacgcggtgctcgacggcctgcgctccgcggtgcgctacgaccgcacctacttcgacaagatcgtcgcctcgctgttgccgctgctggagaagctcaccaccggcaagatcgcgcaactgctcgcgccgaactattccgacctgtccgacccgcgcccgatcttcgactggatgcagatcatcaggaagcgggccgtggtctatgtgggactggatgcgctgtccgacgccgaagtggcggcggccgtcggcaacagcatgttcagcgacctggtgtcggtagcggggcacatctacaagcacggcatcgacgatggcttgcctggagcatcggccaatgccaaggtcgccatcaacgttcatgcggacgagttcaacgaactgatgggcgatgagttcatcccgctcatcaacaagggtggcggtgcaggcatgcaggtcacggcctatacgcagacgctctcggacatcgaggcgcgcatcggcaatcgcgccaaggccggccaggtcatcggcaacttcaacaacctgtttatgctgcgggtgcgcgagaccgccaccgccgaactgctgacacgacaactgccgaaggtggaggtctacaccaccacgctggtcagcggcgccaccgacagttccgacatccacggtccgaccgacttcaccagcaacgcgcaggaccgcatcagcacgtcgagcgtgccactcatcgagcctgcgcacgtggtcggcctgcccaaggggcagtgtttcgccctcatcgaaggcggtaacctgtggaaggtccgcatgccgttgcctgcgcccgatccggacgaagccatgccccgggacctgcaacaactggccggctacatgcgccagcactacgccgaggcgggggaatggtgggagggcaacgggctgccccggtcgcacgacgacgcgttgccagcggatctggccgaggaagtgcaagaaggcacgccggatgaagaggcgccatcgtga

SEQ ID NO: 342122 - DNA, 2073 bp, Pseudomonas aeruginosa
atggagcagaccgacgaagagttcttccacgacttccgacaggaactgttggcgggcgccgaagccaatggcagcttccagctctccgaattcatggaggccatcgcgaacgaccttgtcgagacaggcttcacggaagggttcgagctctgccatttccgggcgcagcgtggcatgcgcgtggacggctactggttcaatgacgaaggagttctggacctcttcatcgcggacttcgactcccgaaacgagctggcatcgctcaccagaacggaagtggccgcggcattcaagcgtgttgccaacttcttcgaggccagcgccaacaagggcctggccggcgaactggaggtcacatcgccggagtacggccttgccaggcagattgcggatcgcaaggacgccattcggcaggtcaacctggttctcttttccgagcgcacgctcagcgagaaaatccagtcccttcccgatacggaagtggcaggtgttccggttgctcaccacatctgggacatctcacgacttcatcgtcagcgaagctcccgcagccacaaggagccactcgacctcgacttcgagcagatgttcggcaagggcatcgcctgccttcccgcacacctggggaccgatgcctatcaatcctatctcatggtcatgcctgccgaggtgctggcgaccctgtacgaaagattcggagcgcgtttgcttgagcagaacgtccgtacgttcctgcaggcgcgcggcaatgtgaaccagggaataagggcgacgatcctgaacgaacctgggatgttctttgcctataacaacgggattacggctactgcacagagtgtcgagacagggatgacggattccggtctggcgatcacgagggttgtcgatctccagatcgtcaatggtggccagaccacggcatcgctgttccacacacggaagcgggacaaggccgatctttcccagatattcgtccagttgaagctgtccgtcatcgacagcctgcagagcgaaacggtcgttccaaggatatcggagtatgcgaacacccagaatcgggtgaatgccgccgacttcttctcgaaccacccgttccatgtgcggatggaagggttttcccgacggatctgggcacccgcgcagaagggcgccccgcgcgagacgagatggttctatgagcgcgcgcgcggccagtatgccgatgcacagtcgaagctcacacccgcggagcagcgtcgcttcaaggcggagcatcccaagccacagatgttcacgaagacggacctcgcgaagttcgagaatgtctgggatgaccatcccaggtgggtgaatcttggctcccagaagaactttgcgcgctacgccgcccgaatcggcagcgagtgggagaaatcatccgacgcgttcaacgagttctatttcaagagggctgtcgcacgtggtctgatcttccgcgccacggagcgcatcgtttctgcgcagccttggtacaacggcgggtaccgagcaaacatcgtggcctacacgctggcggtactcggtgacatcacgaagcgcaggaaggagagcatcgactttctgggcatctggaatgcacagaaggtcgatccggtgctcgaaagtgccatcgctgtcgtgtcgggggtcgtgaacgacgacatcatcagaccaccgcaaggcatttccaacatttccgagtggtgcaagaaggaggcgtgctggacgaggatacaggctcgtaccgacgccattgccaatctcctcccgcccgagttctacgatcgacttgttccgcaggatgatcaggcagcgatcgtgaagactgcgaagcagacgcagaggatcgacaacggcatcgaggcgcagcgaaaagtgctggctgttcccgctgcggaatgggctcgcatccatcagtcgctgcttgagaaagatctgctcaccctgaaggaagacggcgtgctcagggtggccatgcagattccctccaagctcccgacagaaaagcagagtgtggtgttgctggatattctggagaaagggcgtctcgaaggcgtggttgtgagcgagtcctga

SEQ ID NO: 342123 - DNA, 459 bp, Pseudomonas aeruginosa
atgctcaagaccatgcgcgttcctaccactccgcagcgcagccgcatgatgtcgagcattcgcggaaagaacacccggccggaacggatacttcgctccctccttttcgccaggggttttcgatatcgacttcatgtgcgggggctgcccggctcccccgaccttgtgttcccgaagcgcagagcagtggtgttcgtccatggctgcttctggcaccgacatgaaggctgccgctacacaaccactcccaggaccaatgaagatttctggcggcagaagttccagggaaatgtcgctcgcgacaggcgccatgcggagatgctccatgctctcggctggcgcgtggcggtcgtctgggagtgcgccttgaagcactcggtcgaggagactgcgcaagcggttgaggagtggctgcatggcgatgaggatgtcctggtgattggtcagagcattgactag

SEQ ID NO: 342124 - DNA, 366 bp, Pseudomonas aeruginosa
atgggacagaccaaccgccgcaaatccgcatggcctgcgcttgccgtggtgttggctgtgtcgttctcggcgctgcagcctgccgtcgccgccgacagcctcgccttggagcgtgagcagctcgccgcgctcgcccgccaactcgacctgatcgaccgcctcgccgagcacgccgccaataccgctccgcaggaacgcgcccgctaccacttcgaccatgcccgcctgcgcgaggatcttcagcgcgtccgggcgggcatccaggactacctgacgccgccgcgcgcccagccgcgcgattcggtcgagctgtccggtgactaccgccagtccagcccgccctccgaccaggaggcaccccaatga

SEQ ID NO: 342125 - DNA, 234 bp, Pseudomonas aeruginosa
atgaacgccgcccaggtcagcgccttccaggccaacggcggcttcgcccccgccgccgtggccacggtggtgctcggtctggtgttcgccgtcctgctcctgtggggcgtgtgggccatgcgtaccgcctacaccggctgggccgagcagcgcctgtcccagcgtcagttcctgggtgtcgtcgtgcgattcgtcgcgatgtacctggtgctgacctatttcctcctgtcctga

SEQ ID NO: 342126 - DNA, 411 bp, Pseudomonas aeruginosa
atggctgccttgaacgatatcgcgcgtgacgggttggtgaccttcctgccgcacaggctgaaccgccagcccgtggtggtgaggggcctgaccgccgacgaactctggatctgcgccggcctgtccgcggtagcggggttcatcgccggcgtgccgctggcctgggccacgcacagcgtcgccatggcgccgaccctgatcgtggccggcgtggcggctggcgtgttcggtggtggcggcttcctgcgccggcagaagcgcggccgcccggacatctggctgtaccggcaactgcagtggcgcctggcgctgcgccatccgctggcagcgtcctcgctcggtgggcaccgtctcatcacgcggtctgggtactggaccacccggcgctcacgcggagcagccgcctcatga

SEQ ID NO: 342127 - DNA, 690 bp, Pseudomonas aeruginosa
atgagccgtttcaggaatgaagtccatcacctgcaggcccatgtgcgcacgctgcgcctgggcgccggtgcgttggtcgtggtggcgctgctgctcggtttcggctggtggagtgcgccgaggcaactgacgatccacgtgccccccgatctgcgctcgggcagcacccgcgcctggtgggatgtgccgcccgagaatgtctatgcgttcgccttctacgtctggcagcaggtccagcgctggccgacggatggtgagcaggactacccgcgcaacctccacgcgctgtcggcctatttcacaccgtcctgccaggccttcctgcgccaggactacgagcaccggcgcagcagcggcgaactgcggcagcgggtgcgcggcatctacgagattccggggcgcggctttggcgacaaccccacgatgcgggtgaagacggtttccagccgcgactggatcgtcacgctggacgtcagcgcggacgaatactacggcgccgagcaggtcaagcgggccctggtgcgctatccgctgaaagtggtgcggttggacgtcgacccccagcacaatcccttcggccttgcgctggactgctatgacggcgcgccgcagcgcatcgaggcaccgtcgccggcagcgccaccatccggcacgcccaacggtggcctttcgcagggaggcaacccatga

SEQ ID NO: 342128 - DNA, 888 bp, Pseudomonas aeruginosa
atgaaacacaacgtcctcaccatcgtggcgagcctggcccttggcttcggcctggtgccggacagccatgccatcgagatcctgcgctggcagcggctgccgctggccgtcccgctggtcgtcggccaggagcgcgtggtcttcatcgaccgcaacgtgcgtgtcggcctgcccccgagcctgggcgagcggctgcgcgtgcagagcgcgggcggcgccatctacctgcgcgccagcgaggccatcgcgccgacgcggctgcaactgcaggacgtggaatccggtgccatcgtgctggtcgacatcgcagccacggacgcccgggaaggcgtacagccgctggagcctgtacgcatcgtcctgcaggatgccgccgaggatgccagcggtgacacttccgccggtccgacccaagcagcgcaacccgccaggcgtcggcagacgccgataaccgttgtcctgacgcgctacgcggcacagaacctttacgcaccgctgcgcaccgtagagcccgtggccggcatcgggcgcgtgccgctgcggcgcccgctcgcgctggacacactgctgccaacgttgccgctcaaggcgcgagcgctggcggcctggcgactcgaagaccagtgggtcaccgccgtgcgcctgaccaacacctcgcctcaccgtatcgatctcgatccaagggtgctgcaaggcgacttcgtggccgcgaccttccagcatcccgacctggggccggcgggcgcttcgaccgacaccacggtggtctacctggtcacgcgcggccgtggcctggccgagtcgctgatgccggtgctcggccccatcgatgccggcacgaacctgccgccggccgccgctgcggggaggacgtccgatgaggagtaa

SEQ ID NO: 342129 - DNA, 1422 bp, Pseudomonas aeruginosa
atgaggagtaatcccctgttgaagtggctgctgattccgatggcgttgttgctggtgttcatcggtgccaggctgttctcaggcagtgacgctgcacctggcaagccggatgtcccggggcagctcactcccgaggaaatgaaggcgctcggcatcgcgggagacaccccgcgcgacaccgtcgctaccctggtcgcgcaggtcaagcagcttcgcaccgaattgcagaccgcgctgagcgacaaccgccagcacaaggcggagaacgagcgcctgcgtacccgcgagggtgcgatcgaccagcgcatccagaacgccctcgacagcgaacgccgccgcctggaacaggagcgcacccaggccgccagcgaccggcagcagacgcaagggctgatgcaggacttgcagcgccgcctggacggactgtccggcaagggcgatgccgccgacctgccgatcggccttggactggacgggcatgacggcggaccgctcacggatggcggcatgcgctggatcgaaccggatgacgcccggcccgatcctaagggcggttcggccggcggccagcgcttgccgggatttccctccagcttcggcccagcctcgccggggctgacggccgcgacggaggccgtcagcgacaggccggcgcagaccgttgccggcaccacccaggcggtctatacggtgcccaccaacgccacgctgatgggctcggtcgccatgaccgcgctgatcgggcgcattcccatcgacggcaccgtcaacgacccgtttcccttcaaggtgctgatcggggccgacaacctagcagccaacggcatcgagattcccgacgtggccggtgcggtggtcagcggcacggcctcgggcgactggacgctctcgtgcgtgcgtgggcaggtccgctccatcaccttcgtgttcagcgacggcaccatccgcacggtgccggaagacgatggcaagcgcagtcgaagccagaacagcaccagtctgctggatggcctgggctggatcagcgatccctacggcatcccgtgcgtctcgggcgagcgccgcagcaatgcccagcagtacctgggatcgcaggcgttgatcaccgcggccggcgcaggcgccgcctcgctcatcaagtccgacaacggcagcgtggccgtggtcgccaacaacagcggttcgctgggcacggtcggcatttcgggcaacgaggccatgggccgcatcctggccggtggcgtgcgcgacatggccgactgggtcaacaagctctacggccaggccttcgcggcggtctacgtgcagcccggcgccagggtggccgtgcacctggagcagccgatcgccatcgaccacgacgccaaggggcgccgggtgaatcacctcatgggagaagcacatgcgtcggacctggattga

SEQ ID NO: 342130 - DNA, 432 bp, Pseudomonas aeruginosa
atgcgtcggacctggattgaccgcccccttgtcctgctcgccgccgccgttctcgcaggttgtgccaccagctcggaaaagctgctgccccggggcgagcacaccatgctggacatctggcagcacgagactggcggctacagcggcggccaggccggccgcctgctgctcgacgcacgccaggacctgcgccgtccgctgaccgacgctgacaccctcgcggcgtccgcccggaacgcggcctacacccgcacggcagcgaacgagatccagcgccagttccatcgactgccgaaccccgatctggtgatgtacgtctttccgcacctggccggcaccgacccagtaccggtgcccggctacagcaccgtcttcccgctctaccagcgcgtgcagtacgcgatgcccggcgagcggctggaggactactga

SEQ ID NO: 342131 - DNA, 777 bp, Pseudomonas aeruginosa
atgtcctcgaaacgaaccaccttgccgggccgggtccaggcccttcgcaagcgcgccgggcgcctgccacggctgcactggatggtggctggcatcctggctgctggcctgctgggatggctcctgtaccgcacgcccggtgcgccggcaccgcgcacgggggccgaggtcgcgcaggcgcatccggccggcccaccctggcgccacggcccagccgatgcgcgcttcaccttgacgctgtacgccgacctggagtgtccgttctgcaaggcctattacccgaccctgatggcctggatcgatgcccatcccgagaccagcctgcggtggcatcacctgccgctggcgatgcacgatcccgaggcgagtcggctggcccgcgtggccgagtgcgcaggcgaagcgcaaggccacgaggccttcttcgatgccatcgcatggctctaccaaaacacccggggcgatggccaggggttgcccaccgatcatggctggccaggcctgacgaccgccatccaagcatgcctggacagcgccccccccacagccatcgttcgcgcgcaggccgaagaggccctgcgcagcggcatcaacgccacgcccaccgtgcggctggaagacagcctaacggggaaatcgctgctgctgcacggtccggtcgagggcgatgcgctgctgtcggctctggacttggtcgcgtcagaagaaactgttggacccaaggcatccgaatcaccgaaaagcgatgccactctgaccgagagtcgagcgagatag

SEQ ID NO: 342132 - DNA, 417 bp, Pseudomonas aeruginosa
atgaacgccctcgatgcggagcaggcgcggcgctttgcgctggcgtggctgcccgcctggaccggcaacgatcctcagcggttggctgccttctattccgaggatgccttctatctcgaccctgccgtaccccaagggctgcggggaaagcccgcgttgctgggctatctcgagcgcctgttggcacgcaatccggcgtgggtctggacgcaggtcgagggcatccccatgcaggatggcttcctcaacaaatggcgcgcggacatcccggtcggcagcgaggtgttgaccgtggtcggcgtatgcctggtgcaactggaccatgcgggcaagattcgccgcaacgaagtgtatttcgaccgctccgagctactggcaagaattgccgcagctatcgagccgcagaacagcgaatga

SEQ ID NO: 342133 - DNA, 594 bp, Pseudomonas aeruginosa
atgaccccaacctcgacccaaaccctcgggaccctcgacacaacccgctggctgcgcggacagtccaacgcgaccaaggtgctggcggtgctgttcggcaccctcgtgctcaccgcgtcgtcccacctcagcgtgcctatggtgccggtgccaatgaccatgcagacgctggccgtcacgctggtcggcgcactgtacggctggcgcctgggtggcctgacgatcctcgtctggctggcccagggcgcgctcggcttgccggtgttcgccggcggcacgggaggtctggcgcgcttcctgggaccgacgggtggctacctgctggcttttcccgtggccggcgcgatgaccggctggctggtcgaacgcggctggcatggcgggcgcgtcgtgttggccttcgcggcgatgctgatcggcaacgccctgtgcctgctgctcggcggcgcctggctggccgcgatggttggcgtgcagaaagcgatcgccgtgggcgtggcccccttcgtcctcggcggcgtgctcaagtcggtgcttggtgcagcgctgctcaaggccatcgacagcggtacccgcaaggcggcgcaccgatga

SEQ ID NO: 342134 - DNA, 459 bp, Pseudomonas aeruginosa
atgacccaagccgccccatccttgccgctcgatccccaggtcgagcgaatcgtccgcgacagcttcgcccgccagggcctgatgcaccacctgggcgccgaactgcacgaggttgcgcgcgggcgggtcagcatccggttgccgttccgcgaaaccctcacccagcagcatggctacttccatgccggcggcaccagcgccatcgccgactcggccggtggctacgcgggcttcacgctgtttccaccggacagctccgtgctgaccgtcgagttcaagatcaacctgctcgcccccgcgcagggcgactacctcgaagcggtcggcacggtggtgcgctccggacgcaccctgaccatctgccaactcgaagtcttcggcgtcaccgagcagggacgggcccaggtggcgctcggccagcaaaccctgatctgcctgcagggcaagcaggatcgatga

SEQ ID NO: 342135 - DNA, 795 bp, Pseudomonas aeruginosa
atgtcttccgatttcattcgatgcgcgtcgcacccagacggctatgccgagttggtcatcgaccggccggcagcccgcaacgccctgtgccgctcactgaccgatgcgatggccgcgcacctcgacaggctggcggccgacgccgccgtgcgggtggtcctgctgcgcgccgaaggcgaacacttcgcggccggtgccgatctcaaggaaatgctgggcatcagcgcggagcaggcgcgggccactgacttcgccggttgctgcgcgccgctgggcacgttccccaagcccgtggtggcgctggtgcagggcttcgcgctcggcggcggctgcgaactggtcgagatgtgcgacatcgtgctggcggccgagaacgccgtgttcggccacccggaggttcgcgtcggcaccatgcccggtgcgggcggcacgcagcgcctgccgcgcctgctcggcatggccaaggcgctggacctgctgctgaccgggcgccgcatggacgcccgcgaggccgaacgcagcgggctggtctcgcgcatcgtgccccccgatcacctgctcgaagagggccgccggctcgcctccgacatggcgtcgctgtcgggcgaggtgctggtcctgatcaagcaggccgcgcgtgccagcgccagcctgcccatggacgaaggactgcgccgcgagcgggccgccttccaccacaccctttcgctgcccgaccacgaggaaggcatgcgtgcattcctggagaagcggccacctcgattcaaccccctctccactgcaaaggaaccttag

SEQ ID NO: 342136 - DNA, 594 bp, Pseudomonas aeruginosa
atggaacataccgccctcgtggcgctgatcgtctacgccttcgtcatgtcgatcacgcccggtcccaacaacgtgatgctgatgtcctcgggcctgctcttcggcctgggccgaacctggccgcacctgctgggcatccccgcgggcgtgatggtgcagctcgggatcaccggcgccggcctcggtgcggtgtttgccctcgaacctcgcctgcaggtcgcattgaaggtcgtgggcagcctctacctgctctggctggccgcgcgcctgtggcgcgcggccgaactggaggagaccgaagccggccggcccataggcttcatgcaggcgttggccttccagttcgtcaatccgaaggcctggctgatctcggtgacggtggtgtccaccttcctgccgccgggcgaaggctacgcactgcgcctgctggtggtcagcctggtgttcgccgccatcggactgccctgcatgctggtctgggccgccttcggcgccggcctgcggccctggctgcgcgaccgcgccgtcgctcgcgtggtcaatcgtgcgatggcgaccctggccgccctgaccgttcttctcttctggatgtga

SEQ ID NO: 342137 - DNA, 393 bp, Pseudomonas aeruginosa
atgacgacactctctcatgatcaactccgggcccatgcgctggcctggatcgacgactggaaccggcgcgacgtgccggcggtgctggccgcctacgccgacgatgcactgttcgtgagcgcgctggcccagccctataccggtggcacgcgggtacaaggcaaggacgcgctgcgccgctactggctggccgcgctcgccgacaggccggacctgcggttcgaactcatctcggccatctgcgatgtcgaggcgcagaccgtcgtcgtccattacgtggcgcaggcctgcggcaagcgcacgcgcatgtgcgagatcatgcgcttcgagaacgggcggcaggtccatggcgaggctctgcacggcgtccccgccgaggaggacacgccatga

SEQ ID NO: 342138 - DNA, 402 bp, Pseudomonas aeruginosa
atgacggcactgctgcgcgccgtccggaccgacgacggcaaccgctatgactggggtggggtctgcctgggctggcgactgctggaactgcaacacatgcaggtgcggcaggaatggatgcccgcaggcggcgccgaagcaccccactggcacgccagggcgcaccagttcttctacgtgctcagtggccacctgcgcctgagcacgcccgaccaggacgtgctgctggcagcccgtcaaggcgtgcatgtcccggccggcactcgccacatcgccgccaatggtggcgacgaggacgtgaattttctggtgttctccagccccagcacgcagggcgaccgcatcgaatcgacctcggccgccgaaccggatcgccatcgcgactcggagcctgcgtcatga

SEQ ID NO: 342139 - DNA, 300 bp, Pseudomonas aeruginosa
atgaccgttttcgccattgcccaactcaccatccacgaccggaccgcctacgaccgctaccaggcgcgcttcatggaggtgttccgccaccaccggggacgtctgctggccgcggacgagcagcctcgcaccatcgaaggcacctggccgcaccagaagctcgtgctcatgtcctttcccgacgaagccgccttccatgactgggcggaatcggacgagtaccaacgcattgcccaggatcgcatggccggcgcgcaggccgtggtgctgctggtccagggtctcgctgtgaatgactga

SEQ ID NO: 342140 - DNA, 963 bp, Pseudomonas aeruginosa
atgactgagcccatcgacattcgcgccgccgacggctatgcactgggtggattcgcctggcgccgcccctgcgatccacgacgcccgcatccggtcgcggtcatcaacgctgccacctcggtgcgctgccggtactacgggcgctttgccgactggctccacagccacggatgggacgtggtgacctacgactaccgcggcatcggcgaatcgcgacaccgtgggctgcgtcggctgcaggccgactggatcgactgggggcagcacgatttcgagggtgtgctgcagtacctcgcctggcgattccccggccagccgatcgacgtggtcggccactccgctgggggcttcgtgatcgggctggccgcgtccgcacaccgcgtgcggcgcatcttcaccatgggggcgcagtacgcctactggcgcgactatgcgcccgccgcacgccgcgccatgttcctgcgctggcacgtggccatgccgctgctggcgcgggtgcttggctacgtgccagccaagcgcctgggatggatggaggacacgcccaagggcgtggcactggactgggcacgcatgggtccccgcttcgagggcacggtgcgccgaggtcgggagacactggaaggcgagcccgaagccgaaatgctggcacggcgcttcggccaggtgcgcgcaccgatcctggcgctgggcatcgaggacgatccgttcggcacggtcccggcgctggaccgcctgctggattactacaccggcagcgagcgtcatcacctgcgcttggctcccgcggccatcgagcaggccgaaatcggccatttcgccttcttccacgagcgcttccgcgaggcgctgtggcccctggcgctggactggttgcgtaccggcgagccaccaacccacccactcggcgcactgaagcatcgacctgcggacgatccacaagcagcgggagccacgacatga

SEQ ID NO: 342141 - DNA, 1245 bp, Pseudomonas aeruginosa
atgaacacgaacctcgccccctcgacagcatcggcaaacgagcgccgatcgctctggattccgatcctggccggcggactgatcatgggtttggccctcggtgtgcggcacgtgcaaggcttgtttctgctgccggtgacgatggatcgcggttggtcgcgcgaaatgttcggtttcgcgatggcggtgcagaacctgacctggggtctcgcccaacccttcaccgggatgattgccgaccgctacggttcggccaaggtcatcgcgggcgggctcgtgttctatgcgctggggcttttcttcatggttcaggcgcacagccacgtggcctttgttctgggcgctggcgtgtgcgtcggcatcgcgctgtcgggcacggcattcggtgcgatctacggcgcgctcagccgcctcgtgcaggctgagcgccgcagttgggcactggggctggccggcgccatcggtggcctcgggcagttcgccatggtcccggttgcgcaggccttgatcggcggttgggcctggacgggtgcgctgctgattctgtcagttgtcatggcgttgctgctgccgctggcgttcccgatgcgcgacgcaagcatctcgaacgcggtggtcggcacggagctgtcgatgaaggcggcgatcggtgaagccttccgccaccgcggcttctggctgctgaacctgggcttcctggcctgtggcttccaactcgccttcatcgccacgcacctcccagcctacctgctggaccggggcctggccgccaccgatgccgtcgccgcgctggcgatcattgcgctgaccaatgtggccggcacctacctgctggggctttggggtggcacgctgcgcaggaagtacctgcttgcaggcctgtacctggcgcgcacggtggcgatggccctgttcgtcctgctgccgctcagcacatggggcgtttacctgttcgctgcagtgatggggttcctctggctcgggacggttccgctgaccaatggcctggtgtctcagatcttcggcgtgcgctacatcaccacattgttcggtttcgtcttcttcggccaccagttgggatcattcttcggtgtctggcttggtggccgcatgttcgaggctactgggtcgtacctgagcatctggctgctggcgattgcgctgggcctgctggcgacggttctgcactggccgatcgacgacaggaccatcgttcgcgccgatccacggttggcgacttcatga

SEQ ID NO: 342142 - DNA, 138 bp, Pseudomonas aeruginosa
atgaggcaaggccgcgaatggttgaaacgttgggcaccgctggctgtgctgctggctgcgggcgtgctggtgttccgcgcctggctgtcgatggaactgctgtgggtgtggttggagcagtggtccttctgcgggtga

SEQ ID NO: 342143 - DNA, 570 bp, Pseudomonas aeruginosa
atgaacaacctgcagcaggtcgattggtcgcgccttccgcagccggaggatgatggcggcgcccgccacctgacgggcatgcgcctgcccacgcttgaactggcatcgacggatggtggccgtgtcgatccttcgcgcctgcgcggacgcacggtgctttatctcttcccgatgacgggccggccagatgtcgcactgcctccaggctgggacgagattccaggagcacggggctgcaccccgcaatcctgtgccttcagggaccatttcgccgaactgaagtccttgggcgccgcccagttgttcggcgtgtccacgcaggacaccgcgtaccaatgcgaggcggtggcgcgcctgcacctgcctttcccgttgctgtccgaccatcgcctttcattcgcaaccgcgctcggtctgccggtcttcgaggtgcaaggcctggcgctgctcaagcgactgaccctgattgcgcgcgatggcgtgatcgagcatgtgttctatcctgtgttcccgccggaccggaatgccgacgatgtcgtcgcgtggttgaggcaacagccagccacttga

SEQ ID NO: 342144 - DNA, 504 bp, Pseudomonas aeruginosa
atgagtaacgcatatccaaaagaccagaaagcaccgccggatgacgatgtgacgcttcgacggctcattgcccatgacgccgttgcacttgcctccctgctggccgcctatggcgacgaaatgcgccacgagcaaggcgccggggcgaatgcactggcccgtgccaatgccttgatcgccgatccgatcgtggaagtgctgggtggctttctcggcgacgaactcgtcgccttcgcagtgttcttcgatctgcccgaggcgatctccggagggcggtcgggccagctcgacgacctgtacgtcctgcccgccgcgcgcgggaaacgactcgctcagcggctcatcgcggccatcgccgatatcggtcgatcacgcgcctggatccatctgcgctggctggtccccgaggacaaccccgacgccatccgggcctacgcgcgcttcgccgaacccgccggctggaagagctacgtgctttggctggccggtagcgagcggtggtga

SEQ ID NO: 342145 - DNA, 915 bp, Pseudomonas aeruginosa
atgcgcatccctgtcccgttgaatgccttgcgcgccttcgaggctgcggcgcgccatctctcgatcaaggacgcggccctggaactggcggtcaccccctcggcggtcagccaccagttgcgcacgctggaggacatgctcggcgtcgaactgctgcgccgcatcggtacgcggctggaattgaccagcgccggccgccggctggcacctagcctcaacgagggtttcgccctgatcgccgagggcgtgagcagcttgcgcgaggagcggcgcgacgggcccctgcgcgtgaacatgctgccgaccttcgcgaccaactggctgtcgccccgcctgagcctgtatccgttcgagcggcgcggcttctcgctggacatctccaccacgcaggacgacgtggatctggccgccggcgtggccgatgccggcatctggtatggcgacggccagtgggccggcctgcaggccgacctgttgttcgaggccaccatcgatctgtacgcgcgcccgggctttgccaccggctcgcgccgggaacgcctcaagcaggtcgcgcgcgccaacctgttcgtatcgcggcattgcctcacctggcagcgctggatggacagcctgcccggtggaccgttcgagccggctgtcgtaacccgcgtggactcgggcggcctgacgatgcaggcggccgccgatggggccggcgtgtcgatcgccgtctgcgaactggccgagagtgccgtccggctcggacgcctggcctcggtcttcgaccaccctgtgagcgcgggcgtcggcttctggctcgtctatcccgaggcgctatccgaagatcgacggctggataacctgcgcggctggctgcgcgagcaatgtcagtcggaaagcggaactcggaacccagaagcgcggacagcatag

SEQ ID NO: 342146 - DNA, 978 bp, Pseudomonas aeruginosa
atgctcaattcccttgacgatcgcgatggcctgatctggctcgatggcgagctgctgccctggcgcgaggcgcgcctgcacgtgctcacgcatgcgctgcacatgggcggggccgtcttcgagggcatgcgcgcctatggcggtcatgtcttcctcaatgcgcctcacctggaacgcttccagcagtccgccgcgctgctggactaccacctgccgtggtcgcaaggcgaactgacacaggccatcgaggcggtgctgtgggccaaccagctcgacgacgcctacatccgcccggtggcctggcgcggcgcggagagtgtttccatcgcttcgccgcgcgcccgcatccacgtggcgatcgcggcctgggactggcccacggcggcgtcccagggccgcgccgaggaaggcatccggctgcagctggcgagttggcggcgtccccgtcctgacaccgcacccaccgcggccaagtgctcggggctgtacatgatcggtacccttgcgcgccatgccgccgcagcggcgggctgcaacgacgcactgctgctcgacagcgaaggccgggtcgccgagaccacggcaaccaacctgttgatggtccatgacggggtgctggtgaccccattgccgacctgcttcctcgacggcatcaccaagcggcacgtgatgggactggcgcgccagcgcgggctgcgggtcgaggagcggaccgtgacgctggacgaactgcgcgccgcctccgaggtattcaccgccggcacctcggtcgaactgcagccggtggtggcgctggtcgaggatgcggcgaccaccgaatggcccgtggggccggtgacgcgacaactgatccgggactttcgcgcgtccgtgaccgaggcgagccaggtcggccggacgctgcgggaacgggagaccggcttgttggaacggcgcccgtggcccgctcgcgtcgcctccgccttgcaggcgccgtag

SEQ ID NO: 342147 - DNA, 1302 bp, Pseudomonas aeruginosa
atggcagaaaagaccgcgtcggacatctttgagcgcattcgccgcgaggcacatgcgggccagcttgccgcgggccagacactgccgtccgtgcgcgagatggccgatcaactgggcgttaaccgcaacacggtcgccgccgcgtaccggaagctggtggccgcaggcattgccgagacgctggggcgcaacggaacggtgatccggccagcggcgcgtctcggtgagcaggagggcctgcagcccggctcggcgctggcggatctggccagcggcaatccggacccggcctggctgcccgatccattgcaggcgctggcagccagcggctaccggcccgcgctgtatggccagcctgtactcgacccagcactcgaacggctggcgcggcagtggttcggagcggatctccgggagggtgacggtctggtgctggcgcatggtgcggtcgatgcgatcgagcgtctgttggctgcctacctcgtcgccggcgacaaggtggcggtggaggacccgtgcttcctcggcagcctcaatatcctgcacagcacgggcctggcagcggtgcccgtggccatggatgcgcacggcatgcgcccgcaggcgctggaagcggcgctggccaatggcgcccaggcggtgctgtgcacaccaagggcgcaaaaccccaccggctgcggcctgagcgagcagcgcgcccgcgaactgcgccgcgtgctcgcccgccatccgcacgtgctggtgatcgaggacgaccacttcgccttgctggccgagacgccgtacttctctatcgcgcccgcggccaccacgcggcgggcgctggtgcgctccgtgtccaagggcttcggcccggacctgcggctggccttcatcgctaccgatgcggggaccgccgcaaggctcggcatgcgactggctcccggcacgacctgggtcagccacctgctgcaggcggccgtgcgcggcctgctcggatccgacgcggccacggcgcgcctgcatgcggccaagaccgcctacgccatgcgtcgcaaggccctgatcgatgcactcggcgccgtgggcatcgccgccaggcagccctgcgacgggttcaatgtgtggattccgttgccggaagaccgtgacgttcaccgcaccgcgcaaagcctcgcacgctgcggctgggccgtgcgaaccggcgatgccttcgcgatcgcgcccgcggcccccgcgctgcgagtcacggtctcgacgctcgaacccggggacgcggcgcgctttgccgcgcaactgcgcgactgtctggggcgtgtatga

SEQ ID NO: 342148 - DNA, 855 bp, Pseudomonas aeruginosa
atgtatattttgtcctatgccaatgttagcagcacggagaaccccttgtccatgaacgcgcagacgcatccctggcccaccgcacacagcgtcgaggactttcggcgcaatctggcggcggtgcatcggcgcatcgccgatgcctgctcccgcgcgggacgcgatccgtccgatgtgcgcctgctgccggtcagcaagaccgtgccggaggagcgcatccgtctggcttacgccgccggctgccgcgacctgggtgagaacaaggtgcaggaggcgcagcgcaaggccgaagcgatggtggatctcgccgacctgcgctggtcggtcatcggccacctgcagaccaacaaggccaaggtcgtggcacgcttcgccagcgagttccaggccctggacagcctgcgtgtggcggaggcgctggaccgtcgcctgcaagccgaagggcgcgcactggatgtgttcgtgcaggtcaacacctcgggcgaggccagcaagttcggcttgccgccttccgaggtggccggcttcgtccgggcgctgccgggcttctccaccctgcgcgtgcgaggcctgatgacactggcgctgctgtcggccgatccggcgcgggtccgtccctgcttcgtgctgttgcgcgaactgcgtgatcggctgcgccaggaggcgccggcgggcatcggcatggacgaactgtcgatggggatgtccggcgacttcgagctggccatcgaggaaggcgccaccgtcgtgcgcgtcggccaggccatctttggcgctcgcgcgacgccggacagccattactggcccgacgacgaccgggctgcgacatcgaccgcatcggagcagaccgcatga

SEQ ID NO: 342149 - DNA, 714 bp, Pseudomonas aeruginosa
atgaagaccgccttggccctgcgccacatccatttcgaagacctcggcacgctcgaaccgctgctgcgcgagcgtggattcgacgtgcgctacctcgaccccgcgacggacgacctggccggtgaggaggccgcggcaagcgatcttctcattgcactgggtgggccgatcggcgccttcgacgagcgggcctatccctttcttgccgacgaactgcgtctgctcgaacggcgcttggccagcggccggccgctgctcggcatttgtttgggcgcgcaattgatcgcgcgcctgctcggcgccgccgtcgcccccatgggcttcaaggagatcggcttcggcgcgctgacgctgacggatgcgggccgccgctcggtgctggcaccgctggccggcgtgccggtgctgcattggcacggcgaccgcttcgagctgcctgagggcagtgaactgctggcgagcaccgaaagctgcgtgcagcaggcctacgcggtcggcaaccgggtgctgggtctgcagttccacctggaagccgatgccagccgaatcgaacgctggctggtcggccattgctgcgagctgggccaggccggcgtcgatccgcgcacgctgcgcgcggatgccgagcggcatggggcaacgctgaaggctgcggcccaccgcacgatcggcgcgtggctggaccggcagcaggacaccgggggggcgtcctga

SEQ ID NO: 342150 - DNA, 843 bp, Pseudomonas aeruginosa
atgacggtgacccaacctgtgcccatcgatgtcatcagcatccagtcccaggtggtctacgggcgggtcggcaacaacgcggcgattcccgcgttggaagcctgcgggctgcttacgaccgcggtgccgaccgcgctgctcagcaacaccccgcactatccctcggtccatggcggtgcggtgcccgacgcgtggttcgctggctggttggatgacctggaggcgcgcggcatccccgcgtgcgctcgcgttgtgcaggtcggcttcctcggcgcgccgtcgcaggcacggatcctcgcatcctggtggtcgacgatgcgcgagcgccacccgcaactgcgcctgcacctggatccggtcattggcgactacgaccagggcgtgtatgcggcggctggcatggccgaggcctggcgcacgctgctgattccagaagcccacggcctcgtccccaatcggttcgagctggaacaggtcaccggcagaacgctgcagggtctggcggattgccgcgaggctgcccgtgcgctgttgcgcggccccacccaatgggtggtggtgaccagtgtccaggatgatcctgaaagcgccgtcgtccagacgctgctggagacgcgagagggggtatcgcgcctcttcgagcatccccgcgtgccctgcgtggtgaaaggggccggcgattacttcgccgcgcgcctgaccggccattgcctgcttggcatggggatgcctcaggccgtcgagcgcgcctgcggcgatactgccgagcaactgacccgcacccggcgcctgggctgggaggagatggcgatacacacgattgacgggagtgtccggccatga

SEQ ID NO: 342151 - DNA, 276 bp, Pseudomonas aeruginosa
atgaacgcctaccgcctcgtgatttcccggcatggccggctgctgggtcagttcgacagcgaaacgccctgggcgggcgacgcggtccgcgacctgcaacagcgacttcccgaatgcgatggctatcgcaccgaactgttcatcgcgcgcgaagagcgccgattgctcgaaagcggtcctggcggcctgaaggtcctcggccgcgagccgttgttccaacccttgccgatcacggcgctgctgtccggcacggcgcccgaggagccgctcgcgtga

SEQ ID NO: 342152 - DNA, 909 bp, Pseudomonas aeruginosa
atggagctgcgacacctgcgctgtttcgtggcagtggccgaggaactgcacttcacgcgtgcggcggtacggctccatatcgagcagtcgccgctgtcgcgcaccatccgggaactggagtccgacctcggcgccacgctgttcgaacgcaatcggcgcggcacccagctcacctgggcgggccaggtgctgctggaggatgcccgccgcgtgttcgcggtgctggaacaggcacgaaccaacgtccgggccgccgccacgggctatcgcggcatgctgcgcatcgcgctgtcggacggtatcgcgcagacacgcctcgcggcactcctggccctgtgccgggaagaggagcccgatgtggagatccgcctgttcgagacgccgctcgcatcgcaagtgcgcgggttgcgcgacgacactttcgatgccgggttcgcgcagtccgacgaagctggagagggcattctgtgcgaggcgatctggtccgatcccatcctggtggccattccgacgcgccatcctttgctggccttcaggcaggtccctctggatgaactgctgcgctatcccctgatcaagtgccacccggaagcttgcgagggcgcgtaccggcagatcaaacggctgctccgcacggccgccatccagccccggattgccgagcgggtcgcgacactggaattgatgttgacgctggtggctgcgggctacggactgggtctcgccacggcggcgcagatttcggtctgccgccatcccgagatcattgcgcggcccctgtcggacccgtcggcatgcatgaccacctacctgttgcggccggacagcgagccctcggaaccgctgcagcacttcatcgaacgcgccatgctctcgcgcgacgacagtcccgccgtcgatccgatctag

SEQ ID NO: 342153 - DNA, 888 bp, Pseudomonas aeruginosa
atgaacaaatccttcctgcaagtcgatgtgttcacgagccagccgctcaggggcaacccggctgccgtcgtgttcgatgccgacgacctcgatgcgcgaaccatgcagcggatcgcgcgcgagatgaacctgtccgagacggtcttcgtgctggccccggaatcgcccgacaccgactatcgggtgcgcatcttcacgccctccagcgagttgccgttcgcggggcaccccaccatcgccactgcgagcgcggtgcgtgcgcaccgtggcgacctggccgatgcaagtctgctgcggcaggcctgcggcatcggcatcgtgcctgtcgaagtcgttccgaccgagggttcgccgatctactggatgacccaggccagcccgcagttccgcgacacggccatcgatccgggagaaatgtcggccctgctgggctgcgatgcgaacatgctggccgcgatgcctgtggacgtcgtctccactggcatcccgtggctgatcgccgaactgcgcagcgtcgccgccctggcgtcgctgcgtcccgacctgcctcgcatcgccgaacgctgccgcgcatcgggtgccgtcggcgtgaccgtctttgccgagcacgaggccgaggcgccggtacgcttgcgcctgcgcacgttcgcgccaggcgaaggcgtggccgaggatcccgtctgcgggtctggaaacgggtgtgtcgcggcattcctggcaaggcaccggcacgcatcggctctccagggtggctaccttgcggagcaaggcatcgagatgggacgcgacggcctgatccatgtcgaatggacccgaaacggcgacgaactgacggtgcgcgtcggaggccaggccgtgaccgtcgccagcggcaccctgcatctgtag

SEQ ID NO: 342154 - DNA, 660 bp, Pseudomonas aeruginosa
atgttcgatatcccgctcctgatttcctacgtcctggcggcctggctgtccatccttacgcccggcccggccatcctgctggcgatgcgcaatggcgctcgccagggcgtggtcgcgagcctgtggtcgacgctgggcaacatgttggggttgctcgtggtttccgcggcggccgcgtggggcgtcggcctgttcctgcttgcctccgcccacgcgatgaccgcactgcggctggccggcgccgcctacctggcgtacctcggtctttgcctgcttgtgcagggcagacacacacggccgccggaccccggtgcccttgacgcagggccggtgcaggccttcgcgctggcgaaggagggattcctggtggcgacatccaatccgaagtcgatcctcttcttcaccgccttcttcccccagttcatccgggccgaccaggcgctcatccctcagttcatgggcctgaccgcgatcttcgtgatcctcagcggcgccaccttgaccggctatgccgccattgcaagccgggtgcggggagcattgggcacctccgtctggcgccagcgctggacgcgcctggcggggatcggtttcctcggattcgccgcatggattcttttgtggagaccgtcgagcggcgccaaggcattggccgcgtga

SEQ ID NO: 342155 - DNA, 612 bp, Pseudomonas aeruginosa
atgagccaccttcagaccgttcgcctcttgatgcttcccggtatcggcaattccgggccggagcattggcagacgcgctgggcgtcgcgccaggagcatggccggcgattccagcctgccgactgggacaggccggacctggccgactggctgcgggcactcgatgcagccatcgacgagtgcgccgcacccgtcgtactggtcgcacacagcctttcgtgcctgctcgtcgcgcactgggcatcgcggccgggaatcggagaagacatccagcatcgaatcgcccaggtccggggcgccttcctcgttgccgtccctgaccccggcgcaccggcgtttccgggcgaggcgagcgagttcagcccgccaccgaccgaacccctgccgtttcccgcactggtggtcgccagcagcgacgacccctatggctcgctggagcacgcccggcgcatggccatgggttgggcagcgggatgcgttgaagtcggcgccctcgggcatatcaatgccgccagcggcgtgggcgactgggacaccggctggcatctgctgcaggcattcggagcggggctgcgcgtccagatgccggcatcgaatcgaccgggagggtga

SEQ ID NO: 342156 - DNA, 207 bp, Pseudomonas aeruginosa
atgcgcgcgtatcgctacctgaccggcatcgacgacgcggcgttctgccaccgcgtcaccgcggccctgaacagcggctgggagttgtatggcgcgccgagcctgacctacgacgcggcgcgtggcgcagtgatctgcggccaggccatcgtcaagaccatcgaatcgacgacgtacagcgagtcactggacttgtctgtgctctga

SEQ ID NO: 342157 - DNA, 636 bp, Pseudomonas aeruginosa
atggatgcatcgactgcgatcctgggcttcacgctgacggcgctgctgctcacattgacccccggcctggacacggcgctggtacttcgcacggccgcagtggaaggggggcacaaggcgatgagtgcgggcggcggcatcgtgaccggcgtgctgatctgggggctgatcgcggccctcgggctcggcgcggtgctcgcggtctcccgactcgcctacaccctgctgcagatcgcgggcgcggcctatctgctctggctcggctggaagctgatctctggcgcgctcaagagccggccggcgctacccgcagatgatccgccgctcgtgcgtggcgagcgctggttcctgcgcggtctgctgacgaatcttctcaatcccaaggtcggggtgttctacgtgagcctcctgccacagttcgttcccgccgacgtgccggtggtcgggttcagcgtgctgttggccggcatccacgccgcgatgggactactctggttcgccgcactggtgctggccacgcggccactggcacgctggctgcgccggcccacggtgctgcgctcgctcgatgcgctcaccggcctggcgctgatggggtttggcctgcgcctggccctgtccaggccgacgagttga

SEQ ID NO: 342158 - DNA, 759 bp, Pseudomonas aeruginosa
atggacaacggaactttcctgctgctggccggtgccggcatgatcggcggcatctgcaatgcggtggccggcggcggcacattcttcacctttcccgcgctactggctgccggcgtaccacccgtggtggccaacgccaccagcgcggtgtcgatctggccggggcatgcgagcagcctgctcggctatcgcagcgaactcgggcgccaccgcgccgcgttgcggcgcagcctgcccgtggtcggtgccggttcgctggtgggcgcagcactgttggtgttcaccggagatgcacagttcagccgtctggtaccgtggctgatcctcgtcgcgaccgtactgttcgccctggggccctggctgcgccaggccatcgagcggcatgcgcgcgggcaggtgccgcacctggtggcggcgggagcggagttcctgaccgcactctatggtggctacttcggcgccggcctgggcatcatgctgatggcgatcctgaccttgctgggtgtgcgcgatgtccaggaggccaacgccgtcaagaatgcgatggctaccgtcgtgaccagtgccgcggtgatgcttttcgtcgccaccgggtccatcgcctgggcgcaaggcagtgcggtcctgctgggcgcgatcgtggggggctatgccggcgcgcggctggcgcgctggattccgccgctggccctgcgttggacgatcgtggcgaccggcctggcgctctctgcgtacttcgggctgaaggcgggcgcatga

SEQ ID NO: 342159 - DNA, 1377 bp, Pseudomonas aeruginosa
atgaatccactcgatgcactgaccgcgctatggtcgctgggcgggctgccgccgcaggcgctggccgggatcgcgctgacgggcagcgacccggtgtttccctcgtccttcgccgtcggcaccgccgcgcaggccagcattgccgcggccgcgctcgccgcctgcgaactgggccatgagcgaggtgcttcgcgccagcgtgtcgccgtggacatggcccacgccgccgccgagtgcaccggctggtttacgctcgacggccaggagcccgagctgtgggacccgttcgccggcctgtaccgctgcgccgatggccacgtgcgtgtccacaccaacttcccgcaccaccgcgatggcgcgctgcgcctgctgggcctggacccggccaccgccacgcgcgccgacgccgagcaggccctgctgggctggaaggccctgcacttcgagcaggccgcggccgaccacgcactggtggccacggcgctgcgcagcttcgccgagtgggatgccacgccccagggccaagccgtggccgcgcaaccgctgatgacgatcacccggatcgccgatgcgccaccgcgcgcactgccgcccctggcggccgatgaacggccgctcgccggcctgcgcgtgctcgacctcacgcgcatcctggccggccccgtcggagggcgggcattggcatcgttcggcgcggacgtgatgctggtcaattcaccgaacctgcccaacatcgccgccatcgccgagaccagccgcggcaagcgctcggcgcacatcgacctgcgcagcgaggccgggcgcgaggcgctgtggcggctcgtggaaggcgcccacgtgttctcgcaggggtaccggcccggcggcctggccgcgctcggcttctcgcccgaggccctggccgcgcgccggcccggcatcgtcgccgtgtcgctgaccgcctacggtccgcaagggccctgggccggccagcgcggtttcgattcgctggtgcagacggcgatgggtttcaaccacgccgagggcgaggcggcgggcgacggcaagccgcgcgcgctgccgatgcagatcctcgaccaggccagcggcttcctgatggctttcggcgccgccgccgcgctgtggcgacagtcgcgcgaagggggaagctggcacgtgcaggtgtcgctggcgcagaccgggcactggctgcgcgggctggggcgcatcgaagagggcctgcgggctggcaggccggacctcagcccctggctcgccgacgaagtctccggcttcggcctgctgcgcgccgtgcgccccagcgcgcaactggcgcgaacaccggccggctacgcgcgaccatcggtgccgccgggaacggatcgctcgaactggtga

SEQ ID NO: 342160 - DNA, 1164 bp, Pseudomonas aeruginosa
atgcctgccacgtcagccttgccctcccatctgctgtggaccattgccctggcggcgggcgcatccgtggccaacagctactacaaccagccgcttctcggcgaactgagccgggagttcgcgctctctgcggggaccgtgacctggctgcccgtgctcacccaggcgggcaatgccctgggcgtgctgttcctggcaccactgggtgaccgcctggagcgcaagtcactcatcctgcgaacgctggcggcgctggtgctctccttggtgctggcagccgcgtcctccggcttcgttcaattggcactggcgagcctcgccgtgggcttgtgcgccaccgtggcgcagcaactggttcccttggccatccacctggcgccctcccaccgcaaggggcaggtgctcggcgtggtgacgggcggcatcctgatcggcatcctgctggcccgtgtggtgagcggctggatgaccgagctttggggctggcggtccgtcttcggtttttctgcggcactgatgctggtactgggctttcggctggcatggacactgccggtggtaccaccgtcctccgatctcggctatggacgattgctgctgtcgatgtggcatttggtgcgcaagcacgcttccttgcgccaggctgtggccgtccagttcctgctgtttgccagcacgatcggcttctgggcaacgttcgcgctctggctggagcggccgccgctgcagctcggcgcggtatccgccggcctgttcgcgctggttggcgtgtacggcgcgttggctgcaccggcggctggccgttttgccgaccggcgcggacacggcgcagtcgttcgtgccggcgcagtgtgcaccgccatggcatttgccgtgctgtacctggggggctcatcgatccccgcactcgtcctcggcatcttcttgctcgacgtggccgtgcagtcggcccaggtggcgaaccagaccatggtctatgcattggatgcgggtgcacgcagccggctgaacaccgtgttcatgggcacgatgctgcttggcggggccttcggcgctgctgcaggcgggtgggccttcaccgcgcatggatggaccggggtctgcgcctttggcatgctcagcaccaccattgcgtggggcctgtctcttcggctaacccaatga

SEQ ID NO: 342161 - DNA, 594 bp, Pseudomonas aeruginosa
atgatgacaagtgaattgacaaaccgtctgctggtcgaagcaaaccctaacatgacgccgatgccacctcaggtggtcatatcggggtgctccggcggcggcaagtcgaccctgctcggggaactgcggcggcgtggtcatgcgaccgtcgccgaacccgggcggaggatcatcgccgagcagattcgacagggcggcaacgccctgccatggaccgacatggcggcctttctgcgcgaggcgctgagcgtcgccgccatggatctcgaaggcgcggcacgggacgctggtccggttttcttcgaccgagggctgatcgacgccgctgcagcgcttcaacgactctgcggcgtatcgttggcgcaaagcctgggcgaatcccgcccttatgggcggctcgtgttcctcgcaccgccctggccggacatctatggcaccgacgaggcgcggcggcacggctttcccgaggcggaggcggagtacgcccacctggatgcaacctaccgggcactcggctacgaagtcaggttgcttccgcgcgccagtgtggccgagcgggccgacttcgttctccaagcgattcatcgctgctga

SEQ ID NO: 342162 - DNA, 261 bp, Pseudomonas aeruginosa
gtgctcgaagcggagctggccgacaacctgcccaccgatcctgagcgcgccagcgccatcgtccagcaacgcctgaagctgggcggtacagacctgcagcgaaggatcggcaccgcctaccagggcattgccgacgcctggagccttggcgtcctcaaggttccggccatcgtggtggatcgccgatacgtgctctatggcgagacggacgtggcccgtgcggtagcacgcatcgaccaataccggaggacgcagccatga

SEQ ID NO: 342163 - DNA, 951 bp, Pseudomonas aeruginosa
atgacgaggcgtccgttcgcgccatcccggcgccagcggttggccatcgcagcgctgttgctggggtgttccgcatcgtcctttgcactgaacaccgccaccatcgtggcctccaccctgtcgccggattgcctggagtaccgcgtcaccggcatctgctactggctctattgcacctggacgggatgcaccgtgcgcacctcggtcaaggtgcgccactacatcccggatgccgtggtgtcgagctactcgaacaccggcgagaacccttgggtcgaggtgcgggcgatgagcctgccgaacccgaccgcgaaggccggcggcgacggcaccaccaacgaggatcacgagaacaacctggcgaagttcaagaacgccgacgtcatcggccatcccggtggccatgtgttcagccagttcgccagcgcgtccggctacacctgcgagggcgcaggcaccgccttcatgccctatctgctgagcacgctcgacacgctggcatggcgctacaacatccccgaggcgctgtatccggaagcactgattcccggccggcgcgagatcggcacgcgcacggccatgaatctctggggcaacgtctatccgcgtggcggcttcctgcaccaggtggatgaccacaaggccgcagccgtggtcgcccagcgcgcgggtgacatcgtgacgcgccgcaaccagatccacgtgtaccagccgctgctcgcccgttcgcgcgatggctactggccggccggcgccctgatggaaaccgatgccgccacgggcaagtggcaggagctgacccccacgctgtccagcagttgcgcggtattcccccacggcaatgccaaggtgcaggcccggcaaggcgactacgcctgggcattgtggcgtccctatagctgctgccagcgccgcggccaggtgttcctcggcagcgtcgatttcctgtga

SEQ ID NO: 342164 - DNA, 1398 bp, Pseudomonas aeruginosa
atgacgacttcatttccgaacgcccgtcgatttctgcaagtcgcattggccgttgtcgcagcgctgtgctgctccagcgccggggcacagaccagcgtcaatgagtacggcgtccagcatcagggcagcgtgatcggcgatgacgtgctctacagcattggaggcggccgcgcggtgtccatgagcggtgcggccaacatgcactccatcggtgttggcgtcggctggaacagcaacctgatctgtggcgacatgagcatcaccaccacgctgcagaaccagttgaacggcatcaccaacggcttccaggccatcatgtcctcggtgatccagaacgccaccgctgccgtggcgtcgctgcccgccttgatcatccagcgcgccgatccagggctgtacaacctgctgacgaatggggtgctgcaagccaggctggatttcgatcgcagcaagctgacctgccgcgccatcgccaaccgcatggccgacatggcaggtgggcaactcggctgggaccagcttgccgaaggcatggcgctgaagcaggccgtcgcgagcaccgatgcggtctcggcgatcgacgacgccgaggcgaaccgtggcaacaatggcgtgccgtgggtcggcggagacaacgccggtggtgcgggccaacctccggtgcgtgtggtcggcgacgtgacccgcgccggctacaacctgctcaatggccgtggcgtcggcgatgccagttccattccgcaagccagttgcggtggcaacctggcgtgccagacctggagttcgcccgatgccgccgcggcttgggccgttcgcgtgctgggcgagcaggaacagcgcacctgcgatgcatgcaccaagaccgtcaccacgccgggcgttggcctgaccccgctgatccaggaggaatacgaggacaagctgcaggccctgcaggagctggtcgccggcagccgtccgaccacggcgcggaacctgcaggctgcgggcagcgcgtcgctgcccatcacccgtggcgtgatcgaggcgctgcgcgacgagacggaccaagacatcctggctcggcgcctggcctcggaggtcgcgctggccagcgtgctggagaaggcgctgctgctgcaacgcacgctgctgaccgggcgcaaggagcccaacgtggccgccaacgaactggcccagaaggccgtcacccacgaaagcgacatcctcgatcgcgagattcacaacctgaaggcagaactggaactgcgccgcgaactgtccagcaactcgccgatggcgatcatccagcgccacagctcccgtgccgccggtgcgcgtggcatctacgagggtgacccggtacgcaatcgggtcgatgaactgcagcggccgccgtccggtggaagccatccatga

SEQ ID NO: 342165 - DNA, 351 bp, Pseudomonas aeruginosa
atgaataccgtggggcggtgcctgcgctggctgtccagccggcgtgccatcctggtgctggtgtgggcggtgtcgctgctgatcgccgcgaccgccgtcaatgtggtcggcatccgcatcgcgggcggcatcgagggctggcagcgctggatggcggcgcaatccggggccttcctggcctggcggttgttgctctacgccgccaccgcctggggttggctccggatgcgacgtcgcctgcgcgcgcgggaaccggagcgcgctgccgggcagcggctgctgcgtgcggaggttgcggccatcgtcgccgtgatcgtgctggaggccagcctgctgatggaggcgcggtag

SEQ ID NO: 342166 - DNA, 1524 bp, Pseudomonas aeruginosa
atgacgctgtacaccaccgactatctggagtactacctgacgctagtgtcctgggtggtccacaacggcatctggtcggtgctggtcgccagcggcatgttcgccgtcccgttcctggcgatcatcatccaggaatggctgaaggcccgcgcggaaggcgcggacgaaggcaacaagggggtgctgtcctcggctcgcatcgagaaccgcgtcttcgttgccatcgtggtgatcatgttcgcgggcatccccttcatcgatgtcgatttcaacaccatcaagtacgaccgttcgcgttcgacccaatgccaagtgaatgtcccggagccgaccgatacgggctggtcgcaatcgttcagcacgatcaacaaccagtcggccaaggtgccggtgtggtggttcgccatgcacgcgacctcacgcgcgattaccggcgcctcggtcgcggccattccctgcggcaccgacctgcggcagatccgcatggacatcgacgcgacccgcatcgacgatccggtgctggcccaggaggtcagcgacttcacccgcgactgctatggccccgcccgcgccaagctgttcatgacccggcccagcctcagcgaggagcagatgcacgacgtcacctggatcggctccagctacttcgtcggcactaccggcttctacgacagctaccgctccagaacaccgcgcgatgcctggccgttcgacgccacgcgcgacgccggcctgacccaggtgcccggcgggggtggctacccgacctgccggcagtggtggtccgacggcggccacggcctgcgggcacgattgctggcccaggtcgatcccagcctgctgacgcgactggccggctgggcgggcttcctgagccaggccgaggtcaacgactcggtgatccgcgccgttgccagccctcgccagcagaagctcaaccagggggcggtctacacggactacggtggccagatcgacatgacgctgcccagcatcgtcacccgcgctgctagcgacgtggggctgaccgtcggatcactgggctatttcccggcgatggacgtggtgcggcaggcgctgccgatggtgctgtccctgctcaagatggcgctggtcatctgcatcccgctggtgctgctgatcggcacctatgacctcaagaccgtggtcacggtgagcgtggtgcagttcgcgctgttcttcaccgaattctggtttcagctcgcccgctggatcgactcgacgatcctcgatgcgctctacggctgggggtggggctggaaccggccgcacacgaacttcgatccgctggtgggcctcaacaacaccttcggagacatgctgctgaacttcgtgatggccacgatgtttttgatcttgccggcgttctggatgacggcattggtctgggcaggggtcagggccggcaatgttctgcaaggactgggtacgggcactcgcgatgcgggacaggcgggaagcaaaggctcgggcatgctgatcagtgcagccaagaaaaggtag

SEQ ID NO: 342167 - DNA, 372 bp, Pseudomonas aeruginosa
atgaagcacaccgcacgcatgaccaccgcagcgcgactcggccgttggctgggcggcgtatggcgcggttggctgcgctcggagcgtcgggtgcatcgatggctgatggcgcagggactgcccgcaggcggtgccgcggtgctgatctgggtgatcaagctggcgatccttggggtgttgctgtacgtcgcggtctgggcgacgctgttgctggtcgctctcgttgtggcagtcaggatggcggagcaagcgccgcaaggtgacgatgatttcctcggacgcaaggccgaagaactggatcatcgcgaaagcctgttctaccaccctgcgtcgtacaacgatgatcctgacccgcggtttgaagacgactga

SEQ ID NO: 342168 - DNA, 414 bp, Pseudomonas aeruginosa
atgcgcagggtcgtgctcgacaccaacatcgtgctgtcggcgctgatcttcaatgcaggacgcctggcctggatacgccacgcctggcagcaacagcagttgcagccgctggtctgccgggagacggccagtgaactgctgcgcgtcctggcctatcccaagttcaagctgtcgaccttggaacagcaggagttgctggcggactttctgccctacgccgatgtggtggaactgccgatgccatggccagacctgccgatctgccgcgacgagaaggatcaggtgttcctggtgctcgcgcatgtcggcaaggcagatgcgttgatcacgggtgatgcagacattctcgccatgcgagaggactttcccggcctgatcatgaccgccgaaacgttcgcggcgcggcaggcatga

SEQ ID NO: 342169 - DNA, 219 bp, Pseudomonas aeruginosa
atgcttgccaagctcacttcgaaaaatcagatcacgctgcccaaggcggccgtgtccggcgtggatgcggcggagtacttcgacgtgaccgtcgagggcggtcggatcgtcctgacccccgtgcgggtccagaaggcccaggccgtgcgcgagaagctggagcaactcgggatcaccgagcaggacgtcgaggatgccgtggcctgggcgcggcgctga

SEQ ID NO: 342170 - DNA, 1797 bp, Pseudomonas aeruginosa
atgctttcgctgttccagcgcaaacgggtgccgctgaccactgccgccgcgccacctcctgtcgagcccgccaaagggctgacgccaccgcagtcggccgcagcgctgctggcggagccgcaccggcagcggctgctggaacacatctggcagcgcacctcgctgtcgcgtcggcagtttcgctcgctgtacctggcgccgctggagcgctacgccgagctggtccagcagttcccggcctcggaggcgcatcaccatgcctggccgggcggcatgctggaccacggcctggagatcgtggcctacgcgctcaagctgaggcagtcccacttgcttccggccggcgcctcgcccgaggcccaggccgcgcaagccgaggcctggaccgccgggaccgcctacgccgcgttgctgcacgacattggcaagatcgcggtcgacctgcacgtcgagcaggccgatggcgtggtctggcacccctggcatgggccgctgcggcagccgtaccgctttcgttaccggacggatcgcgagtaccggctgcatggcgccgccacggggctgctctacacccgtgtgctcgatgccggcatcctcgactggctgagcgactaccaagacctgtggtcggcgctgctgtacgtcctggcaggccagtacgagcatgccggcacgctgggcgaactggtcgtcaaggccgaccaggcatcggtggcgctggcgctcggaggtgatccggccagggcgatggcggcgccgaagcatgcgctgcagcgcaagctgctggatggcctgcgctacctgctgcgcgaggagttcaagctgaaccagcccggcggcccgtcggatggatggctgacccaggacgcactctggctcgtcagcaagacggtcagcgacaagctgcgcgcgcatctcctgtcgcagggcatcgaaggcatcccatcgaacaacaccgccgtcttctcggtgctccaggaccatggcatcgtgcagcccgctccggatgggaaggcgatctggcgggcgaccgtcacaagcggcaccggctggtcgcacagctttaccttcctgcgtctgtcgccggccttgatctgggagtcgggcgagcgtcccgcaccattcgccggcacggtcacgacggaagagcccctccctggcgaagatgacgcgtcgaccccctccggtatcccggccacctcaccgtcccctggggtagcggattccccagccgggatcgcggacccggtctccgatctgctgtcgatgctcgatgcgtccgacgcagccaccaccagtgcatcgtccgccagcgcggaaccgccatcgccatccaccaccgcaactacgtctttgccccatttgacgccgaccactcctgcctccatgccggctcccgcgaaggccacgccgtccggggaagacttcatcgcctggctcaagcaaggcatcgagtcgcgcaagctcatcatcaacgatgcgaaggcactggtgcataccgtcgatggcacggcgtacctggtcagccccggtgttttccagcgctacgcgcaggaacatccggagatccaggtgctggcccggcaggacaatctgcacgactggcaatgggtgcagaagcgcttcgagaagctgggactgcaccgcaaacaggacagcggcctgaacatctggacttgcgaagtcaccgggccgcgcaagtcgcggcggttgcacggctatctgttggcgacgccttcgacattgttcgcggaagtcccgccggacaacccctacctgtccctgacgcggagctag

SEQ ID NO: 342171 - DNA, 1524 bp, Pseudomonas aeruginosa
ttgttcaagcatgcccaacttgaatccgtcaaagcctggctcggcgaccccgcgcacggcgccttgcccctgcatgcacgggtacagcgggccattcgccagttgatcctggatggcgcgctcgatgtaggccgccccctgcccgcgtcgcgcgcgttggcgaagtcgctgggggtgtcccgcgacacggtggagtcggcctatggccagttgcacgccgaaggtttcattgagcggcgggtcggcagtggcagcttcgtgtccgagcaggcccggtggctgcccgggcgcggcagaccacggcgcacgagcgtggatcgcaaggcacccctgcgcctgagccggcgcggcgatgccatgctccagggcggcggcgtgcgcgacttcctgatgtcgcgccccttcgcgcccggcgtgccggagacgcgcagctttccgctgccaacctgggagcgcttgcagcggcaggtgttgaaggagtacggcaccctggcgctgctgcacagcccaccgcagggcatggagccgttgcgacgcgccattgccgcctacgtcaacctcgaacgaggcgcgcaggccacacccgagcgcgtgctggtgctgaccagttcccaacaggccatgaccctgtgcgccaccgtgctgctcgatgctggcgagcgcatcttcatcgaagaccccgtgtaccacggggcgcgcaaggcatttgacgccgccgggttggattgcgtgcccgtgccgatggatgaccaaggcatgcagatagcgcacctgctggcaaaggcgcagaccccttgcaatgccgcccgggcggtgttcctgacgccctcgcaccagttcccaaccggggctacgctggcgttggaccggcgcctggccgtcatcgaatgggcccgccagcaccaggcttggatcatcgaggacgactacgacagcgaattccactacgaaggcaagcccaccgcatgcgtacaggggctcgacccccacggccgcacgatctacatcggcaccttcaccaagtcgctgttccccggcctgcgcatcggctacatggtgctgccggaggctctggtgtcgcccatgaccgtggcccgcaccctgctggatgggcacagcgcaccgatcccgcagctcaccctggctcgcttcatcgagggtgggcatttcggagcccatgtgcgaaccatgcgggccgtctatgcggaacgccgcgatgtgctggcgcagctggtgcgccagcacctggccgacttcgtggagcccagggtgcccgctggcgggatgcagatgccttgcgtgttcatccgcgacattcccgagcgcgaggcggtggaatcggcacggcgggtcggcatcgacctgctggggctgaccgcgctgcatgcatcgcgccgccatgcatcgggcagggatggggccggtttcctcatgggatttgctgcccatgcaccccatgaactggagatcgctgtcaagaagctggcaagcgtgctgcgtgcgctgtgtcgccgatcaccatga

SEQ ID NO: 342172 - DNA, 1242 bp, Pseudomonas aeruginosa
atgccgtcggatccttcagcttcgcccgttcgttggaacgatctcacccatcccgtcgtggccggactgatttcggtcatcgtcaactatggcggcactttcatcctggtgttccaggcagccaaggtcgcgggcctgagcccggagctgacggcctcgtgggtgtggtcgatttccattggcgtgggcgtgacaggcatcattttgagctgggtatcccgcgaaccgatcatcaccgcctggtccacgccggcagcggcgtttctggtcacagcactggcaaccacaccttatgccgaggccgtcggggcatacctgatctcggctaccgcctttgtgctgctgggcctgtcgggttggttcgagcgcgttatccgtttgataccgccaggcgtggctgccgggctgctggccggcatcctgctgcaattcggcactggcgccttcggcggcttgagcgtcgatccgctgctggcgggactgctgatcgccgcctatctggtgttcaagcgcttttccgcgcgctatgcggtggtgggcatcctggtgctgggattggtattcctgctggcgcagggccgcgtcgatctgtcgggactgagcctgaaactggccgcgccggtgttcaccatgcccgcgttctcgctcaacgccttgttgagcgtggcgttgccgctgttcctcattaccctgaccgggcagtacatgccgggcatgctggtattgcgcaatgacggcttcaagaccagcgccaaccccatcgtgaccatcacgggcctgggttcgctgctgatggcgccgttcggttcgcacgccttcaacatcgcggcgatcaccgccgccatctgcacgggccgggaggcacacgaagacccgtccaggcgttggatcgcggggatggccgctggggtgttctacgttctgatcggcgtgttcggggtgacgttggccgcggtcttcatggccttcccggcgaccttcatcaccacgctggcgggcctggccctgctggggacgatcggcggcagcctagccaccgccatgtccgatgccaggacccgggaagcctcactgatcacgtttctggcggccgccgccaacatcaccctgctgggcattggcggggcgttctgggggttggtgctagggctggcggcgcatgctgtgctcaacgggcgggtgctgctgcgggtacgtacatcggtcattacgcctacgcctgcaaacgagagggtgaagtga

SEQ ID NO: 342173 - DNA, 1299 bp, Pseudomonas aeruginosa
atgaccgaggctttcaacacacggactgacggttacgccaaccgtgccgaattcgaggaatctcccatgcagacgaccgcccctcacctgatgcgcgcctacgcccgccaacctgtctctttcgtgcgcggtaacggcgcgcggctctgggacgatcagggtgtggagtacctagatgccattgccggtgtcgcggttaccagcctgggtcatgcccacccggaaatcgcggccgtcatcgccgaacaggccggggcgctgctgcacacttccaacgtgttccgcatcgactggcaggagcagttgggggaacgcctgtgtgcgctgaccgggatggaaagcgccttcttctgcaactcgggtgcggaagccaacgaaaccgccctcaagttggccaggctgcatgcccatcgcaggcaggtggcacgaccgcagatcctagtcatgggcaacgccttccatggccgcacgctggccacgctcgccgccacagacaacgcggccaaccagcagggtttcgggccgttgctgcctggctttctgcgtgctccctacggtgatatcagcgcggtacgccaggcggcagaacaatccccggacatcgtggcggtgttgatcgaatctgtacagggcgagggcggcattcgggtggccagtgccgaatacttgcgcgaactgcgcgctttatgcgaccagagggactggttgctgatgctcgacgagatccaggccggcatggggcgcaccggcgcgtggttcggatacgcgcacgcgggcatctcaccggatgtggtgaccctggcgaaagcgctgggcaatggctttcccatcggcgcgtgcctggcgcgcggtattgcggcagacctgttctcgccgggccagcacggctcgaccttcggcggcaatccgctggcttgccgggtggcctgcaccgtcctcgacatcatggcccgtgacaggatgcccgagcgcgccatggtgctgggcgctcgcttgctggtgggcctgcgcaaggcgctggcaggtcacccgcacgtcctcgccattcgcggcctgggactgatggtgggtatcgaactggaccggccctgcaaggaactagttgggcgcgcgctggctgagcagcgcctgctcatcaccgtgacccgagacaccgtgatcaggctattgccaccattcgtttgcgacgagcgtcagattgacgacatcgtggtgcgtgtagcgcgcctgctttcatcggacctggttgattgcgaggtttggtctgttccggctcagccgatggacatcaccgtatga

SEQ ID NO: 342174 - DNA, 1143 bp, Pseudomonas aeruginosa
atggccatccagaattcggtgttcaccaacaagtacgccgagggttacccaggcaagcgctactacagcggctgcgagcatgtggacgtggccgaacgcttagccatcgagcggctcaaggtgctattcgactgtgattgggccaacgtccagccccatgccggcgcccaggccaacgcagccgtgtttctggcgctggccaaccccggcgataccgtgatgggcatgaacttggctcagggtggccacctgacccacggtaacccatccaacttctccggccgccattacaagatcgtgccttatggactcgaccccctaaccgggctgattgactacgacgagatggagcgcatcgcgatgcaggcacggccgaaactgctgatcggcggcttctccgcctattcgcggcacaaggactgggcacgcatgcgcgccatcgccgacagggcgggtgccatcttctgggtggacatggcccatgtcgccggcctagtggcgacaggcgagtatcctgacccgttgccccacgctcacgtggtcaccagcaccacccataagaccctgcgcggcccgcgtggcggtatcattctctcgaaagggcaggacgagggcctttacagaaagctcgactccgccgtattccccggcgtccagggcgggccgctgatgcatgttatcgccgccaaggcggtggcgttcaaggaggcgctgcaacctgcattcaaggcctaccagcgccaggtggtggcgaacgctcgcgccatggccgccgtgatccagcagcgcggccacaaaatcgtttcgggcggtaccgacaatcacctgatgctgatcgacctgtccgccaggccctacaccggtaaggatgcggacgcggcgctggccgatgcctggatcaccaccaacaagaacagcgtgccgggcgacccgcgttcgccgtttgtgacctctggcgtgcgcatcggcacgcccgccgtgaccacgcgcggcttcggcgtggccgagtgcgaggaactggccggctggttgtgcgacgtgctggatgcattggaaaccggtggtgttggattaattgccgtgcgggatcgagtaagacagcaggtggcggatctgtgccgtcgccatcccgtctatcgatag

SEQ ID NO: 342175 - DNA, 300 bp, Pseudomonas aeruginosa
atgcagaagcgatcggtgcaacgcgggagacctgcgggaacaagaacctatgaaagcgagccagcgcgcgctttcggcgttgccgtgcgcgaggcccggtccgcgcaggggctggcgcaggaggtgctcgcggagcaggcgggcatcgcccggtcgcacatgggcaagatcgagcgcggcgagcacatgcccacgctggtgttgatcctgcggatcgcgaaggggctgggttgctcggccgcggcactgatggctgcgaccgaggcgcaactgtccgaaaaacaggaagacgctgtctag

SEQ ID NO: 342176 - DNA, 624 bp, Pseudomonas aeruginosa
atgatcgcttccgatcctttgaacattgccctgtcggactgcctggcctatccacggttgtcggtaccgatggcagaacatcgtaggcgtcatccggacaacccgattcgtcttcacgaacagcgcctggaggatcagcatcgaggactgctcgcgggggctttcgaggcaggcctctgccaatcgcccgcagcacctgaaggcatcgaagtccgacccgtctggcgcgacgcgctggcattggccgtgtcggctcatcaccccttgctggccttcgcgtcagtgtccctggagcaagcggccgaccacccttggatcgccctggatgggcgcgactgtgtcggctactgtgggcaaatcgactcactgctgacggtggccggcgtcgtcccctcggccgtcacgacggccacatcgttcgggttgatgatgaccttggtggccgccggctacggtgtctgcctggcacccgccgcccgcatcgagggccatcgtgcccttggcgttgtccagcgtcccttgcaagagggagcactgatgctcaccacgtacttcctgagccgtcgagatacggacagcacccgcctggagccgttcttccaagcgctccaggcaagcgcctga

SEQ ID NO: 342177 - DNA, 1926 bp, Pseudomonas aeruginosa
atgctttcagacctcatggcccggcaggccaagtccaccggcaagccatacgcactggccgacttcgacggcctctatctctacgtttccgccatcggcaccaaggcttggcacttccgctattcgtggtttggcaagcgtgagcgcatcaccctaggcaactatccggcgctttccctgaaggacgcccgtgcgcttcgcgatgaagcccgctcgctgctcgccaagggcgtcaatccccacagcgaacgcaagcgcaggcggcacgcgatcgtcctggccggcgagcacaccttcatggccgtctacgagcaatggctggcccatcgccggctctcgctggaggaaggacggcagaccagccttgaacagatcgggcgcgtcttcaagaaagacgtgttcccctcgctgcggcacctgaccatctacgagatcacccgcgcacacctgctggacatcatcggcaaggtggaaaagcgcggctcgctgtcggtggccgagaagctgaggacctggttcacccagttgttcacctacgccacggtggcgattcccaacatgggcgataacccgtccagggacctggaagtggtcgcgctgccattgccgccggtcgaacacaacccgttcctgcgcatgcacgagctgccagtcatgctgcagacactgcgcaagtaccgcgggcgcctgaacacgcagttgggcttgcggctgttgatgctcactggtgtgcgcaccggcgagcttcgcttcgccacgcccgatcagttcgacctcgaccggggcctgtgggtcatcccggtggtcaggctcaagcagcgcgcgctgctgaccaagaagaagcgcaagcgtctcatcgacatcccgccctacatcgtgccgctgtcggtgcaggcgcaggagatcgttcgccacctgttggaccaatgcaagcctgcccaggtccatctcatcccaggcgactggtgcctgaagaacccgatcagcgagaacacgctcaacgccgcgctcaagcgcatgggctacgaggaccagctcacggggcatggcatccgggcgacgatctcgacggcgctgaacgaactcggctacccgaagaaatgggtggatgcccagctatcgcatgccgatccagacaagatcagcgcgacctacaaccatgccgaatacgtcgagcaacgccgcgtcatgatgcaggactgggctgatcgcctggacctgttcgagcagaaccaggtcgaggttgccagccggcatctgaccatcacgctccagggcctgccgaccatcgccggccaggcggccgtgcagccgccggtggtcgacctcaccgcgccgcagctgatcgtgaccgcgccgacgtccaaccaacccgaagcgccggcatcggtgcagcggctgtcggccgtgcgcatgcccgagtacgcgcggccgcgcctgtcggaggtgcagcgcggacgcctgcaggtgctggagaccttcgaggcgccgcacaacctctcggtggcggactacgccaagctcgcgggcaagtcgcgccgctggatcacctacgagatccaggccggcaacctgctgtcgatccacatggggcaccgcgggcagcgagtgccggactggcagctcgatccgctcaagcgcaggctggtccagtctgtcctgaagcaactgccacggggcgtcgacacctgggacatctaccacgcactcctgcgctcgtacgaggctctcgggacacggccggccgtcgaagctgtcaacccaacgaacctgcaccttgccgcgcggctggtggccgcacagtgcatgcaggcgagcgagccagtcgtgacgaccgagttccctgagcaggtccggcaaagcgtgcagcggctggtgcgcgaagccgtagctgccgatgccgccgaagtgacgcccggagactga

SEQ ID NO: 342178 - DNA, 648 bp, Pseudomonas aeruginosa
ttgggcaagagccaacgtcacgggcgtctgccactaaccaatccaagcatagcgacaccatttcggttgcggcttcgccttcactacaaagctgcgcgtgttggcggcgttatgcgcatccatagagagggtactcttattattgaaatcaggaaggcagaaaaagcggacgttcctgcgatactcgaccttgttcgaggaaaagcggaattcgatgggtgtttgaattcgcttcaatctacggaagctgacattgaggaagctttcttctccgaacaacccaaggcgtttgcgctcttggccatgaagtcaggcgaggccgtgggtatcgcgacgtactacagtatctattccacgttcattgccaagcctggcatctggctagacgatctgtttgtctatccgcagttccggggaagcggtgtgggcgaagctctactctcagagctgtgtatcctcgctcagaatactggctgcgggcgtattgactggatcgtggctaccgacaatgatcgaggaaggagcttctacgagcgctcgggcgctcggatattcgaagaggtacggcgtgcccggttagatgaatgtgcgatcaacgcacttgcagagaaagcgcataacaaagcaatgcacccgacaagcgggtga

SEQ ID NO: 342179 - DNA, 480 bp, Pseudomonas aeruginosa
atgatcgagagagttttcagaagtagtcggtttatggtgtgggtggcagtcgttatctgtgcggtgtcatctttgctcttgtatggtgcctcggttaacataatctggaataccgcactggatgtagtacgtgatatacctgtctctgctgacgacggcaagagcctcgcggttcgcctcctgaagctgttggatctcctgctgatcgctattacttttcagatcatggcggttaacctgtatcgtctgttcatccgtccggtgtctgatgatgacagagaatcccaaaaccctctggacattaagagcttccatgatttgaagataacagtaagccaagtggctgttgtgctactggtggttctgttccttgagcaggcggtagagattggcgctacgatcgctacgttatactttggtgctgccatcggtatcattattttggcctcggtattcgcgtggaagaatatgaaagactga

SEQ ID NO: 342180 - DNA, 321 bp, Pseudomonas aeruginosa
atgaacgaccgcgaactactcgaactggcggcgcgggcggcggggtacaaactgagctggtcttatgacaaccactgctgctggataaatgagatgcggcacgacttcgatgtcacttggaacccgctgaaggacgacggcgacgcgctgaggctggctgtgaagctgcgcacctcaatcttcttgacttccaaccacaccgcctgcgaatcagttggcgatgactattggattgacgacggcatagatacagccgcggcgcgccgcgcgatagtccgcgccgcagccgagatcggcaagtctatgggaggtggggagtga

SEQ ID NO: 342181 - DNA, 360 bp, Pseudomonas aeruginosa
atgaccgacatcaacaggctgaaggtgttggcagagcgggctgatgctctgtatggcgcaccgagccttgaacacgtattcgcaataaccaagttccgggaagcagtcgagccgaaagccatcctcggtctgattgccgaggtggagcggctgcgctccaggctggagatagacgaacgcatccctcatgacgggatcgcctgccgggacgaaacgatcaaggggttggacgagaagtgctacaagctcaaggcagaaaacgaggcgctgcgaggggcggtcgagcaactcgccgagatgctgaacagcatccatgtccccatcgatcttaacgaaatcctcaaaggagccaagcaatga

SEQ ID NO: 342182 - DNA, 486 bp, Pseudomonas aeruginosa
atggagcaagcagtgaacaggcgagaggtgacattcctctccgcagtggatgccagcaggatcgagacgccgagtaacgtgatcagcatcggcagcaagggtgattggtacgcctttgcctgcgatcacaagcgcgttctgcggctggagtttgatgatgtagacggatacgtgggaagcgatggctttcgagtgttcagccacattgacgccaagcagatccacgacttcgtgaacgagtgcggcgacgagtcgatcatcgttcactgccaagcaggcatgagccgatccgctgcggtcgccaagttcctggccgacaagcgcggctacacgctgaacctgtcgaagccttgcctcggcactacgcaattctacaaccgccacgtctacggaacgttgaacctcaacgacgccgaaagcatgagcgcctattacgcagagatggagctagccgaccggctgcgcggccatccaaaggagtcctga

SEQ ID NO: 342183 - DNA, 309 bp, Pseudomonas aeruginosa
atggctgaagaactgaaaccgtgtccgttctgcggcgaaactccaggcgaggacagctacgcacatgctgatggcggatacaaatatggggctatttcttgcagttgcggtgtgattggccccgacgtgcggactggctacaagaagtggcctgagtggcgggactctgccgtcgcagcctggaatgaaagagcagtccccgtatgccaagtggcggttccgagggagttgctggagcgcttgtacagcagcgataccgcaacggcgctgatggcagcagtagaactcagagccatcctctacccctaa

SEQ ID NO: 342184 - DNA, 336 bp, Pseudomonas aeruginosa
atgagaaccgtactcaaagccacatgcggcaaacattccaaggaaatcccggttgagcagatcacccacttcgtcgccgaggataagtacgtcatcgcgtactaccgggaaggctttctggttctgagcgatgcgctcaagaccctggaatcagagttctccgccgagttcatccgcgcccaccgtaaggccctggttcgccggtctctgatcagcaggttcaagcgccggccagacgacacccaggccggcgaagtgctgctgctcggaaccgagaactggattccagtcagccgcagccactcggcacagatcaagtcggcgatgggtgcatga

SEQ ID NO: 342185 - DNA, 1065 bp, Pseudomonas aeruginosa
atgtccgcagaaacccaactggtcgaagtgccggccaaagaaaccgccctccaagtctactcgtccgcaaatggccttgacccgttcctggccaagattcgcgaagagatcgacggcttcgtgccagacgtcactacccgcaagggcagagaggccatcgcctccatcgcctacaaggtagcccgctcgaagacggcgctggacaacgtaggcaaggaactggtcgccgagctgaaggaagtaccgaagaaggtcgatgccgagcgtaagcgcatgcgtgatcttctggaccactggcaggcggaggtacgccagccgctaacggagtgggagcagcgcgaggaaatgcgcaaggccaagcaccaggccggcatcgatcagatcaacctgcgtcttgaatgccgcgacctagattcgaccgagttgaaagccaacattgagtggctggaaggtctcttgattggcgaggactgggaagagttcgaaaccgaggccgcccgcaccaaagataaggccctggccgcgctgcgcgaagccctcgttgcacgcgagaagtatgaagccgagcaggccgagctggagcgactgcgcgccgaagctgctgctcgcgagcagaaagagcgcgaggaacgcattgcccgcgaagcagccgaggccgagcgcctggcagcggaacgacgcgcccaggaagaacgcgaagccgccgctcgccgagaaaccgaggcaaaggctgccgccgagcgcagggaactggaactgcgactcgctgccgagaaggcggagcgcgagaagttggaagcacagcagcgcgccgagcaagctgagcgtgatgcacagcggcgcgccgaagaagccgctgccgcagagcgccaacggcaggcagacgagcaagccaggatcgagcgcgaggcagcagcccgagaagccgacaaggcccacaagaaagccataaacaacgaagccctggcggccctgatcgccggcggcatgcccgaggagtgcgccaagcaggcgatcacgctgatcgctcagcgcaaggttcctcacatcacaatcaactactga

SEQ ID NO: 342186 - DNA, 630 bp, Pseudomonas aeruginosa
atgcttgcaacacccaccgctgacagaagcgaaaaggagctggtggtattaaatgcggccacctcgctgtttctgacgcacggattcagtgccactaccacagacatgattcaacgtgaggccggggtgtcgaaggcgaccatgtatgcttgttttcccgataaggaggcgttgtttgcggcagtgatagagcgacagtgcgcttttatgtcttcttcaattcaggccatagaagcgtcgccggaggatgtcgtcaagatgttgaccgatgtaggcaggtcctacatccagacagtgctttcaccggctgggctggcgctttaccgtgtggtgacggcagaggctccccgttttcctgatttgggacgccggttctatctggccggcccaaaggcggtcacctcgctggtggctgctcgcttgaaaaatgcagccgaagctggagaagtcaatgtccaggctattggcgtcgatgccgctgccggcttgttcatcagcatggttcgcggcgaaggccagctcgaagcaatgacgcatcctgattcgcagccttcggtcgcacagatgtatcattgggtgcaggttgccgtgacgacttttctcggggcatttgcggcaaaacagcgataa

SEQ ID NO: 342187 - DNA, 1947 bp, Pseudomonas aeruginosa
atgagccgcaacgacgatgaccgtttccgcctccgtccgggcgcgcccaagcaacgcggcgatgccttcatcaatcaggtgcttcgccagaccagcaaggcgggcgcaaaagtcgccaaggcgggcaaccgccctggtgctcgactggggcgtggccacgttgcggcgcgctttaccggcgcatcactgactacggtttcccggcgagtcaccatcaaaacccgactggtcaatctcgccaaggcgggcgcgcgttcaaccgcgacgcatttacgctatatcgagcgcgaaggcgtggggcgcgacggcgagccgggcaaagcctacgaccccatgaccgacgatgctgatttgtctgcctttgaggaacggggccgggaggatcggcatcaattccgcttcattgtctcgcccgaagatgccgaacagctcgatgacctgcgcacctacacccgtcactttatggaccgcatggaagccgacctgggcacccagttggagtgggtggccgtcgatcactggaataccgacaacccgcatacccacatcgtccttcgtggaaaggatgacaccggtaaagacctcataatttcccgcgattacatcagccagggtatgcgcgaacgggcgtcggaactggcaacagaatggctggggccgcgcactgaactggatatccagcgcagcatggcccgcgaagtcgatcaggaacgatggacggggctggatcgcaccttgcagcgcgaggctgtggagggtttggtgcgtacccaacggctggagagagaaccgcgactgcaacgtcaacgcttgctactggtaggccgcctgcaacgcttgcagcgcatggggctggccagcgagatgcagaccggagtatggactgtccatgcggatgcggaacccacgttgcgggcgatgggtgagcgcggcgacatcatccgtaccatgcagcgggccatgagcggtaagcagcgcgacctgactgtgttccagcccggcgagggtggccgttcgatcattggccgcgtggctggcaagggattggccgacgagctatacgacaagggctatctgatcgtggatggcaccgatggcaaagcgcattatgtcgcgctgccaccgcgcacggaattggagcagtacccgactggcgcagtggtggaaatcaagggctcaagcactccacgcgccgcagataagaccatcacggcaatggccgtcgatggtatctaccgaaccgatcatcatctggccgttgccaaggctcaaccgcatcccgagcgtaatccgggcgaggtggttaaagcccatgtgcgacggctggaagccctgcgccgcgcgggtctggtcgaacggcagaccgaaggcgtctggcaggtgccgcaagacctgcccgagcgaggccgtcagtacgacgcgcagcgcctgggcggcgtggcggtggaattgaaatcgcacttgccgatagagcggcaggcccgcgtaatcggcgcgacctggttggatcaacagttgatcggcggcggtaaggggctgggggatacgggttttggcagcgaggttaaggacgcgctgcaacagcgcggcgacttcctcgccgaacagggactggccgagaagcgcgggcagcgtgtgattttggcgcgcaatctactggcgacgttgcgcaaccgagagctggcacgcaccgcacaggacattgccgctgaaaccgggctggagcatcgaccagtagctgacggccagcgcgtggcaggcacctaccgtcgcaacatcatgctcgccagcggacgctacgccatgctggatgacggaatgggttttagcctggtgccgtggaagccggtcatcgagcagcggctggggcaacagctagctgcgacggtgcgcggtgctggagtgtcgtgggagattgggaggcagcggggttttggaataacctag

SEQ ID NO: 342188 - DNA, 546 bp, Pseudomonas aeruginosa
atgacagccaagtctcgctcacgcccgcgtgttcgcatcgtactggccgtcctgtccgcctgcggcctcgctgcgctggcctgggtgtcctttgtgcagcctaaggcgcacatcatctacaacccatccgacagtgttccggtcggctggtatcgcatcaagcgtgccgactcgccgccacgtcctttgtccgtgggcgacatcgtgctggcccagcttcgggcagacgtggccgcattggctgcgcggcgcggctacctgccatcgcacatcccgctgctcaaacgtgtgggtgcggtcgcaccacaacacgtctgcattgtggacggtcaggtacgcatcgacggcgtgccggtggctgcggtactgcctgctgatcgcatgggccggtcgctgccattctggccgcaatgccgcccgctggccgacggtgaactgttcctgttgagcacaaccaatccggcgtcattcgacagccgctacttcgggccgatccatgcatccgctgtgatcggtaccgcgcagcccatctatctggagaagtaa

SEQ ID NO: 342189 - DNA, 546 bp, Pseudomonas aeruginosa
atgactgcacacccatcaacacaacccgtgaccgatgcggctgcgccgccaccaacatttggcacgttggccggccaggccgacaacgtgccattgacccgcgtttcgctggcttacatcgaccagcgtttcaacctctatctgcgctttggcgaaccagcgcgcacactccagctcgaccgctggcggcgctgcgcggtgttcctgcccgcatccgtgttctgccgtgtgcgttggcaggccaacgactacggcaccacgcgctggcagctcatggtgatgcaggcttgcacaccgctggacgcggtgcagcgcatccccggcgtgcaaccgggcgcgcgcctgctgctgcatgtcgagggcgaaaaaaagatgcgcgccgtgctggcacggctggatgccatcgaggcgctgggcgttgccgccatcgacgtgtcgcccgcctactggcgcacgctgggcaaccgtctggcggcccgcctgccactgccggagtacaccgccgagcgacatgccgcctggctggccgggagggaattgcaatga

SEQ ID NO: 342190 - DNA, 264 bp, Pseudomonas aeruginosa
atgagtagcggcaacgacaaacgcacgggcaaacgcatcggcatcggcgcacgtccgcccgcgaatccgcacgccgaggcgtggattcgccaaggcgataccgccaacctccagaaaggcgatctctacacggcccgcctgaccctcgacgtgacccccgccatgcgggcgcgcatcaaggtttcggccttcacgcaaggcgtgacggtggccgagctgctgcgtggtctgttggagcgcgagttcccggagaacacgccatga

SEQ ID NO: 342191 - DNA, 771 bp, Pseudomonas aeruginosa
atgcccgagccgagcgccaaacattggtatccgaccgctgcgtatctctacgtgctgcatcttgatggtctcgccttggcctgggagtatttacgccgccatcccgattaccggctcgactggctgcgcggtcgtcgccagcgggatgcatcgtatcgctggggtttgcgcctactggaagatcctacgctggatgcacgcgatgtacatccagtctggttttccgatcacgattccgtggtgcaactttacccggatgctgacccaccgccggatgcgtctgccttcgcgttctggcgtgttcctggccgcaagcacctgattcacgacggcaagcgtctggtgttggtgttgcagtggcccggtcactgcgtgcggctcgcattggcaccgggcctggaagacggcatggcctacctgtatgccgtccgtgcctgcgccacgccctgcgcacgttaccgcctgttcgcggccaggctggacgtgctggccgccgccatggctgccgcgccagtggcagtggcccgttcccgacccacaccaggcgcactgctggaactgcacaccttgcaggcgctcgacgccaccctagcgggtgcgtccttgcgtgaggtggcccaagggctgtttggcgtggatgccgtcgtggccgactggcacgccgacagcgccttgcgtgcccgtgtgcggcgtctggtgcgccggggcgatgcgctgatgcgtggcggctatcgccgcctggcacaacttgcgccgcttccgctggattaa

SEQ ID NO: 342192 - DNA, 351 bp, Pseudomonas aeruginosa
atgaccaacgtactcgttaccgacaaggaacgcgcatgcctgcttgaccacggccaggctcgcgtcgacagccaggccatcgacccgctgccggtagttcgtttgttcaccccggacgcacatgccacctggctattggcatcgctcgatcccgccgacggcgatacggcctacggcctcatcgacttggggctgggcatgcccgagctgggctatgtgaagttgtccgatctggcatccatcgtcggcccgctcaagcagccagtgatgcgcgatgtatatttccaggccacacgaacactgtcagactatgtgcggctggcgcaggccaacggttccatcgttgattaa

SEQ ID NO: 342193 - DNA, 291 bp, Pseudomonas aeruginosa
atgcaaaagcgacccatccagcgcggccgacctatcggcgccaccaccttcgatgccgagttggcccaagccttcggcgcggcggtgcgtgcgctacgcatggagcgcggcaccgcccaggagacgctggcgaacctggccagcatcgagcgttcccacatgggaaaggtcgagcgtggcgagcacatgccgacgctggcgatcatcttcaagatagccaaggcgcttgaatgcagtaccgccgtattgatgaccgagacggaaagccgcattcaggcggcggagctgtag

SEQ ID NO: 342194 - DNA, 948 bp, Pseudomonas aeruginosa
atggccaccactcacgatcatttcttcctcggtagcgatcaccagcgcaatgagcgcaaggtgtggctggtcattgccctcactgccagcatgatgctggtggaaatcatagcgggcaccctctatggctcaatggccttggtggccgacggctggcatatgtccacgcatgcgggtgctatgttgattaccgtgctggcctatcgttttgcgcgcaggcatgtaggtaatccgcgtttttctttcggtacggggaaactcggtgatttagccggttttgccagtgctgtgctgttagctttgatcgctttgctgattggttgggaaagcttgatgcggttcagccaaccaattcatatcgatttcaatcaagcgattgccgtggcagtggtgggactgatcgttaatctggtttgtgcctggttgctgaaagatgatcatacccatcatgggcatcaccaccatcacgaccatgctcatcaccacagccacgagccccctcatgggccgggcaacgggcgcgacaacaacctgcgcgctgcatacttgcatgtgttggccgacgcccttacttccgtactggccatcgttgcgctgctggttggccgcaattatggctggtggtgggccgatccgggcatgggggtggtgggcgcactggtgattgcccgttggtcatgggggctgatccgcgattccggcagcgtgttgcttgatgccactgtcgaaagtgggcaagtgcagcaggaaattcgggaagcggtggagccaacaggaagccagatcacagatctacatgtctggcaggtcggtcctggccattttgccgccattgtctcattgacagcctgtgaaccacgggagcctgcacactacaagacagtgctcgcgcatatccatgagttgtcgcacgtcacggtcgaagtacagcgcgaagtgacggcgtga

SEQ ID NO: 342195 - DNA, 273 bp, Pseudomonas aeruginosa
atgtcccatacccctcgccagaagggcaagttgatcgcccgtatccgccgcatcaaggggcaattggaaggcatcgaacgtgctttggaggccgaagccgcgtgtgtcgaggtgttgcgccaggttgcatccgtgcgtggcgcggtcagcgggttaacggccgaggtgatggaagaccatctgcgcgagcacgtcctggctgctcagaccgacaaagagcggcaccaaggcggtgaggacatgatcgaggtcatccgggcctacttgaaatga

SEQ ID NO: 342196 - DNA, 2043 bp, Pseudomonas aeruginosa
atgaacgcgatcaatcaaaccgaaacccaagccatcgacaccgcgaacgccgcaaccgacaccccggcgcaaaacctgatttctgtgccgctgtcgcagcttcgcgcctcaaaacgcaacgtacgcaagaccaagaccgcaggccagtctattgacgcgctggcggccagcattgcccgtgtggggctgctgcaaaacctgactgtgacgctgacccgagacggtgagcattacgacgtcgtggctggtggccgccggctggcggcattaaagctgctggcaaagacccgccgcatcccgaaagattgggcggtgccgtgcctgttggtgctcgatgccagcgcccgtaccgtgagcctaaccgagaatgtacagcgcgaagccatgcacccggcagaccagtttgaagcattcgccgcgctggtggccgaaggccgatccattgaggatattgcggctgatttttccgtcagcccgttggtggtacagcgccgtttgaagctggcgaacgtctcgccgcgcctgctggccgattatcgcgccgatgccgtgaaccttgaacaattgatggcgcttgccatcactgacgaccatacggcgcaggacgcggcctattacgatgcgccgcagtggcagcgcagcccccacgccttgcgcgaacggctgaccgagcgggaaattgacgcaggccatgcgctggtgcgtttcgtcgggctggacgcctacgaagccgcaggcggtggtgttcgccgtgatctgttcgcgcaggacgataccggcgtctatgtgaccgatgccgcgctactggaaacactggtgcgcgagaaactggacagccacgccgcgaaggtgaaggccgaaggctgggcatgggtggatgccacacccgccgccacctatgccgacctgcaagccttccagcgcgccccacgagaacggcgcaaccccaccaagcgggaaagcgaccgcatggaaaagctggaaatcaagatgcaggctatcggtgaagcattggatgcggcactggacgaggaagacgaggacaaggccgacgccgtgcaggaggaaggcgaccgcgtgggcgagcagttgcagacgctggaagaacgcttgctgggctacagcccgaacgtgaaaaccgccgccggtgccattgtcacgcttgaccggcaaggtcagattgtcgtgcatcgcggcctgatgcgtgaagccgaagccaaggcattacgcactctggaaaggctgcggcagggttttggcgacgtgggcggcgaagctggaaactacgatgaaggcgacgacaacgagcaacccaagaccgccgccatgactgaccggctggcgcaacgcttgagcgcccaccgcaccgccgcgctgcaaatcgaactggcgcggcacccgcaagcggcactggctgccgtggtgcatggcatggtgcaggccgtcttgcagcgtgatcgttaccatcgtgacagcttgccgctgggcgtgagcctgaccatgcaagaccgactggaaagcctggctcccgattggccggagtcacccgccgccgtggcgctgcgcgagttgcagcaggcatgcagcgagacactgcccgaggatggcgcgggattgttcgtcaccttgctggcaaagtcgcaggatgaactggtgcgcctgctggcggtatgcacggcggcaaccgtggatgtggtcacgccccgcgctacgtcgcagcaacccggcgcggaactggcgcaggccgtggggttggatatgtcggcatggtggcagccgaccgccgaaggctatttcaagcacgtttccaaagccgtgattctggacgccgtgggcgcgttcgcgcctgaccatgttacccggttggcgaagctgaaaaaggccgacattgccagcgaagcagaacggttggtggagggtacgggctggatgcccgccatctttcgggctgaaactccgcaggaggtgacgacaggcgaagacggtgtgataacaggagacgccaccatgtccgacgaaccggctgattcactggctgcgtaa

SEQ ID NO: 342197 - DNA, 825 bp, Pseudomonas aeruginosa
atgcttgcatcccgttttgcttcccgttccccagtgctgcgcagcgattacccgctatccgatgaccagatcagagccgtggtgccgtcgatctatgccgaggcaccccaccagagccgttcagaacgctacagctacattcccacggcggcggtactgaccgagctacgaaaggaagggtttcagcccttcatggtgacgcagacccgaacgcgcaacgaagaccggcgcgaccacaccaaacacatgattcgtctacgccatgccaatcaggtcaatgacagcattgccaacgaaatcattctgttgaactcgcacgatggcaccagcagttaccagatgctggcgggcgcgttcagattcgtttgtgcaaatggtctggtatgcggcgacaccctggccgatgtgcgtattccgcataaaggcgatgtgaccggccacgtcatcgaaggcgcttatgaggtgttgagcggctttgaacgggcgcaggaatcccgcgaagccatgcaggccatcacgctggacgaaggcgaagcggaaattctcgctcgcgccgcgctggccttgaagtatgacgaccccgacaagcccgcgcccatcaccgaaagccagattctgatgccgcgccggtatgacgaccgccgccccgatctgtggatgaccttcaaccgtctgcaagaaaacctcaccaagggcggcttgcgtggccgcagcgccaacggtcgccgccaaagcacccgagcggtgcaaggcattgattccgatattcgcctgaaccgttccctgtggctgctggccgagggtatgcgccagttgaaagcctga

SEQ ID NO: 342198 - DNA, 1050 bp, Pseudomonas aeruginosa
atggaattggctttctttacagatgatgagatcggctcacttcatatcaccaatatgatccttcacgtggtgggtgatggtattttctcgcctgaaccggcgcgcgcagtcgaacacgaggagttttttattgctcgaattcgtgatacggacgtgtctccagtctacagctttgacgaaaactcaaataccaagtcgcagatcgagcgaattgcaactgatgccgtgagcttcgaagaaggagctcaggaattatcgcgtgagttttcgcgtttgcatgtgggtagtagccgtgatggggcatttttcatctttgagctttccacgcacgatccagaaacaaaaatatatagcctcgttaagtacgattatcgagaggccattgaacaagcaggagtagatgaaggcggcctactgcggcgaattgtcacggcgttcattgcggataaaaaagccattcagaagtcaaccgttatacgtgtgactagtggtgttgcagagttaccgatctctgctcgagatcgaatgaagtcttcaccggaaattggtgactacttcgctacttttctggatgtatctaggacgctcagcgatgaggatttgaacaagaaaaccattgaggtcttgcgtacgacgctgactgcttgcaaggaactgcttcccgagcaagacgtcgcacgtgcgtttcggcgcgctcagggaattctacgtgatcgtcaagagatcaatgaagcagcaattacggacgcgatactggcagccgctggaaatcctgaggatgaagaggcaagaagcacgattcagtcaacgactcgacgtaggattcgtgcagccaagctggaaggactagagttcaaacctgacaaacaagtactgcgacgaccgccacttcgtaaggttcgcacgacggaaggtgtcacgttaacttatccggatgacgcagaaggtattaccgttcggcgtgagcgactacctgctggtgcagagcggtttaccattgaaaccgcctgcgtaacggaggacaaaattgttcgtgatactgctcgctga

SEQ ID NO: 342199 - DNA, 1551 bp, Pseudomonas aeruginosa
ttgttcgtgatactgctcgctgaactgcttgatcggctaagtgtcgatggagccttcgtaagagagtctgaaaatgacgtctccgcctcgggcttggcggtcggggcggcaaccaatgttatcgcaatatgcaaagagctgggttgggaatttaatctgtttgacagcgctggaactgagtggccagatggcgatctgcttcaggatttcgcaccatatcggttacggctccgcaagccatcaactatcggcgatacgctggagttattaaccaatactggttttgcggaatggttaagagttggtcattccgctacaaactggaaagtcgcaaggttgcgacagccgatattcactcatgcgagaatgcttcaaccctggggagaagcagaaccgttccaaccttcacctcctaccaagagccctcgttctttggttcgcgagtttggcccagaacgagcagcaccagaggacgttcaaccgtggctcctccgagacgaggccaacgtcttaattaacgatgaagctaccaaggtttgggtgaacgcatcggtatgcgctctcctcaactcgttagctgacgagatcgacccagcggatagcaagttgaagttcaagggccccccaaagctctcgatcagcttgcccgatgagcgcgataacctagccgatcaaataggtattgatcactttaatgatctccagcgtgccgctaactgggtttttgaaaacgagcgagaggctgagttacgacacaatttgctggcaaatgatattgcacgatccgctggtgggaatagtgctgatttccagtatctgtttagtaatatttcagcttcgttagatggggcgaaggttgcttatcaagtatctctctctgatttggggcgcgacactctcaagatgctagctgatttacgaaaagccgtcacggaagaaaccgcaaaggttaccgatgccactaggcaattggtaacttcagtcgcgggcgcattagcgattagcctcggtcttattgccgttcgcgtcaacgcagccgcaagttatgagttgattgtggccgttatgatcgtcgtggctgcttacgtgggagtaattatctattccggttatggttttatacagcttcagcgtcagttgcgaagcgattggcaaccacgcttgtatcggttcttgcctctttccgaatacgaaagtatggtcagcaagcccgccaatcaatctgagcgcacttttttcagagtggcgtggggcggcggtatcgggattgcagcactaacagctattgtgatttttggttggtgggataattcaacaaagaacaaagttattgattcatcaactacgacacaaagctcggaggcttcacaaggggctaaagctattagtcaatctttagccaccaacagtgaggccataattaatattgagtcgaaagtcgttcccgatgagtcagttggctccacaagtgtcgaaatagctgaactggacgcgcagccaaaagatactacgacgtcaaagaagggcgagtccaatgagtatcacccttga

SEQ ID NO: 342200 - DNA, 510 bp, Pseudomonas aeruginosa
atgtcgcaactatccttttcctcgttcgattcctctctgttggtgcgtgacgcacagggccgttacctgccagcatcagtagaccagattcttgatgcagcccgtcaggccattgaccagaaaatgcagcgcggtactgcttttacatcaccagcattggtcaaggaatacctggtcaccaagctgtctggcttagaacatgaagtctttgccattctgttcctggacacgcagcatcggctgatcgagtaccgcgagatgttccggggcaccatcgacagtgcatcggtgtatccgcgtgaagtcgtcaaggaggcactactgctcaatgcggcggcggtcatcctctcgcacaatcatccgagtgggcatcctgaaccgagcagtgcggataaggtactaacccagaggctcaaggaagcattggcgctggtgagcgtgcgtaccctggatcacctcatcgttggaggccaggaaacggtatcgtttgccgagcgtggcttgctgtga

SEQ ID NO: 342201 - DNA, 1200 bp, Pseudomonas aeruginosa
atggctaagatcaagctcaccaagtccgcagtcgatgcggcgcaatcccaggcgcagcccatcgaactgcgcgacacccttgtccccggcttcctgtgcaagattaccccgacaggtcgcaaggtgttcatgctccagtaccgaaccaatgcgggcgaacgccgcaagcccgctttgggtttgtacggagagttgaccgtcgaacaggcccggtcgttggcacagaactggctgtccgaggttcgccggggtggtgatcctggtgcagccaaagcccaggcgcgcaacgcacccacggtcaaggaactgtgcacgaagttcatggaagactattccaaacaacgcaacaagccgagcacccaggaaggctatcagagcgtcatcgaccgcaacatcatcccgctgcttggtcgtataaaagtacaggatgtgaagcgaccggacgtggcttcgatgatgaagaaaatggcccacaagccggcggatgccaaccgcacgttcagcgtgatgcgcaagatgttcaatttggccgaggtgtggggctatcgcccggatggcaccaacccctgccgacatgtccccatgttccccgccggtaaggcaacccacctcatcagcgatgaggaaatgggcaagctgtttcactatcttgaccacctggaagccgagggactggagcatccggtcatcccgctggcgattcgtttgcagtttgagtttgccgctcgtcgctccgagatagtgttgcttgagtggagttgggttgatctggagaaccggcgcgtggtctggccggacagcaagacaggcggcatgtctaaaccgataagcgaggaggcttatcggctgctatcgaacgctccccggtatgaaggctcacgctacgtgctgccttcgcctcgccgcccgatgaagcatctgacgacgggtgagtattacaacggctggagccgcaccctgaaagctgctggtgtaacgcacgttggcacgcatggcattcgccaccgctccgctactgatattgccaactcgggcattccggtgaaagtgggcatgatgctcacggcacacaaaaccgtggcgatgttcatgcgctatgtccacaccgaggatgctccagtccgggaggccgctgaactggtggcaaaccggcgcaagacgatcattggcgcacggcctgctgtggaggagacggtatga

SEQ ID NO: 342202 - DNA, 903 bp, Pseudomonas aeruginosa
atgagcaatgcagcacaagccctcgccacgccggtacggctcgacatccggccggtcgccggacggatcggcgcggagattcgcggcgtgaccctgtccggcgaactggacgccgccaccgtcgaggcgatccaggccgccctggtacgccacaaggtgatcttcttccgggaccagagccatctcgacgaccagacccaggaggccttcgcccacttgctcggcgaaccggtcgcccaccccaccgtgccgtcccgcgaaggcacccgcttcctcctcgagctggatggcgccgaaggccgccgggccaactcctggcataccgacgtgaccttcgtcgaggcctacccgaaggcctcgatcctgcgcagcgtggtggccccggagtccggcggcgacaccgtctgggccaacacggcgagcgcctacgccgacctgccggcggagctgcgcgagctggccgaccggctctgggcggtgcacagcaacgagtacgactacgccggggtcaagcccagcgcctcggtggagcagttggagaactaccgcaaggtgttcacctcgaccgtctacgagaccgagcacccggtggtccgcgtgcatccgcaaagcggcgagcggacgctgctcctcggccacttcgtgaaacgcctgaagggtctttcgcagcatgactcggcgcacctcttcgcggtgctgcaggggcacgtcacgcgcctggagaacaccgtgcgctggcgctggcaggccggcgacgtggcgatctgggacaaccgcgcgacccagcactacgcgatcgacgactacggcgaccagccgcgcgtggtgcgccgggtgaccctcggcggcgacgtgccggtaggcatcgacgggcaacgcagccggacgatccggaaggcatga

SEQ ID NO: 342203 - DNA, 900 bp, Pseudomonas aeruginosa; identical to SEQ ID NO: 320952

SEQ ID NO: 342204 - DNA, 333 bp, Pseudomonas aeruginosa
atggtctacgacgacaaggagcgccgcatctggtgcagcgattgtgaaacggaggtcgagccgtttgatgccttcatacacctggtacaggtattcgatggcggcctgaaggatttgaacaggcgccgccgagagcttcatgaggcagagcagtttgcaatccgcagccgtgcggccaaggtgatcgacgaagcgtggcgcagcacgaagatggctccgctttgcccacactgcaatgaggcgcttctcccggaagacgttgtaaagggagttgccacggcatccaagcaactgatcatcgctcgccgcaacaagcagaaacgaccgaagtaa

SEQ ID NO: 342205 - DNA, 216 bp, Pseudomonas aeruginosa
atgaacgaccgcacactactcgaactggcggcgcgggcggcgtgtgagcgctggattaccgaccagaaactatgccaaggcagcgatatttcgctgttcaggctggagcgtaatggtgagcttgtgtctctgcacgcccttctgtgcgaggcataccaggctgggcaagtccgcgccgccgccgagatcggcaagtctatgggaggtggggaatga

SEQ ID NO: 342206 - DNA, 432 bp, Pseudomonas aeruginosa
atgagcaagcacacaatcggtgctctgcgcgttttttctggaaaatgctgcctttgcgatgtcggcatcccagttaaagcaaaaagcacctggggcgatccagtcgaaatccacacgggcgacatagtgatcgtctggcacggcgattatcttggcaccgaccttgaaacgtggaccccgaccgatggcttaaccgccgttgtgtcccatgactaccagagcttttcagacgggactgtacagctaagagatacgtctgaagatgccttcgcgatgggaatcaaagactgcggctttcttcatccgcagtggcgggttcaagttgtgaagaaatactcggatgtcatccccggagaacactggacgcagtacggcttctcttacgcattcagcgaagctgcggaccacgccatcgctcaagcaaccgcctaa

SEQ ID NO: 342207 - DNA, 429 bp, Pseudomonas aeruginosa
atgatcacctggccgggcgcggagatgcgcccggcgatcacactttcctggcctgcggtgacccggttcagggtcgacgaggtcacgccgggctggttgaagcgcaccgcctcgtcggcggagacgtcgaagcccttccagttgatgatcgcgcgctgggtgctctggtcgatcagcgtggtcttgccctgctggctgatcttgatctcgttggggttgaactgggcaccggtaggtgccgccatggccgcgttgatgctggcgatggcgaacatgagggtgctgctggcggcaaggacgaaacgcccttccctaccagctttcgaagaggtgcgcttgccgcgctggctatccggacggaccatgaaaatctccctatctgcgtggcgcacgtcagttttccagcactgcatttcgtcagttaaatga

SEQ ID NO: 342208 - DNA, 630 bp, Pseudomonas aeruginosa
atgcctatcaccgagcagcagttgctgcagatcctcccgaacgccggccctcgagccggcgtttttgttggtgcgctgaaccgcgggatgacgcggttcggtatcacgtcgccggtgcgcgcggcggcattcctcgcccaagttggccacgaaagcggccagttgacccgcctggtggagaacctcaactacagcgcgcgcggcttggcggcgacctggccgagccggtacctcggcgccgacggccagcccaacgccctggcgcagcgcctggcgcgcaacccccgagccgtcgccaacaacgcctacgcctcgcgcaacggcaatggcgacgaggcgtccggcgatggctggtgctaccgcgggcgcgggctgctgcagatcaccggccgggcgaactaccgcgccgccggcgccgggctgggccagccgttggagcaggaacccgagcttctcgagcaaccggagtgggcggcgatctcggcggcctggtggtgggccagtcacggcttgaacgacctggccgaccgcggcgagttcgccgccatcactcggcgcatcaacggtggtctcaacggccaggcggagcgcctggcgttgtgggagcgcgcaaaggcggtgctgtcgtga

SEQ ID NO: 342209 - DNA, 1278 bp, Pseudomonas aeruginosa
atgcccatgcaggtcaacatcaccacccaggtcaacagcgccagcattcggcgtgagacacacaacgggcgcgaacatctggttctgccgagctacaccctgccggccggcgtaatcatgaacggtggtctctacaccgccgagcagatcgacaagcactacccaggcctggagggaacgctggcgccgctcaggcacccgatggtcgacgggaagttcgtgtctgcgttctcgcctgaggggatcaacgtcggccatatcggcgcctggaaccgcaacgtgaagaagtccggcaaccgggtctacatggagaagtgggtcgacgtcgagtttgccaagtccacggagggcggtcgtgaactgttgcagcgcgtcgaggcgctggagaagggggaggacgttcccccgatccataccagcgttgcagcattcctcaaccgcatcgagccgaacgaaagccagcgcgcccagggcgcggagtgggtcgccgacatccagagcatggaccacgacgcgatcctgctgcacgaagtaggggcggccactcctgagcagggcgtcggcctcatggtgaacgcggaccaggctgtgccgcttcagccgaactccggcgccttggttggcgagtcctaccgggagcgtgagcagcgcctggaccgagccgcaaaggagcgattcgcctccgggcccgatcagtacgcatgggttgccgatttcactgattcccaggccgtgatcagcctcaacggcggtgtgaccgaggtgtacggctacaaggtcgaggcagggaagatcgtcttcgacgagtccggccagcccgttgtccggcaagagtcctgggtcgccatggtggccaacagcatcaagaacattttcacccatcgtcaggctcggcctgatcaacctgagaaggagggcgacatgcccctgacccccgaagaaaaggccgaaatcgtgaaggaaatcggcaccaacacctccaacgccatcaaggaactggcggacaccatcatcaagcccctggccgacaaggtcgacggcctggtcgccaaccacaaggccctggccgacacgctgaccgccaaccagcgcgccgaggaagacagcatgcgtgaagcggtcaaggccaagttcggcgaggtcatcgccaacagcctggccggcgacgcgctcaaggaaatgttcaagcagtgcggcgagtccgccccgctgggcgccaatgccgccaccgacaaaggcggtctcaccgccgatatcaacaacctgccgaaggagtaa

SEQ ID NO: 342210 - DNA, 480 bp, Pseudomonas aeruginosa
atggcaaccctgaacagcgacgtgaaggcgttcatcgttcaggcgctggcctgtttcgatacgccatcccaggttgcggaatcggtcaagaaggaattcggcatcgaggtcagtcggcagcagatcgagtcgcacgacccgaacaaggtgtgcagcaagggccttgccgcgaagtggcggatcctcttcgaggacacccgcaagcgcttccgcgaggagatcgccgacatcccgatcgccaaccgcgcctaccgactgagggcattgggtcggatggctgagcgcgccgagggcatgcgaaacatggccctggctgcccagctttacgagcaggccgccaaggagtctggtggcgtctatacgaacaagcaccagcacgaagtctctggtccgaatggcgcgccggtggcagtcgccgccttgaccagggaggactacaagcaggctcgccgagagatgctcgcggaagatgattgctga

SEQ ID NO: 342211 - DNA, 612 bp, Pseudomonas aeruginosa
atgccgccacccgcattgcttgagctgaccgagctatcgatgctcggtaccaggcttcagccagcgcccgaggtgggcgaatgggtgcaggctgcgatcctcggcgagggtggcgagctgcacaaccctgaccatgctcatctgatcgacgcaccgctacgtttcctgtgggcgtccgcatgcttcgagaagcaaggtagaaccgtggtaggccaggccgaggcggtgatattccgcgcaggtggttggcagaaggcccggcaagagcaacagatgatcgattggttcggcgaagtaccgggcttcgtcatcaccctggctgccgactactgctcccagtgctccgacctggagttctgtgctttggtcgagcatgagctctaccacatctgccaagagcacaaccaatatggcgagcccaagttcaccgaggagggctttccaaagctgaagctccgcgggcatgacgtcgaggagttcgtcggcgtggtgaggcggtacggcccaagcaaggacgtgcagtatctcatcgacgctgctagcaggcctccagaggtggccaaaattaacatttcgagagcctgcggtacgtgcctgctgaagtcggcatag

SEQ ID NO: 342212 - DNA, 357 bp, Pseudomonas aeruginosa
atgagctattgccgttggagttccgacgatttccagtgcgatgtttacgtctacgaaagcgtagccggtggctttgtgactcaagtggctgccaatagggtggttttcaaggagaaccttcctgccccggtccctttcgagcctgaatacgtgaaggaatacctggagcgtcaccataaggtgatggcgatggttggtgcggctgaccgtgtgcagattggtctcccgcatgacggcgacagcttcgatgatgccgatcaagaggcctgcgcagaccggcttgagtatctgaaagggcttggctatcgcgttccgcagtacgccattgacgcactgcgcgaagaggtagaggcatga

SEQ ID NO: 342213 - DNA, 207 bp, Pseudomonas aeruginosa
atggctcaattcaatgtcgatgcgcacctgagcaacggcaaacgcctggattggattgctctgccggaatgcaacgagacaccggatgacgtgctgatcaaggtacgccaggccgcaatgaagaagttcggcgacctcatctggttcaaccactgggaccacgttgttgccagcaacggctacatcaccgtgaggatgcacgcgtga

SEQ ID NO: 342214 - DNA, 210 bp, Pseudomonas aeruginosa
gtgatatcccagttcttcaagccgatgcagggctgccgcatcttcgccagtgagcagcacatgaccaagccagccggcgagcttatcggttggtgcgagaaagtcgacgggaatatctgcattttcaagccgccatgttcgcatgagcttgaccgattcatctggaggcacaaggacggtttaaacccttggtatctctactcagcataa

SEQ ID NO: 342215 - DNA, 216 bp, Pseudomonas aeruginosa
atgagcaagctcattggctggagggcggagaactacctgtgggtgccgatatttgaaggagatcctaatacgaagcttcaaggcgtcgggcctgagtggatgcaatcggctgacgcgttcattgaacggctcaactctgccggctggcgtgctcatgcagattcacagcatgacggcgctagagccatgttcaacgaactcaaggccaccgcctaa

SEQ ID NO: 342216 - DNA, 1524 bp, Pseudomonas aeruginosa
atggctatcggtctgctgggtatttttctggctgcggtcgttgccggtcttaacggcaggattcccagtctggtactgcccgatctgcggggcgccctcgggatcggcatagacgaggcgtcttggctgctcacggcgtattccgctggtgaactggccgccatgccttttgccacctggtttgccatcaccttctcaatgcgccgtttccatctggccatgctgttcagcacattgctgctgacatggctcatgccctatgtacaagacctgcctctattgctgaccttgcgtgtttttcagggcttgctcgggggcgcgatgatccccttgctgatggtcgcttgtctgcgtttcttaccgttacccatacggctgcatggcttggccgtctttgcgctggtcgccaccttttcgcccaatatcgccttgtggatcgcctctcaatgggttgaccagctggaagactggcgctgggtttactggcatgtgatccccatcggtctactggcggccatgctggtcggctggggcatcccgaagatgccactggcgctgccgcgtatgaaacaagccaattggttcggcatgctcctgggcgtaccaggtctgatgctactggtggtcggcgtggatcaaggtgtacggctggactggttccattcgccactgatcgttgcttcgttcgtagccggtggcgcactgtttgtcttgtttctgatcggggagtggttccatccggcgccctttgtcagcctgaggatgttggcgcgccgcaatatctggatcggcttcatcctcttcgggtttctgttgatgacgatggctaccgccgtcacgctgccagccaatctgctggcgaattttcaggggttccgcctggcacagagcgcacccctgggtctgatcgtcggctttccacaactgctgctcggctcatgcgtggcgctgttgctataccagcgctgggccgatgcccgctatgtattcgtagcgggtttgctgtgcatggcggcggccaattggctggcatccggtattaccagcgaatggatggtgcagcagtttttatgggtgcaagtgctgcacatgctcgggcagcccctaaccatggtttcgctgttgttcctgatcaccagtgtggtgcagcccatggaggcgccgctcgtgccgggcctgttcaatatcgtgcgcgtcttcagcgccacgataggcggcgccatcatcgggcaactcacggccgtacgcagtcgcttccactcggaaatgctactcgataacgccgggcaactgatggcccgcctgccgtcggatgatccgggctgggttgcactaagcagtacagtcgcgcagcaagccaatgtcctggcggcagcggacatctatcgcgtcttcgccgtggtagcgctgctcatgattcccctagccctgatgatgcagcgtatcccagcgcccgcgatgaccagcacaccgcccgtcacgccttctgccacacctgccacagcagcgtctgtggctgcttaa

SEQ ID NO: 342217 - DNA, 1053 bp, Pseudomonas aeruginosa
atgtccaagacgcttcgctttcgtatcatttccggtctggttgccttcctcgccctcgtggcggccttcctgatcctcaaccgctctgaatccagcgccgttacccagagtactgacgacgcctatgtgcaggctgacttcacggtaatcgtggcgcaggtggccggtgtcatcactcgcgtagacgttaacgagaaccaggaagtactggccggtgcgccgctggtaggtattgatgaacgcgacctgcgcattgccgtgagcatggccgaggcgcacatcaacagcgcgcaagccaccattgccagcctgcaagcccagatcgaccgccagcaaagtaccatcgcccaagcacgtgcagcacttgcagcctccaacgccagtctccagctcgccgaagtcaaccgcaaccgctacgcgaatctggcgcgcgatggttctggcaccgtgcaggcccgccagcaagccgacgcgcaatggagcattcaacaggctgcccgtgagcgcgatctcgccggcctcgaatcggccgagcaacagacggcgatcctccaagctgaactggaaaaggcgcgtgctgcgctgctgggagcagaagcagagaaagccactgcagacttaaacctgtcctatgccaacgttgtttcccccattagtggcgtcgtcgcccagcgcaaggccagagtcggcggctatgcccgtgtgggagaaccactgttgacgcttgtgccgctggaagcagtctatgtgcaagccaactaccgcgaaacacaactggcccgtgtacaggttggtcacccggtaagcatcacggtcgatgccttgcccggtgtgcagcttaaaggacgcgtcgaaagcctcgggccggccagcggcgtcagcttctcccccgtaccgccacacaatgccaccggcaacttcaccaaaattgtgcagcgccttccggtgcgtatttacctggaaccggggcaggaagatgcccaccgtttgcgtgtcggcatgtcggtgcgccccagcatcaatgtagaggccaaaccccaaccaaaaacttaa

SEQ ID NO: 342218 - DNA, 372 bp, Pseudomonas aeruginosa
atgggcctcattgattcccgtgacatagccgaatttgctgccaaagttctgaccacgcctggccatgaaggcaagacttatacgataaccgggccagtctccataacgatgcacgaggtagcagaagtgatcggcgggactatcaaaaaggaagtgaaatatgtacccattactttagaagacgcctggaaagcaatggtaaatgaggggatggatgagtggactgtgaacctgctctgtgattatttctcggcctacagtacgaactggggtgacctagttacggatgattttcaacgtgtattaggaaagccaccgcgaacccttgccgacttcgccaatgatttctctaatgccttcgtcaagtcttga

SEQ ID NO: 342219 - DNA, 255 bp, Pseudomonas aeruginosa
atgaacaagatcatgccgtttctgtttgttgttgtgctggcgggctgtggcccatccgaacctgccgccaccgaaacggtggagtcactggcggacgaccccgtgcggctgaaggaattacgccagcagtgcaagttggatcgcgccaagatgggcgacgcactatgcaaccgcgtggccgaggccacacgcaagcggttctatggcgacggcaaggtgccgtacacgccatcggagaacccaccgaaattctga

SEQ ID NO: 342220 - DNA, 273 bp, Pseudomonas aeruginosa
atgagcgcccctgatgagtttgcggttggctttgaagtaccgctgcatcgctcgctgaccgaaccgatcctgctgggcggcgcaccgcgcaccgtggcgattgccaacggcaccttggccgctgccgtcgggctgggcctgcaactgtggattccggggctggtgctgtggatcgtcggccattcgctggcggtctggggcgcacggctcgatccgcaattcatggccgtgttcgcccggcacatcaagcacaaaccgctgctggacgtatga

SEQ ID NO: 342221 - DNA, 2448 bp, Pseudomonas aeruginosa
atgctgaatcttgccgaataccgccagcgtcccgcgctgctggccgactggttgccctgggtcgggctggtcgcaccgggcattgttttgaacaaggatggttcattccaacgcacggcccgttttcgtgggccagacctggacagtgcgacacagagcgaactgattgctacatcggcgcggctgaacaacgcgctgcgccgcttgggttcgggctgggccttgttcgtggaggccgagcgccgcgctgccgccgattatccacacgcggactttcccgagccgttgtcctggctggtggatgaggaacgccgcgccacctttgcggcatccggtagccacttcgagagcggctaccacctgacctgggtgtacctgccgccggaggaatcccgcgcccgcgcggccaagctgctgtacgagaacacgcctaccagcggcgtggactggcgtggccgactggacgcctttgtagcggagacggatcgggtattcgatctgctcgacggggtgatgccggaggttgactggctagacgacagccagacgctgacctatctgcattcgaccatttcgacgcaacgctatcagatcgaagtaccggaagtgccattttacctcgacacgctgctggccgattcggcgctggtcggtggactggcacccatgttgggcgaccagcacttgcgggtggtgtcggtgcggggttttcccacgtccacatggccggggctgctggacgatctgaaccgccttggttttgcctatcgctggtcaacccgttttctgtgcatggacaaggccgaagccgaaaaggaactggggcgcttgcgtcggcagtggtttgccaaacgcaagaacgtcgtggccttgctgcgtgaaaccatcttccagcaggaaagcccgctggtcgataccgatgccgacaacaaggccgccgatgcggacgctgccttgcaggagctgggcagcgatcaagtggcgtttgggtatgtcacggcaacggtaacggtgctcgatgacgatgcggcccgcgccgatgaaaagctgcgcttgatcgagcgcgtcatccagggccggggttttgtcacgattcccgagacattgaatgccgtcgatgcctggttgtcgtcgattccgggcaatgcctacgccaatgtgcgccaacccattatctcgacattgaacctggcccacctgatgccggtatcggcggtgtgggctggccccgagcgcaatgaccatctggatggcccacccctgatcgtgacccgcactgatggcgcgacgccgttccggctggtcacgcacatcggcgacgtgggccataccctggtggcaggcccgaccggtatgggtaagtcggtactgctggcaacgctggccatgcagtttcgtcgttatcccggctcgcgcatctttgcctttgacatgggccgctccatgcgcgccaccatcctcgggctgggcggcgagcattacgacctgggcaatgacggtgagattgccttccagccgctggcccgaatcgaccaggagggctatcgcacctgggccgctgaatgggtcgaaggacgattgctgcacgagggcatggttgttggcccggacgagaaggcgatcatctggtcggcgctgggtagtcttgccggtgcgccggtggaacagcgcacgctcactggcctgtcggtgctgctgcaatcgaacgcgctacgtcaggggctgtcgccctatgtgctgggcggtgcccacggcaagctgcttgatgcggacgcggatcgtttgggttccggttcggtgcagtgttttgagatggaagaactgatgcacagcaaggcggcagtgctggccgtgttgggttatctgtttgcacgctttgatgaacgcttcgatggtgcgcccacgctattgatcctggatgaggcttggttgttccttgatgacccggtgttcgccgcgcgcatccgccagtggctcaagacgctgcgcaagaaaaacgtctcggtgatctttgccacccagagtctggccgacatccagaactccagtattgccccggccatcgtcgagagctgcgccagtcgtattttcctgcccaatccgcaggcgaccgagccgcagattcgcggcatctacgaagggttcggcctcaacagtcgccagatacgcatcgtcgccgaggcggtgcccaagcgcgattactactaccagtcgcggctgggtaatcggctgttcgacctggatttggggccagccacgctggcctttgccggcgcttcctcaccgcaagatcaacgtgatatcgaccatgtattgacaaatacgggcgtacccagcttcgcgggcgcttggctgcgccatcgcggtctggattgggcggctgatttgttgccatccgcgccatctatcgcctccgctctttcccaaccaatggagaacctgccatga

SEQ ID NO: 342222 - DNA, 744 bp, Pseudomonas aeruginosa
atgaagaacagtccccgtttgctttccgtttcacttgccgccgtgctgtcagtgtcgctgttggctggtaagcctgcaacggccttcaccgtgtttgatccatccaattttgtgcagaacacgttgaccgccgtgcgcacgctggaacaaatcaataaccagatcaatcaacttcagaacgaggcgcagatgttgatgaatcaggcgcgcaatctgaccaatctggacttcaacatcgtcaaccgcctgcgttcgacgttggcaaccactgaacggctgattgccgaggcgcaagggctggcctatgacgtgacaacgatggatcgagagtttgcacggctctatcccgatcagtatgccgccacagtcagcggcgaccagatggctcttgatgcccgcgaacgctggaagaacaccctcgacggtctgcataccgcgatgcgtatgcaggcgcaggtgtcgcagaacctggcgcaggacgaaagtgctttgaccgatctggtcagccagagccagtccgcaaccggtgcgctgcaagccatgcaggcgaccaaccaactgctggccttgcaggccaagcagtccatccaggctcagcaactccagatcacacaggatcgtgcggcgtcgttggaactggcgcggcaggcggccgcgaccgagcgtgcccgcgaagtgcggcggcgcttctacggggatggtacgccgtacacgccgcacgccgtgcggttttacggcaactga

SEQ ID NO: 342223 - DNA, 333 bp, Pseudomonas aeruginosa
atgatccgcatcgacgcagcctggctggccaccgccccgctggacatgcgcgccggcaccgacacggccctggcccgggtggtggcggtgttcggtgctgcccatccccaccatgcctatctcttcgccaacaagcgcgccaaccgcatgaaggtgctggtacatgacggcatcggcatctggttggcggctcgccgcctgcaccagggaaaattcgtctggcctgcaccggtcgatgcccattggcagctcgagcgctcccagctcgacgcgctggtgctgggcctgccgtggcagcgcatgggagactccggcatcatcaccatggtctga

SEQ ID NO: 342224 - DNA, 1062 bp, Pseudomonas aeruginosa
atggtggtgcagcaacaatccctgaacgatctcagcgcagagcaactgcgtgagatggtcgccagcctcatgggccacgtgaccgacaaggatgcgcaaatcgcccgccaccaaaccgaactcaagcacagccaagcgctcaacgccaagctcacccacgagaacgcgctgctcaagcgcatgaagttcgccgcccagtccgagcgcttcaatgccgagcagcgcagcctgctcgaagacgagatcgaggccgacctggcggcggtcgctgtcgagatcgagcaactccagccgccagcggcctcccccgaagccaaacaacaacccaaacgccagccactgcccgcccatctgccacgccgcgagatcaggcatgagcctgagtcgaccacctgcgcctgtggctgtgcgatgaagcgcatcggtgaagacgtggccgaaaagctggactatgtgcccggcgtgttcacggtggagcgccacatccgcggcaagtgggcctgcgcgcagtgcgagaccatcacccaggcgccggttgaagcgcatgtgatcgacaagggcatcccgaccacgggcttgctggcccaggtactggtagccaagtacgccgaccatctgccgctataccgccaggaaaccatctttgcacgcgccggtctggccatcccccgctcgaccctggcgcagtgggtaggcacctgcggggtacggctgcagccgctggtcgatgcgctcaaggccgagctactcagccaccgcgtgctgcacgctgacgagacgccggtgcagatgctcaaacccggcaagggaacgacacaccgggcctacctctgggcctacgcgccaggcgccttcgaagacatgaaggccgtggtctacgacttctgcgagtccagagccggcgagcacgcccgcaacttcctgggcgactggaaaggggcgctgacctgcgacgacttcgccggctacaaggccttgatcgccagtggcgtgaccgaggtgggctgcctggcgcacgcccggcgcaaattctttgacctgcatgcggcccataaaagctag

SEQ ID NO: 342225 - DNA, 360 bp, Pseudomonas aeruginosa
atgacattacagcggcagaaactccccgacagctcggcgacggccagggccctggattacagccttcggcgctggattgcactgacgcgcttcatcgatgacgggcagctgcccgtggataacaattggatcgaaaaccagatccggccgattgccattggcagagccaattggttattcgccggcagcctgcgcgcgggccagagggcggcggcggtgatgagtctggtgcagtcggcccgcatgaacgggcacgatccctatgcctacatcaaggacgtgcttacccggctgcccacgcacagagcccgccgggtggaagaattgctgccgcatcgttggcaagctccgaacgtctga

SEQ ID NO: 342226 - DNA, 1005 bp, Pseudomonas aeruginosa
atgcagttttatgaagcgtgttttttaaataagggctataaggatgaagcttcaaaaataaagtcctttgatatgaataataagcatcttaggaatgttatagctgcaaatcagaaaggtatagctagggtggctggtgagaccttacagggacgagttaggaggcttaggcagttccttgtttggttgtttgaacaatttcatgatgtcataaatgtgagtgagatcgtacgcaataagtttactcggttggtctcaaagataaggttggatgaagaaggtattgggagaaataggtctcaaaaggtcggcgatcctgaagagtctgtgattccagatgatgttttcatacggctgttggagatggtgcagccgtcttccccgaataatccatttaaggcatcaaaaattagaaactatttgattttaaatttactggtgcaaagtggagtcagaagaggcgcgttagcaaaattaaaggtttcagatttcaattttttcggaacttgtgaccagatttctatctatagatctgggaatgactcgacagatacgagatctgaaaagccgaatcaaaaaacaaaggcgcatatggcaacggttgaaaaagctctgatggaacatactagattttatattgatcatgttagatctgtatttttacgcgcgcaaactcatgactttttgtttgttagcgagaatgactccaagggcaccgctgggcttcccctttctttaaaagcaataaatgcaatatttcagaaactcagcagagttttaggctttcatgtgcatcctcatattctgcgccataaatggaatgaaataatcgatgaaaaggcggagaaaattggagttgacccttttctacttgaggatatgagaaaatacgctatggggtggtctcaaaatacaactatgacaagcgtttacaatgataaacggctcgccttaaaggtaagaaatttaacaagatctcatcaagataaagtggataagaaataa

SEQ ID NO: 342227 - DNA, 702 bp, Pseudomonas aeruginosa
atgcgtgacgccacgctgcgctacccgaacatcctcttcgatctcgacggcaccctcaccgacccacgcgagggcatcacccgctcggtgcagttcgccctcgcccgcctgggcatcgacgagccggacctggcgcgcctggaacacttcatcggccccccgctgttgcagtgcttcatgcagacctacggcttcgacgaagcgcgcgcctgggaggcggtgaaccactaccgcgagcgcttcagggtcaccggtctctacgagaaccgcgtgttcgacggcattcccgagctgctcgaagccctggtcggacgcggccacacgctctacgtcgcgaccagcaagcccggcgtgttcgcccgcgagatcgcccgccacttcgccttcgaccgtcacttcaaggcgatctacggcagcgagctggacggcacgcgcacgcacaaggacgaactgatccgccatctgctcgacagcgaaggcctggcagcggagcattgcctgatgatcggcgaccgcatgcacgacctgctcggcgccagccgcaacggtgtcgcctgcatcggcgtcggctacggcttcggcagcgaagacgaactgcgcgcgcaccagccgacccattactgcgccgacctcgccgccctgcggcaggtgttggaatcccactgccccatgctccgtttcagacaaggacgcctgacatga

SEQ ID NO: 342228 - DNA, 657 bp, Pseudomonas aeruginosa; identical to SEQ ID NO: 324414

SEQ ID NO: 342229 - DNA, 1518 bp, Pseudomonas aeruginosa
atgaccgggatcgacgaccgcctcgctggcggcgccgcgcaggtaaccgcggaactgccgggccagttgccgggcgcgctgtaccgcgccgcgcgaggcgccagtgcgggcctcgccggcgagcagggcgagacggctgtgcaggtcggcgccgccgccacgctgtatgtcacgttcgccgagcagcgccgctacgtcgcaagccagttcgccaaggccgagggcctggccgcgcagcagcaggtgggcaatgcgcggatgggtcggcaattcggccatcgcctggccatgggcactcaacgcgccgctggcgttcagcgcccccagccgcccgagcagctcgcgggcctgggcgtaggccgccgcgggcggcgcgtcgagccaggccagctcctccggcgccacgccccagcgcgccagttgcagggccagcccggccagatcggcctggaggatttccgccgtgccgtaggcaggcaactgctcatgctggctctccgaccacaagcggtagcatacgcccggctccaggcgccctgcgcggccggcacgctgggtagcggaggcgcgggagatgcgctgggtctccaggcgggtcatgccgctacccggatcgaagcgcggcacccgcgccaggccggcgtcgatcaccacccgtacgccgtcgatggtcaggctggtctcggcgatgttggtcgccagcaccaccttgcgcgtgccccgcgacgccggctcgatggcggcgcgctgggcggcgaggtcgagctcgccatgcagcgggcagagcagcacctcggggcgaccgccaagggcctcgcgcaagccttcgtgaacgcggcggatctcggcctggccgggaagaaagaccagcacgctgccgctttcctccgccagcgcctggagcaccgcctgctgcacccgcggctcgatgaactcgccgggttgcgccgcccgtccccagcggatatccaccgggaacatgcggccctcgctgcgcaccaccggcgcttcgccgagcagcgccgcaagacgctcgccctccagggtcgccgacatcaccagcactttcagcggcggctcgtcgcgcaacagttcgcggccattgagagtcagcgccagggccaggtcggcatccaggctgcgctcgtggaattcgtcgaagatcaccaggccgacaccgtccagcgccgggtcgtcttgcaggcgacgggcaaggataccctcggtgaccacttcgatgcgggtcttcgggccgaccctgctctccaggcggatccggtagccgacggtctcgccgaccttttcgcccagctcggcggccagccgctcggccgcggcccgcgccgccaggcgtcgcggttcgagcatgaggatgcgttggccggcgagccagggctcgtcgagcagggccagcggcacccgggtggtcttgccggcacccggcggggcttccaggacggcctggtgttgtgcgccaagggcctggcgcagggcgggaacaacggcgtcgatgggtag

SEQ ID NO: 342230 - DNA, 621 bp, Pseudomonas aeruginosa; identical to SEQ ID NO: 324742

SEQ ID NO: 342231 - DNA, 2298 bp, Pseudomonas aeruginosa
atgattaatttttacttaagccgtctggagcagctaactcttgagattagaaattttgatctagagcaatttgaagggcagtctggtaaaagagctgaacttgatgatctgatttggtattacattgatccaaatacaggtagacgtactagatatttatgtgggctacatggtcgcaaggggaagggtaatgcagggggacgtcctagtgacgctcttccttatccttactcatacctaattaaagggtggattatagagttagcggctacatcactatctgctggcgaaaaaaaggctcgggtggcgattgctagaaaattcttgtcgcacatggatggtgacttgcatgctcagtcagaagctaccattcgtgctcttaatttgggtgatagttcttcaagtcgtttacgctactttctctcgttttgtcattctaaaggcttaattcgtgcgattaatatcaaaagctctgataaaagagacaggacaggtcatgctcagcttgatagttcattagataaacttccgaatattgaatccttgctggcattgagctctattttttcgaaaatttttgagagtgttagtgatgaaggtgttcctaagcgtattgaaaatataaaaatgcatgatgcgctagttgtaacatttgcgcttctgtctttggcctctcctaatcggatggcagctgaaatacctcttcttactaagcagcggttgaactcttattctgaagttggtggagagtcggtttattatctaaattgggttggtagtaaaggatatcctgacaataaaactcacctgcttgcagtcttggctaggcatgcaaacaaagctataaattttttttataatgcatgcgagcctgcaaggattctatgccgcttttatgaaaagccaagtcgtagtttgagggatttgcttggggatttcaagatatcacctgagctagagtgtaatctgcctctagatctagcgccaaatctttttactttaggctacgctttaggattttataaccgccatgatcgtgtcccagtgctaaaagagggggttgatcttgctgctattaaatcttacaaccggtggaggttcttcgaggataagccgatatgttcgctgttggctgacgatcgtctatccgtgtctcaggttagaagtgctaaattgtctgcgttgccatacttatttgactacgtatacatgcctaaagtttttcacgataaggtcactgttactgtcagggaagtgcaggaatggtggatatcttattataaaaaaacatttttgccagagttccctctttcctactcatccggtgactcatgtattagcctgaaagacgcaatgttctgcttcctaggtagttggctatatggggcgtccaacggcgtgcagagcgggagtaagtcattttatacaacaaagtatgcagtagttcctttagcgtcgctaggctcgtcggttgcgcgtaggttaattggtcggtcgtatgattatttatcaatctttgaagattacggtttttcggcagagctacgtctcacaccgcacagccttcgacatttctcaaatacccttgctgaccaaagtggcattccggtagaaataatcactgcttggtcgggcagaaaaagttctgagcaaactcacacttacattcacacgagtcatgaggacaaggtgagtagggttagtgcaataatgaatccctcagaaactgacattagttcaattcgagttgtttcccaagaggagcttataaaggccacgaatctgcctgcatctatcacatctacggggctatgtactcagaatctaaatgtttccccttgtaattatttaaatgattttgtctcgcaatgctttatgtgttcggaggcatgtcatgtggctggtgatgagaaggcagtagctctatttgaaaaagatttatcttttcaaatggcgaggttgaatgcagttgaatgtgacacgcgcttggccatctcccgagcaatgcagcaatggtatgttattcactcccagaatgtttgcattctgtcttctttgattgaattaatgagggattgccccgtggggacagtcattcgttactctaatagtggttcggagtttttcttgactgacacaagtacaatggaagttaaaagagttgcaagtgctattcctgattatgaagcacacttgaagggtatcattgaagaaaaaaatccgagcgttactcctgaggtaaatcctcaactgcgttctcttttatcgtcttttggcctgtctgaaggagaggtgtga

SEQ ID NO: 342232 - DNA, 2778 bp, Pseudomonas aeruginosa
atgaatgcagtagaaattgagtccgccatttcggacctggcccttgagccctttgacgcggcggagttcccgttcaccttcctggccgcgttcggcaacaaggaaaccgcgctcaagcgcctgcgcgccggcaacaacaacgcctcggacgtacccggaggcgtactgctgcgcagcaacattcatatcgccgcatgcgaggccggcactgtgggcgaaacgctcaaggcgttacgtgctagcccggccaccacaaaagccaaagccaagttcatcctcgctaccgacgggcaaacgctggaagccgaagagctgatcacgggcgaaaccatcgcctgcgactaccctgactttcccaaccacttcggttttctgctgccgctggccggcatctccaccatcaaggagatcaaggacaaccccatcgacgtgcgcgccaccagccgcctgaacaagctgtacgtcgagctgttgaacgagaacccggactgggcaaaagccgagcgccgcgccgacatgaaccactttatggcgcgcctggtgttctgcttttttgccgaagataccgatatcttcgctggcgatggtctatttactaggacggtggagcagtacagcgagcgcgacggcgccaatacccaccagttgctgtcagaaatcttccgcgccatgaacatcaagctggccgagcgcgccaccgctcaaccgcgcctgcccagctgggccaacatcttcccctatgtaaatggtggattgttttcaggcaacaccgaagtgccgcgctttacacgcatggcccgtacttacctgctgcacgccggcaacctcaactggcaaaaaatcaacccagatatcttcggcagcatgatccaggccgtggccgatgatgaagagcgcggcgcactcggcatgcactacaccagcgtgcccaacattctgaaagtgttgaacccgctgtttctggatgacctgcgtgctcaactagactctgcgggcgacaacaaagccaagctgctgaacctgcgcaagcgcatggcgcgcatccgcgtgtttgaccctgcctgcgggtccggcaacttcctggttatcgcctacaaacagatgcgcgagattgaggctgagatcaatcgccgccgaggcgaagctcacaataagtccgaaataccgctgaccaatttccgcggcatcgagctgcgtgacttcccggcagagattgcccgcctggcgctgatcatcgccgagtttcagtgcgatgtacttcatcgagggcagcaggatgccctggcagagtttctaccgttagacgcgcagaactggattgtttgccataacgccttacagctggattggctgagcgtgtgcccaccgaccggcacaggggtaaagcttgtcagtgatgacctgtttggaacacctcttcaacaagcggaaattgcattcgagaacgaaggtggtgaaacctacatctgcggtaatcccccgtacaaaggaagtaagtggcaaaccgacgagcagaaaagggatatggctaatgcctggcagagacacccgaagctcgccaagacgacagactacgtcacaggttggttcgcaaagcttctagactacgttgacagcgagcctaatgccgtcggcgcatttgtggccaccaacagcatttgccaggggcagcaggcaattgatatatggccagtggcctttgaacgtgactgcgaaattcgctttgcgcatacatccttcacatgggccaaccttgctagccacaatgcgggggttaccgtggtgattgttggcttaggcaagaaatctgcagtgccgaaaaagctgtatcaggatgacttgctcaagcaatgctcagccattggcccgtatttggtaccaaacagcttggcctacgtcctgaaagctagcgaacccatcggcgagcaatttcctatgttattcggcaatatgccgcgtgatggggggcatctgcttatggggtctgacttgggctcgcagatgacggcgaacgacacagttcggccttacgtaaaaggttttatgggctctgatgaactcataaacggtaaacagcgatattgcctatggattggtgacgacaaggtcgaatctgcaaagaaaatcgatttcattgcagaacgcctgaagttagttgtcgataaccgcagcatgtctgatgcggaatccacccgtcaatttgctcagaagcctcatcgcttcgtccaaattgcagggtttgctgatagagacgcaatcgtggtggccgctgtttcatccgagttgcgcgagtatctcccggttggttttgtatcggcaaataccattgttagcaacctagctttcgccctttacgacgcaccactatggaatttggcgttaattgcttcacgaatgcactgggtttggataggaaccgtgtgttcaagaatgcgaactgactttaggtactccaataccctcggctggaatacctttccagttccactgctcaccgaacagaacaaggccgatctgacccgttgcgccgaggacatactgctggcccgcgaagcccacttccccgccaccatcgccgacctgtacgccccggacagcatgccggacaacctgcgtcgcgcgcacgagcgcaacgatgaagtgttggaacgcatctatatcggtcgtcggtttagaaacgacaccgaacggctggaaaagctgtttgatctctacaccaaaatgacagcagacaccgcaaaaacctcgccgaaaaagccaagagggaaaaaggcatga

SEQ ID NO: 342233 - DNA, 1008 bp, Pseudomonas aeruginosa
atgaccatcctcgaggggatggctccggtgcttgaggtgtacagcattgatgaagcgttcgccgacctgaccggtatgcctggcagtttggagaggttggggcgggagatgcgtgcacgggtgctgcgctgcactggcatcccggtgggggtgggcattgcccagaccaagaccttggccaagctggccaatcgtgcggcgaagctatggcaacggcagaccggtggggtcgtggacatccgaaagcccgaaaagcgcaacaggctcctgcaggtgatggatgtcagcgaggtctggggcatcggccggcagatgaccgcccacctggccgacatgaacattcgtactgcctgggatcttgcccaggccgacgcctggacactgcgcagcaagttctcggtagtggtggagaagacggcccgtgaactgcgcggcacatcctgcctggcgctcgaggagcaagtaccgccgaagcaagagatctgctgcagccggatgttcggcaagcgtttgcatgaactgccgccgatccgcgaagcggtggcctcctacaccgctcgggcttgtgaaaagctgcgcgcgcagcgctcactgtgcaagaaggtacggatcagcattcgcactggcatgttcaacccggacgagccgaagttcaccaagggcattatctgtgagttgccctatccgaccgacgatacccgacagataaccaaggccgcctccgcggggctggaactgatcttccgggccggctttgcattcagtaaggcggagatcctgttgctcgatctgcgccagcgtggcgagttcaccgatgacctgttcgtcgcgacaccgccgatggctgccgaacgggtgatgggggtgatggatgcgatcaatgcacgatgggggcgtggaacgatgcgacctgcaggggtgccggcgaaaccggactggggcatgcggcgggagatgatgagcccgagctatacgacgcggattgatcagttatggacggtaacgtaa

SEQ ID NO: 342234 - DNA, 333 bp, Pseudomonas aeruginosa
atggtcgagggcaaccaaaagctcagcatctcctcagttgccagggccgcaggagtcacgccgggccttatccataacacctaccctgcggtggcggaacgtattcgcaaccttatgggcaagtcggtgcgcgcccagcgtgactccaagcatcaagcactgatgaaggagaaagaactgaacaaggcgctccgggcggagaacagcctgcttcttgaggagttagccaggctcgcgtcggtgaaccagcgcctcatgattgagctggcccagttggatggcgttgcccaaggtaaggtagttacgctagcaccgaagcctggggctaagtag

SEQ ID NO: 342235 - DNA, 432 bp, Pseudomonas aeruginosa
atgtactgcacaatcctcgggccacttagcagcagctccgcgtgcctgcctttgtattccttccgcgtcccggccgggtttccctcgccggcgcaggatcacatcgaagccgagatatccctcgacgagcttctcgacctccgcgcgccgcatatgtatttggtacgcatcagcggcgacagcatgatcaacgcagggatgttcgatggcgacctggctatcgtgaatcgggcgatggaggggcggcctggcctgattgtcatcgctgcgctcaacggcgatgccttggtgaagcgcttggccaaggaaggcgaacagatcgttctgcgggcggagaaccaggcctacgcgccgcgctacgtactcgagggggatgagctactgatctggggcgtggtcacccacagcgtgcgctgccatgccccaggctga

SEQ ID NO: 342236 - DNA, 702 bp, Pseudomonas aeruginosa
atgtgcggacgatttgcgcagtatcaggggatggcggattacctgcgggagctgaacagcaagcaggaggtgatcagcagctatgacaacctgccgatcgagcgctacaacgtggcaccacataccaccgtgcagctactgcacgcggagggaggcggcctgacgatcgccgcggtgagatgggggtgggcaccgcactgggcgaagaagggaacgatgccagcaccgatcaacgcccgcgccgagacggtggcgagcggcaagttcttcaggcagatatggccgtaccgcgcgctggtcgcagctgacggctggtatgaatgggtgaaggacgagaccgatccgaagcacaagcaaccctacttcatccgcctgcgcagcggcgaggcgatgttcttcgccgccatcggccagctcccagacgccggcagcgagattcgcgaagacgatgggttcgtgatcatcaccgccgacgcccaaggtggcatgttggatatccatgatcgccggccagtggtactaccagcggacttggcccgagagtggatagacccgaacacaacttcgcagcgtgccgagcagatagtgcaggaactgggcctgcagtccgaggcattcgagtggtaccaggtcagcaaagcggtgggcaacgtgaaaaacaccggggcagcgctgattgccacccttgattccaaggagtaa

SEQ ID NO: 342237 - DNA, 585 bp, Pseudomonas aeruginosa
atgtcttttgatgacttcatgacggacaacatcaccgtgcggaaacagagcggtgatgtgcttgaagggctaaaagcaagcgtacagcgcgacaaaattttcctagagcgctccgatgtactcattgaacccagggacctaattgagcggaggatgtccaatggcgctgttgaaacattcgaagtgattgatcccggcttccatgaagcctttcatggcattgatgcgcactaccagatgtcggttcgcaagctcggccttccggaggccaagcagagtgttgagcgcattacctacaacatcactggtcacaacgcccgtatcaataaccactcggtcgaccaatcgacgaataccgtaaacatcggtactgacctacatgagtacatcgacggcttgcgccaagtcattcagagtctgaccgacgctcaacaaaagcagaatgctctggagatcgttgacgcagtcgaggtgcagcttgcctcgccgaaacccagcaagatggtcgtctcaactttgcttcaggcattacctcacgtggcaagcatcgccacgctagcctccgccattatttctgctctctag

SEQ ID NO: 342238 - DNA, 1725 bp, Pseudomonas aeruginosa
atgctaatcgctaaagttgtctttaaaggttttcgaaatttcgcggacgccactgtcaacctcgaacgcaatacattgataattggtgcgaataatgttggtaagactaatttggtatatgctttgcgactgcttttagataagagcctttccgatgctgagattgaaccggtggagtccgacttccatatctcaggctctggtaaaatctcagaagccttgtcaatcacactctatttttctgaggtcacagaggacgctgtacttgcgagcctgaaaggaaatattacagacgactcgcgctttgtacttcaatacaccgctgacaggcgcagtttgacatatcagattaaaattggcgcaacgaaatcttcgctcgtagaaatcccctcaagatattacctgaagcacataaatctaaggtatgtaaaatctcgcagagacctcgagaagtatatcagtactgaaaagaggcaactccttaagctgtctttagagaatcgtagcgagacagaatcaaagtccgaccatcgacagatggctagaattggaaaggctttagaagcaatcaacgaaagaattcgtaatttgcattatgtaaagggcgcgaccgactctgtaaatgaagagctgcaaaagcttgctcacgatttcagtgaatacgaagttaagctcgactcaggcgcaatccaggtacaacagtttattgatagcttgcgtctaggtgcgtctacgtccggcgcgtctgtaatgcttgggggggatggtcgaaacaatcagattctgatggctttgtggaaagctaaaagccaacgtgagcatgatccagatagtgaggtagtattttactgcgtcgaggagcctgaagcgcatttgcaccctcaccaacaaagaaaactggctgattatttaattaatgatcttccaggccaaacatttattactagtcactcaccacagatcacggctcgctacactccttcctcaatagtccatcttaaggttacaggcgggaagactaaggcagcaagcaatggttgtagtaattgcatcagcaaagcatgggatcacttagggtatagaatgagcattttgcccgctgaagctttctttgcgaaatgcgttttgcttgtagaggggccgtctgaaattttattttatagcgagcttgccaagcagctatcaatcgacttggacttttataatatttctattttgtctgtagacggaattcaatttggtgtttacgtaaaaatcttggatgcaatggaaattccatgggtgatgagaacagacaacgatgtctcggacatcactgtgaaaaaagtacaacagcgtcacctagctgggatcaaccgttgccgcgcagcggccgctttaaccgctataccacattatccagtcggcacaaccacgcattcactgctactcgatggtacttgggataggatttcgaaggaaactaatcccaaaggcgcctatctatcccgcgttgatcttgagcatgatctgacggaggagctggaatctgaagtggtcgcttttgcctgtaagaaattaaagaaacggaccctggacgcgccaaatgcgatcaaatatctgcaaggtaaaaaagcaattcgaatgagagagttactggtggagatttcagatagccttcctagcataataagcgggcatttggtaaagccactacttcatgctaagtctttggccgagaactag

SEQ ID NO: 342239 - DNA, 1638 bp, Pseudomonas aeruginosa
atgcctagtaaattcacgtacagtgacgctcaaatagaagctattgcttgcccaggcagcatggttattacagcatgtcccggcagcgggaaaacaacagtaatagtggaaaagatccgccaagaatttaataacctcaaaccacaccagggcatcataggaatatcattcactgtcaagtccagtaaagagcttggcgataaatgcaagagaaacggagctaatgtccgggcaagtttttttggcaccatagataatttttgccttgcggaaatagtatttccgttcattcctagactctacggagcttctagtcaggaaatatcctgcaagcagtacagtcagctgacagatgaacagaagacttacctgcctgacctttcaaaacctgatgtaaacctcaatacaagtgattacgactcttatgaactggagttcatcaagcattatcgagagggttttgttcttttagaggcagtaacaattattgcgtgcaagataatagaaaaatcgaatgcatgcaggcgttatatcacggcgcgatatcgctcagtttatatagatgaatatcaagatacatcagaacctcagcattcgttattttgcgctctacacttgctgggcttgaaagctgtcgctgttggggatacgcaacaatctatatttgctttcagagggagcaaccctcggcacttactgtcactcactcttgatgtgactaatttcgagcaccacataataaatattaatcatcgcagccatccttcgatagtgaattatgctaatcgcttgtacgctccctattgccagttgattcctgtcgccgctgacgatattcacgtctatcacaggactttcaatggcactcaagaggatgtggccggcaaccttaataactggataacaaaaacagcaaatatcctcaaaattgaaaacctgagtgaaatagcgatcttggtgagatggaatggctctatagagcgcttgcaaagaaacctcacaatccctgcgcgcttttacaaagatgactccttgtcaaaaattgctagcccagcgggacgttttttttctgcgcttctctatttttatttcgataaaaatagacttgcggaacaaatactagaggatttcccactcataaaatgtactcctgcaaagttgagagcgctaagaagatccattcacgacttacgtggattgagcatggatagtcttccagaagcatttttaggagttgcgcgatcatttaaacttcctagcagccttgaaattgaacttgccgcgctcaagcagactattatgtcatcagaggaaattttaaactatgaaagcgtgaggtctggagaggttcaagtgatgactcttcataagtcgaaaggacttgagtttgacctggtcgtgcatttagatctctatgactgggttttccctactcgcgaatataccggcaacttcaatgacgaagtttttccagattgggatcaagatttaaacctccattatgtaggaattacaagagcaaaaaaatggtgtgttctaattacaagcactcagagaataaactcagaaaatatcacgaagagtggccgtgcttctcagttcctcaaactgccgggcattactgcgctttttcgatag

SEQ ID NO: 342240 - DNA, 228 bp, Pseudomonas aeruginosa; identical to SEQ ID NO: 324380

SEQ ID NO: 342241 - DNA, 141 bp, Pseudomonas aeruginosa
atggacgacctgaccggccttccacttctggacagtttcacggtcagcctccgtggccggaaccaatccctgggcggtacggataagggcgagttcagccacggcctaccctcccctggaaccaaactttattgggtgtga

SEQ ID NO: 342242 - DNA, 708 bp, Pseudomonas aeruginosa
atgactcgctctgctctctcgaacatcgcctacgaggctctggtgcgtgcccgccgcaaattcagcaaccgagaggagcgctgcatccgcgaaacctggaccgccgaacaggaactggtgctgctgcgcctgtatccggatatgccgaacgaggtcctggcagccaggttgaacaaaacgctccagcagatctgctccaaagcgtatcggctcgggctgaaaaaaagccccgagttctccaagaagatccggcaggactggggcagcgcaactcggttcaagaagggaaacaccccatggaactgcggcatgaaggggcttcccgcgcgaggacgctcatcggaaacgcagttcaagaaggggcagaagccccacacatggctcccggtcggcagcacacgggtaagtgccgatggctacctgcaacgaaagatctcggataccggctatcccccccgggactggaagagcattcacatcctgctctgggaagaacacgtcggccccatcccaaccggccattgcgtctgcttcaaggacaacaacaagcagaacgtcgtcatcgacaacctggaactcatcacccgggccgaacgcatgcgccgcaactccatccatcgctatccacctgagctgaagagcgcaatccgcgtcatcagcaagctcaagcgcaccattcaggaggtcgagcatgaaaaacaagattga

SEQ ID NO: 342243 - DNA, 219 bp, Pseudomonas aeruginosa
atgaaaaacaagattgaggatctgcgtaatcacctctttgccaccatcgaaggcctgctggacgaagagaagcctctggatatcgaacgcgcgaaagcggtggctcatgtgagttcggtgatcatcgagtccgccaaggtggaggtgaaagcgctagagatcatcggcgccccgggcggaagcacgttcatgcagatcggccgggaggactcgaagtga

SEQ ID NO: 342244 - DNA, 282 bp, Pseudomonas aeruginosa
atggatctccaaggtcatctgctttacatcgacatcacccagatttgtggaatcggctgtgccttctgtatgtacgccgacaagcacaaggcgggcatcagcatggagctatcaacgttggcgcgggaaaacctcgcccggttgatcaatgccccagaggtcaagcgcatctccgtcagtggcgaaggcgagccgctcaacaacgccaaagtgttccacgagatcctcggattgtccgaaggtggcaagtgtgttgccgctgaccgaaaactgacccagtag

SEQ ID NO: 342245 - DNA, 348 bp, Pseudomonas aeruginosa
atggcagatacgctcaccacccgaaagctcctcggccagctactggtcggagtgctgatcgtcgtcggtctggcagtggtcggtacgctgctcagcctctttgccctgaaccacttcggtggcatccagggcctggaggcctggcggcaaagcaactactggagcttgttctcctggagggcgctgctgtactgcgccctggccatcgcctggttccggctcaagcagcgcaaggagctgagcgcgcatgagcggcagcgcattcggcggatcgagatcctggtgctgttgctgatcctgctcatcgaattcagcaaagcctacttccgcacgggaggcgcagcatga

SEQ ID NO: 342246 - DNA, 939 bp, Pseudomonas aeruginosa
atgaccagccacaacctccgccgcctggcagcggcggccgccaccttcagcctctcgttcacggccgcggccgcgatcaacagcgccgccatcgtctcctccaccctttcccctcagtgcctcgaatacaaggtcgtcgggatctgctactggctgctctgcggcccgcatggctgcaaggtgaagacgtcggtcaaggtccgccactacgtgcctgacgcagtcgtctccagctatgcgaataccgggagcaacccctggacggaagtgtcggcgctgggcacaccgaatcccctcgcccaggccggcaatgacgcgaccaccaaccacaaggccgagaacagcatcggccgcttcaaggaagcggatgtgatcggccatcctggcggggccacgttcagccggttcgccagcgcctctgggtacgtttgccctggcgccaccttcccgctggtgccgtacttcctcagcacactggacgccattggctggcggcatggcattcccgagcaggtgtaccccgaagcgttggtcccagggctgcgcgaggtgggtggaatcttctccggcgacatgtgggggaacctctatccgcgcagcggattcctgcaccagaccgacgactacaagacggcggccgtcatcgcccagcgcgccggcgacatcaccacgcgaatcggccagctccacgtctacctccccatgcgcgcagcacccaaggacggctactggccggcgggcgagctgaaagagggcgatgcctcgaccgggaaatggcaggagctgaccccgtccctgagcctcaactgcgcggtgtttcccaactcagggccgaagacgcaggccgtcgacggcgattacgcctgggcgctctggcgtccctactcctgctgccagcgcaaggggcagatcttcctcggcagtaccgacttccaataa

SEQ ID NO: 342247 - DNA, 198 bp, Pseudomonas aeruginosa; identical to SEQ ID NO: 328577

SEQ ID NO: 342248 - DNA, 480 bp, Pseudomonas aeruginosa
atgagcaacaacacccaagcccaagaagccaaatatttcgacctgcacaccaccggtatcggctacctcaatcgcatccgcgaagtaccgatccgccgaggtgaaccgttcctcgccgctactgttgctgccctccatggcgcggcagacagcgtggaatactcctacatcgattgcaaagtggtcggcgcccaagctgaaaagcttgtccgccgttgcaaggaagcagtcgaggccgagaagaaggtgctgatttctttccgtatcggcgacatctgggcggatcccttcacctacgagaaaggcgagaaaaaaggccagtccggcgcaagcctcaaaggccggctgctcttcatctcctggatcaaagtggatggcaccaccgtctacgatgcgaaggaagaagctgagaaagcccagcaaggccaaggcgaaccgcaaggtgaacccgcagcccccgctgaacaagccgctgcttga

SEQ ID NO: 342249 - DNA, 1920 bp, Pseudomonas aeruginosa; identical to SEQ ID NO: 338131

SEQ ID NO: 342250 - DNA, 1095 bp, Pseudomonas aeruginosa
atggcgatgctcggcgcacccaccgattccaccgacctgtggtcgttaggcgtgcaagcaggctgggaactggacgtgtggggctacttgcaacatctcggcgactccgccgaggcgacgctgcaagccagccacttcgagatggatgccgtcagggtttcgctcgccggcggtgtggcacgtacctatctgctgctacgcggcgtgcaggcacaagaaaccatcatggaagacaaccggcagatcgcggcaaacctagtgcgcttggcggaaagccgggaacgccatggcgtcgcaacgcgttttgatgcggcgtctgcccgtgcggacgtagcgagtattgaggcacgcctgacccagctgcatcagcagcgcgatgtactgatgaacgcattggcattattgttgggtaaatcgccacgcgaactgaatgaccgactggttgccgccgaattaccggctatgcctcaacgcctgccgctaggcatcccgtctgaactggcacaaaagcggcccgacatcttgcaggctgacgcccagttgcgcgctgctatatccgatatcggcgctgcgcaagccgacttttacccgcgcatcagcctgaccggcggcgtcggtatccagtcgattgatttctctgatctgggaagctggggttcccggtacttctccatcggcccaacgttgcacctgccgatctttcaggggggacggctcaagagtaatctggcgctgaccgaggcacgtcaccggtcagcggccattgcctaccagcaaaccgtactgagcgcctggcatgaagttgatgacgcgctgaatgcctacgcgaccgaactgaaacggcatgcacagctagaacatgcactgacccagaaccagacggccttgcaggtggcgcaacgcgcttacgagcaaggcacggttgacttcacttcggtgctggtcgctcaacgctcgctgttatccagccagtctgcgctggccgacagcgccacggcttccgcgctgtccgtcgtctcgctctaccgttctctgggcggtggctggtcgacggaactgcagcccgtggccgaatcggcaggcgaacagacatga

SEQ ID NO: 342251 - DNA, 891 bp, Pseudomonas aeruginosa
ttgagcaatttcggtagcgctcccggtgctggacacctggcgacggcgctgttcttccaggacggcgccattgccaacgagtacctctaccgcaatgccgtcccgggtcatcccgagctcaaccggatgaacacggcattgaatatgggcggcaacaatatcgccgcagccggagcggtcaccgccagcggaaacatcacgaccagcgcggacatcagcgcgcgcaacgtgacagccactggcacggtgaaagccggcactgctgacgtcgccggcgagacgtacaccggaggctggttcaggacccgcggtaactcaggttggtacaacgaacggtgggacggtggctggtatatgagtgacagcacatgggtcaggtcgtggatgaacaagaacgtttataccggcggagaattgagagggggaaagctcagctccgaaggtagaacgaccgtcggcgagtaccttcagatcaatggtttggcggcagaaaatgcaggatgctcccccaatggcctggtaggcagagacaacagcggccccctattctgcaccgatgggctgtggaaacggcccagtggcgtgaatatcgccacccctgtggtgctggcacagtatcccgccgataaccgaccccgcacccactgccaagcggtatccagggacgcgctgatcaatggctccggccccggcgttctgcgcctggaagtcgatggcgtgatcgttggtcaagcgcgctccaccgctgggcgaaacgctgatgtagttgaagacgcctcgatctccgccatggtgaaagccggacaccagttctgcctatacagcaccgttgtgctcgcaggattcggcaactccgccggcatgcgtgtgacggccacctacctcaactag

SEQ ID NO: 342252 - DNA, 438 bp, Pseudomonas aeruginosa
atgccgctgctctggattgccctattgctcaccctgctcaccggaacctggctgagtgtacaaagcgaccacgcgacctcgagcgccgaactggccgaggtcgacaccctggccaggagcttgctgctctaccgctccagcctggcggagtacgcacacgccaaccccggtttcagcggctcgccggcggactccgctcttggtttaccggcctggttccgcaagccagcgcggcttcagggctacatcgccgccgacaccagctacgccttcatcgcctcgccgccggcagggctggcggcagccgtggatgccggtacggaatccgacctagttggtgtcaggcgcaacggccagttagtcacgcgccgcctcggtgccactgccattgcgctccctgctcccatccccgagggcgcggtggtcgcggtcaaataa

SEQ ID NO: 342253 - DNA, 891 bp, Pseudomonas aeruginosa
atgaaaggggttcgtcgcccaatcctgcgctaccacggaggcaagtggaaacttgctccctggatcatccagcacctggcgccacatcacacttacgtcgagcccttcggcggcgcagcctccgtcctgctccggaaagcccgcagctacgccgagatctataacgacctcgacggggacgtggtgaacctgttccgcgtcgcgcgggatcacggtgaggaactgcgccaggccctggcgcttaccccgtttgcccgggaagagttcgaagccagctacgcggaaacgtccgatccgctcgagcgcgcgcggcggatggttatccgaagcttgcaaggtttcggtaccgcagctgcgtccggcgaacgtacagggttccgctcaacctcgaccaggtccggtaccggacctgcactggactggcgcaactaccccgacacgctgaccgcgataacagaacgcctgcagggcgtggtgatcgagaaccgcgacgccctcgcgctgatggagtatcacgaccggccgaatacgctgcactacgtggatccgccctacgtccactcgacccgcagcacgaaggtgcgccacaacgccaccggcaagtcgtaccggtacgaactggacgacaaccagcacaaggagttggcggcattcctcaaacggctgcgcggcatggtggtgctctccggatatccctgccccctctacgacgagctctacatcacctggcacagagtcgaccgccacgcctatgcagacggatccagagagcgaatcgaatgcctctggctcaacagcgcagcgcttgaggggttggcacaactggacttcttccaggccagtaatgcgtctccatcgccctcattccagaccacggccgctcattactga

SEQ ID NO: 342254 - DNA, 1158 bp, Pseudomonas aeruginosa
atgctggataccgttgaggtcctgcttccagccattccaagcatgctgtactcgggcctgggagttgatcgtgtctctcgcattctctcactacgaaaggcttccctgggctgctggaaacgcctttactccggcgagggtatcgacttcgagatgctgttccaggacaccctggcgatcttcgacagtagccctgacgagttcattttcgagcgtttccaggacgaactcatcgaccagatgaagcgtcccttgggccttcgctatgatcaaatcctgctcgagatcaccaacggccagcaggagcagcgccgcggcactctggtcgacctgcccgcacctgccgcaccacctggaatcccagccgtagggcaggaaaatcctgctgcgtcgactactggacaagcacaatcacagagccccgctgccggcctccaaacgtccaagaccaatagcctcccgggtaatccctctaccccgccaactccgccactacctgtacaacagcagcaactgaccgacgaggagcgtgctgaactcttggcaggtcatatcgtgagcccggtatccaccaagattcagcagactcgccaacggctggccgctctcgagggtgaacatctacctgtcttcgaggaaacagctctgcaggcaatcccggtgcaagtcggcggcctgcacccgatcaccgacctctggtacatcgagcggtcgatcgacacccccgaaatcctgcgacagcacatcgctgacttggtggaagaaattgccgttatcgtcggcgcccccggaacgatcgagaggattcaaggtggtgtgggctactcgtaccgggagccagcagaagattgcgaactttctgaggcagccctgcacctgatcaccttgtttcagtctctcagtggccaggtccaggtaatcctggacaaggtcgactcgcaaacttgtcgtgatgctctgggtgaattccagttctcagctggcctcgctcagttgctgctgggccaacccaccacaggcgatcagccatccagccaggcaggccgtcttaatgacgaagccctggtgaaactgttccggatcattcgtcttgcccggcgcctggttgaccttgagctgccgccggccacctccgagcaagcagctaccgaccagtga

SEQ ID NO: 342255 - DNA, 768 bp, Pseudomonas aeruginosa; identical to SEQ ID NO: 335278

SEQ ID NO: 342256 - DNA, 1281 bp, Pseudomonas aeruginosa
gtgggcattcagaaagcgaaagcctggtatgaggaggagaaaggcgaaccggtcggcatccgcgagctgtcacggaagctcaccgatgacggctatcctgtttccccctcacacatcagcaggatgctggatgccgttgagatactgcttccagccatccctgtgatgctgtattcagggctcggtaaaccgcaaatcgaaaaactcctgtcactcagaaagtcggcatcctcctgctggacacgtctatacgccggtgaagggatcgacttcgaaatgatgttccaggacactctggcgatcttcgacagtagccctgacgaattcattttcgagcgtttccaggacgaactcatcgaccagatgaagcggcccctgggcctgcgttatgaccagattctgctcgagatcaccaacggccagcaggaacagcgccggggcactctgatcgacctgcccgcacctaccgcaccacctgaaattccaccagtagggcaggaaagtcctgctgcgtcgactactggacaagcacaatcacagagccccgctgccggcctccaaacgtccaagatcaatagcctcccgggtaatccctctaccccgccaactccgccgctacctgtacaacagcagcaactgaccgacgaggagcgtgctgagctcttggcaggtcatatcgtgagcccggtatccacaaagatccagcagactcgccaacggctggccgctctcgagggtgaacatctacctgtcttcgaggaaacagctctgcaggcaatcccagtgcaagtcggcggcctgcacccgatcaccgatctctggtacatcgagcggtcgatcgatacccccgagatcctgcgacagcacatcgctgatctggctgaagagatcgctctgcatgtcggcgccccaggagagatcgtcaggattcagggcggtgtgggttacacgtatcgcgagcccaatgaagaccctgagattactgattcagcgctgcacctcatgacgctgcttcaagcgctcagcggccaggtccaagtcgtcctgaactcacacgaccagcagacctgccgcgacgccctgggcgagtttcaattctcagctggcctcgctcagttgctgctgggccaacccaccacaggcgatcagccatccagccaggcaggccgtctcaatgacgaagccctggtgaaactgttccggatcattcgtcttgcccgacgcctggttgaccttgagctgccgccggccgcctccgagcaagcagctaccgaccagtga

SEQ ID NO: 342257 - DNA, 825 bp, Pseudomonas aeruginosa
  misc_feature (515)..(515): n is a, c, g, or t
atgcagttgctgagccaatccaccgaccacggcaaccgagccatacgcgaagtaggacaggtcacctggagggaattcagggacgatccggacgttggtcggcgcctgccttcccacctggagaagcttgaggggcgcttgaaccatcagcagtgggctctcgatagtcagctcgaagcggatccagcggcagagttcggcatccgaactctgcccgatctacctcattcaaccccgagttcggatgccgaactcagtgaaatcagcggcaagcaatgcgctttaccgctgagttcggatgccgaacccagacagaatccgccgagtacacccttggttcggatgccgaactcatatagtacgtatacatacaaacaagattctgtatgtaaaaagccagtacaaccgcgagcacgcgaggacgcacatccgaactggcaggatctcctgaacggactggaggccgagcaacggatccaagccgtaagcgcgctccgacgggtgtccgaggagcngcgtcgtccggtcatcgagcagtggcggcaccgatgtgcgggaggaagtgtcggtaaccccttcggctacctcatgacgctcatccagcgtgcagtccagggcaagttcaacgcctcttgggctccggaagaaatagcggaacgcccctgtcgtgctccggcaccaccaagccccacaacgcctacacagcctcagattcagccaaagggagacacccggacagggagcgaggtcctcagccggctcaaggacctcattcggcccaggcacggatcgagcgtgccatccgaacggggtgacgagccatga

SEQ ID NO: 342258 - DNA, 834 bp, Pseudomonas aeruginosa
gtgcggcgtctctgccagaccctcaaggtgcatcccagcggttactacgcctggctggtcgagccgaaatcggtacgcgccaaggaagatcaacgcctgctcggattgatcaagcatgcctggttggaaagcggcggggtctacggctaccgcaagatccacgacgacctgcgtgagctgggcgagccctgtggccggcaccgtgtggctcgcctgatgaggagagaggggctgcgctcgcagaccggttatcgccggcgccccgggtactacggtggcaagccgccagtggcctcgcccaaccgtctagagcggcagttcaatgtcagtgaaccgaacaaggtctgggtcaccgacatcacttacatccgcacgtatgagggctggttgtacttggcagtggttctggatctgttttctcgccaagtgatcggctggtcgatgaagcctcggatgtgcagcgacctggccattgatgcgttgctgatggctgtgtggcggcgcaagcccaagcaggaagtgatgatccattccgaccagggcagccagttcagcagctcggactggcagagtttcctcaaggccaacaacctgatcagcagcatgagtcgacgcggtaactgtcacgacaacgcggtcgcggaaagctttttccagttgctgaagcgggaacgcatccgacggaaaacctacggaacccgcgaagaagcccgcagtgatgtgttcgattacatcgagatgttctataaccccaagcgccggcacagcagcgctatgcagctatcgccagtggagtttgaaaagcgctatttccagagcttggagagtgtctag

SEQ ID NO: 342259 - DNA, 846 bp, Pseudomonas aeruginosa
atgcagttgctgagccagtccaccggcgacagcaaccgagccatacgcgaaatcggccagatcacatggcgggagttcagggatgacccggacgttggtcgccggctcccaacccatctggagaagctcgagggacgcttgaaccaccagcaatgggctattgatagtcagctcgaagcggatccagcggcagagttcggcatccgaactctgcccgatctacctcattcaaccccgagttcggatgccgaactcagtgaaatcagcggcaagcaatgcgctttaccgctgagttcggatgccgaacccagacagaatccgccgagtacacccttggttcggatgccgaactcatatagtacgtatacatacaaacaagattctgtatgtaaaaagccagtacaaccgcaaacacgcgaggaagcacatccgaactggcagggcctcttgcacacactggaggccgagcaacggatccaagccgtaagcgcgctccgacgggtgtccgaggatcttcggctacccatcatcgagcaatggcagcaccgatgtgccggcggaaccgtcggtaatccgttcggctacctcatgacgctcatccagcgtgcagtccagggaaagttcaacgcttcttgggctccggaagaaccggctgaacgaaccatcccagcagcggaacgccccagtcgtgctccggcaccatcaagccccatagcgcctacacagcctcaggtccagcccaggggggatacccggacagggagcgaggtcctcagccggctcaaggacctcattcggcccaggcacggatcgagcgtgccatccgagcggggtgatgagccatga

SEQ ID NO: 342260 - DNA, 825 bp, Pseudomonas aeruginosa
atgcagttgctgagccaatccaccgaccacggcaaccgagccatacgcgaagtaggacaggtcacctggagggaattcagggacgatccggacgttggtcggcgcctgccttcccacctggagaagcttgaggggcgcttgaaccatcagcagtgggctctcgatagtcagctcgaagcggatccagcggcagagttcggcatccgaactctgcccgatctacctcattcaaccccgagttcggatgccgaactcagtgaaatcagcggcaagcaatgcgctttaccgctgagttcggatgccgaacccagacagaatccgccgagtacacccttggttcggatgccgaactcatatagtacgtatacatacaaacaagattctgtatgtaaaaagccagtacaaccgcgagcacgcgaggacgcacatccgaactggcaggatctcctgaacggactggaggccgagcaacggatccaagccgtaagcgcgctccgacgggtgtccgaggagctgcgtcgtccggtcatcgagcagtggcggcaccgatgtgcgggaggaagtgtcggtaaccccttcggctacctcatgacgctcatccagcgtgcagtccagggcaagttcaacgcctcttgggctccggaagaaatagcggaacgcccctgtcgtgctccggcaccaccaagccccacaacgcctacacagcctcagattcagccaaagggagacacccggacagggagcgaggtcctcagccggctcaaggacctcattcggcccaggcacggatcgagcgtgccatccgaacggggtgacgagccatga

SEQ ID NO: 342261 - DNA, 846 bp, Pseudomonas aeruginosa
atgcagttgctgagccagtccaccggcgacagcaaccgagccatacgcgaaatcggccagatcacatggcgggagttcagggatgacccggacgttggtcgccggctcccaacccatctggagaagctcgagggacgcttgaaccaccagcaatgggctattgatagtcagctcgaagcggatccagcggcagagttcggcatccgaactctgcccgatctacctcattcaaccccgagttcggatgccgaactcagtgaaatcagcggcaagcaatgcgctttaccgctgagttcggatgccgaacccagacagaatccgccgagtacacccttggttcggatgccgaactcatatagtacgtatacatacaaacaagattctgtatgtaaaaagccagtacaaccgcgagcacgcgaggacgcacatccgaactggcaggatctcctgaacggactggaggccgagcaacggatccaagccgtaagcgcgctccgacgggtgtccgaggatcttcggctacccatcatcgagcaatggcagcaccgatgtgccggcggaaccgtcggtaatccgttcggctacctcatgacgctcatccagcgtgcagtccagggaaagttcaacgcttcttgggctccggaagaaccggctgaacgaaccatcccagcagcggaacgccccagtcgtgctccggcaccatcaagccccatagcgcctacacagcctcaggtccagcccaggggggatacccggacagggagcgaggtcctcagccggctcaaggacctcattcggcccaggcacggatcgagcgtgccatccgagcggggtgatgagccatga

SEQ ID NO: 342262 - DNA, 825 bp, Pseudomonas aeruginosa; identical to SEQ ID NO: 342260

SEQ ID NO: 342263 - DNA, 276 bp, Pseudomonas aeruginosa
atgaaatcgatctacaacaccccaggcttcagcgaggagttgttactggtttgcgcctcgctgcgcgaggtcggactggacaatctggctgaccagttccgcgcggcagtgttcgaccgatccgtcgtcgaccaggccatcatcgcactgcgtgagcgggtgaagaccccttcgccggagcatgcggccgacaacgagccctggttgtactgcgactggcaggccaggcaaacagcttaccggctcctccagcgccttgagcgcgcaacacgctga

SEQ ID NO: 342264 - DNA, 1299 bp, Pseudomonas aeruginosa
atgagcatttcggaaaaatttcagggcttcttatccaatcttaggattacaaacgacgatcaaattagtctccgatatggagaaatcaccgcagctttaaataaagaatttcgagatacagagtcaaaaacagctaacaaccttcaagtcggatcttatggtcgctggacagccatacaaggaatttccgatcttgacatgctttatataatgcccgcaaaaagctggaatgattataacgtctctggtggccaatcaaaacttcttgaaaagacaaaggacattataaaagcaagataccccaggaccgacatatacgtagacagcccagtagtacgtgttctatacaccaacttccacgtagaggttcagccggtattcgagcaggaagacggaagctttaagtatccagacacatcaggtgacggctcttggaagattacaaagccgagagaggaaatcactgaaatcgccaagataaatggcgaaaagaacaggaatcttcggcgtctctgcaaaatggctagggcttggaaaaacaagcacggcattaacatgggaggcctgttaatagatactcttgctcacaacttcttaaagtctaccaactattacgacgacaaaagctatctctattacgattggatgggaagagacttcttttattacctatccgagctacctgagcaagactactacgcagccctggggagtgggcaaagagtaaaggttaagaaaaaattccagaagccgtcgaagaaagcatacgacctctgtgtcgaggcaattgctgcagcagatacagatagcgaagatgaaaaatggcgtaaggtttatgggcggccattccctgcgccgcagaaagcctccagggccgcgctagagtctattgcatcgggcgtgcgatatgatgaaacagagcaatatattgagaataggttcccgatagatataaggagcagccttcgcattgagtgcgaggtttctcagaacggattcagggagttcctccttcgagatatgattgctaggcggatacgcctcagtgtgagcaagaagctgcgcttttatatcgaagagtgttccgtgcgaaagccttacagtgtttactggaaagtgctaaatagaggcgcagaggctcagcgaaagaattgcatccgaggtcaaattgtctctgattctggtcgcggtgaaatcaccgagcacacgagcttcaatggcgatcatatcgtagagtgctatattgttaaaaacggtgttgtagtagcaaaaaatcgaattcacgtaccaatacagtga

SEQ ID NO: 342265 - DNA, 615 bp, Pseudomonas aeruginosa
atggacaagaatttattcctaagaagcattgcggagacagggtacaacgtaggattcggtgggagaaagcactgggcaacatatgacatagttgacaaagttccagggcttattggttttggatcaatggcgttcggcatctatgcacttgtatatgatgagctttcggcaaaatacctttctgccgcccttcttgtattgggacttatcggtctttacatctcattctatgatcataaaaaagttgaatatgagaaatctgccaacaagctgacctgtctctacaatcaactgcgagacttatacaggcaggttgaaagctcgccttcggtgcttcccgagcaccaagaaaacttgaaaggcattgagcaagagtactacgcaaattgcataagcaagcaaatattatttagcgattggtacgcgcactacaagttcttttggcagtaccaaattgactggatcaacgagcagaagaagttcaccttacttcgggacaaaatccctctttcattcgccctttggattgtcggctttctatttctggcaataattctatatgccaaagatgtgatttcttgggctgcttgcgcaatccaacagttgccaagttga

SEQ ID NO: 342266 - DNA, 372 bp, Pseudomonas aeruginosa
ttgatcaagccaattgacgagatgctacggacctgggccgccgagctgcacccaccgaacggcgtaggttcagccggcaacgctagcggcgggagcaatgtgattgctatgctgatggcgaccaggggaaacctgactcgctccacggcgggggctcgctgtcctctggatcgcacggcggacattgagctgatcgtgaacaagcaccttccgccgcccatcgagcgggtggtgcggttgcattacacggactacgacatgtcggacccgatgaaatgggaagcgtgcgggtgcggtagaacccagtattaccagcgcctgcacctggcccatgcggccattgctgaaatcctgctgcggcgggcggcctga

SEQ ID NO: 342267 - DNA, 561 bp, Pseudomonas aeruginosa
atgaaccggatactcgacattctgattccccgcttcatcaccgagcgggtggcgctgatcgacgcaaacggccaactcgaaatcgcctgcgctctctccagcgtgcggccgaacgagcggttcgacgggatcgccaccatacgatccttcaacctggcgggcttcgccttgtttccgaagatggtggacggcccccacgcatggccagtgcaactccacccgagcaacaaggactcggcggatgtgatcaatctcccgccctgcccctggtgcgagggccctccagtcgtgctggtcgctcgcacgttctcaccgttcggaacggtccgggaaatgacgacctacgggtgcgagggtctggacgtcgacgcctatgtgttctgccacgaatgcggctgcgaaggcccgaagtgcgaagacgtgatcttcaacgccgaagacttccgccgcgtggaacgcgaaggcgcccgcctctggtctgagcggaccagcaggaaccggcatctattcgactcgaacgcggccgatggccactgcgtctacccgaggagcgcccaatga

SEQ ID NO: 342268 - DNA, 789 bp, Pseudomonas aeruginosa
atgttcgcgcccaaaacgattacttccgagatcatcgagcggctcaatgctctgagcgttgctggtggccttttcaacgaaatggaaaaggcccgaatgaaacgcagcatcgaagcggtaaagtcgcaagactttgccaagggtatgatgatttatggagtcttctatgctcttctgggggatgaaaagaattccctttcctctcacgatgcttcgttgagggttgccccctctaactctgtttatctgagaaactatgcggtatcactaaagaccttcggttatcttactcaagcatttgaagcttacaagaaagtaatggaagtttcgcctggtgataagggcgccctcttgaagatgggggagttggtattatgtgttggtcagcttgatagctatttgcataccgttgagcggtatcgaaaggctacccaggatgattcaattatgggcgagttttttgtagaggtagctcaaggggtaaaagagcttatagaaagtgtgggggtgccagagagggcccttagctatgcatataaaaaagttgagtcaatctgcaaactgcatgaggtaagacctgccgggtgcagggtaagtcagttagactctgaagggcatgaatatttatttttagaggttaaagttcattgtcattgggagctgatctctgagatgaatagtgaacttttggaagccgttgctgaagatcttgattttgagttctggaataaggtagtgcattcttttgtctataccccgaaggtggaaaaggaatttgcctcggcatag

SEQ ID NO: 342269 - DNA, 297 bp, Pseudomonas aeruginosa
atgagcaagggtgtgatgacttgcctgccacctcatgatggccaccctggtgtcgaaatcatctgggctgctgactgcagggaagcattcaatcagggcgtgaagctggcccagacttggctcgaccacgcccgtagcggctggctctgggcagtgatgatcgccgagcgcgacttactgccatgcgcgatagaacggagagccttcgaagtgggcttcctcagccgcgtccaccagcgcatatgctcacccaggtgctgcggccagtcggctaaccccctttccttggagctgtaa

SEQ ID NO: 342270 - DNA, 3693 bp, Pseudomonas aeruginosa
gtgatccgtcattttttgcgcggcatctgtagttgtgtcaggggtatcttccgttctgaacaggggcctgccaaggcgtcgtggaagctggtcccgcttacccctgagtacctagaagaagaacatggcggctatgtcgccgctatcgaagctgctctcgcgaatgatcaaatccgcaacatagccttgtccggcaattacggggtcggtaagagcagtatcatgcgggaggtcgctcggcggcagggcaatcgtatcgtggagttatcgctctcgacgcttgcacctatcgagccttcccagcttgatgactcggtgcctatccaggccaccaccccgactaaccgtatccagcaggagatcgtcaagcagctgctctatcgagaatatccgagcagaacccctggctcacggtttcggcgtattgagcgtttccgatggttacggacgatcggaacttcggtactgctggggtttatcgttggtgtaatcttcctgctgactggatggacgttaaagattgcttctgagctcacaccatatgtggatattggcgattgggctcaccctgtcatttgggggggcgcgtcgctaattatcctgctggtgaactggttgttctatgggaagttgcatatacagcagctctccgctggggctgcaaccgtcacgctcagcgaaagctccgtttcgtactttgatcaatacctcgacgaaatcgtctacttctttgaggtttcagggcgcgacatcgttctattcgaggacatcgatcggttcaacgactctcatatcttcgaaacgcttcgggcgctgaacactttgctcaacgcttcgccccagatcgagagaccgatccgattcatctatgccatcaaagacagcatctttgatcgcatcggcctggagattgaggggcgagtgcgcaacatagaagtgcttacgacggacgatcctgcacaggtcgaggctatacgtgccaaccgcacgaaattcttcgacctggtgatcccagtagttccctttattacgcatcggagcgcgcgcaacttagttctgcagctgcttagtcaagtcgagcacaaggtagctccggagctactcgacttggcggcgcagtatgtgccagatatgcggctgctaaagaatgttcgcaacgaattcatagtttttcgcgaccggatcttctccggggacggcaagcagctcaatctgaatgagaccgacctatttgcgatgatgctctacaagagcacgcacctagcagacttcgagactatccggctcggccatagcaagctggacacactttacaaggtcggccgtgagctggtgactgagaacatcaagcgtttcgagggcgaacggcgtgtgcttctccagcagattgcacggatcaacggggctgccacccgcagtgctcggttgggcgaacgcctgctggcgcacgtgcagcgaacagctcaggctgcgggctacaggacccagagagccacgtacttgtatgcgggcgaaagtaagtctccgaatgacctcaagggggcgcagttctggacaagtttcgtctcggcagacggcgactcgccgcttcaatggcgcaatgactacggtcagacgctgtcgttcagtcgtgacaatcttaaagattcgcttggtgatccgttggacgccgagagctggggcaactcggatcatgacgctctcactgaacagatcgatgagaagactgaggacatcaagttcctgcggagcgctgatcttggtgacctcatcaagcgaccggagttcctagtccagtacaaggggagcaaccagtccctcgaggtaatcgcgaagatgatcttaacgcctggcttggcttaccaaatcgtccgtgccgggtatatcaaccgaaacttcacgctctacacgtcgaccttccacggggatcgcgtgggctccgctgcaacaaacttcatcatccaccacgtcgagcgagacatgatggacgagcacttcgagcttacctcggatgatgtggatgcagttgttcgcgagcgaggcaagaacacgctgaaggatcctgccctttacaacatcgctatcctcgaccgccttttggccgccgatctcgacgcggccgacatcatgatccactccttagttggtctcggggagcgtcaggcgagctttctgaaggcgtaccttaccgcagggaacgagcgcctacggttcatcgagcggttcacggtcgcatctccacgagtgctcacttatcttgtgggggaagcggacatagatgacgcttcacggctagagatggtagatgtggcgctggcatgccttacgtcttctaaacagcggacagattctgcggtgtcgtcgtacctgtcagcacactacgcggagttcaaggcgcttacgtctaacgcgactgtgccgctccaggccgaacgtataggtgtgctcttcggggatgcgggcattaccgtgcctcgtttggagccgctaggccagcatactcgtacatcgtttgtgtcacgcaatttatatgacgtcacgtaccagaatctcgcgattgccatagacaacactgcaaccttggcgctcgacatcatccgtgcgagtaaccagaaggtgtacggctatgtactcaatcatttgaccaggtacttagatgctatagacggcacttcggcgacaatagatgcgaacgagaacttccttgtggtgattgaagatgtgctctcgatagaagcacctcgcctaaaagatgtgattgagcgtgcggcttcatgttgtaaggttatagacctcactgatgtttctgagggtgcctggccagccttggctgaagataggcgtttccccgcaacttttagcaacgttagcaattatgtcatggctcttggggaagttgatgagcatctagctaaaatcttgacgtccactacaaagattgccgacgctaacagcgctgatgagaagtctaaagcagcgttggcggtcgcaatcttgacgacagcgaatcaccttccatctgcggcactacgtgcggagctagtcgacagcttaggcctggaggactatctctctgttgacaatatcaccgctgaagctggcgatcttttcgcgcagttggtgaaatacaacctcattgctgatgacgcagtgtcttatgggcacctagccggcacggactggctgacgcgcaaagcgtttattcgagagtcgcataacttttcgagctacatgaccccagcgttgataagggaggacctggcggcgcttctagagagcagtgaaattgtttcggcggtcaagaacatagttatcgagcaagctgcaaattatgcagaggtagccgattctcgagggctgaacgaattggcgcgatttgctaccaagtccgggagcgagctctctcctgatgttatacagaagatggcagaacaaaatgtctcagtacagcagatcattctgctactaaagccacatctagatgtgattagtcgtgaccagctcttcactatactgcaattacttggtggtgattaccctaagctcactgaagtgggtcgcagtaggctgcacgtaccggatacgcttgctgaccgtgaactccttaagcgtcttcaacgggaaaggactgtaagtagctacgacgttagtaagggaatgattgaggtaaataggaagcgcaagcaaggctga

SEQ ID NO: 342271 - DNA, 1182 bp, Pseudomonas aeruginosa
gtgatttctatcggcgacatctacaaccaagacatcaatttcctcttcggatcaggagcatcgttcggcctgctcccgaccctccaactgcaggtccagactggtgtgggcaactcgcgctatacgctggaagatctagccaccaaatttgagcatgagagcgacgagcgcctaattccgctgttcatgcattactacgccagctgtatccgtccggccgaggagcttagcctggaacaggcagtggccggagaggcaggcgccacggttatcaagaactaccgcaccttcctaacgacagcgctcgaaatggtaaaacgccgcaaagctctggatcgtcgttgcaatgtgttcacgacgaactacgacggttgcttcccgctcgtggccgacgcgcttatcaaggagggtcacactgacttcgtattgaatgatggtgcacggggtttcacgcggcgcatcctacaggcccgaaatttcgggtcttatctttgccaggccggtgtcttcggccgtcatcagagcagcatccctcaaatcaacctgatccatttgcatgggtcggtctactggagcaagttggacgccgctattcaggtcggctacgacctgtctagccgcgaagaactgctggacgctggcgctatggcgttgctgcagccattttcggccgcgcttaataaccctgcatcgacacttgccgacgtcccagtcccagatttcaccaatgatgaactggacgccttttgggacaaatataagcggattccaatcgtgaatccgaccaagtggaagttccacgagacggtctacgaggagcattactatcaaatgctgcggctgctcagttatgagcttgagaagcccaacgccgtgctcataaccttcgggttctcgtttgctgatgagcacatcttcaacctcgtcatgcgctctctttccaatccgggtctgcaggtgtttgtttgttgttacagccagtccgggcacgccgaaatggagaaaaaattcaagggcaaccgtaacgtcaagtgcctgatgctacagagtggggtgatggacttcaccgcattcaatgagcaggtattggcttggccggaggctacagctcttgcagctgctccccccatagctccagcagctatccctgcggccgatgcaggcttagagagcctgacatga

SEQ ID NO: 342272 - DNA, 1803 bp, Pseudomonas aeruginosa
atgagcattcgcgttggcgaggtcatcgccgtccatggaacaaaattagttctgaagatcgacgaacagtcgagcaaggaaaccctgttctatgaaggggagaaatacaagggggtctcaatccgcgaatacttatccatccagcgcggcttccgcgacatcatctgcatcgtcgagggcgagtatctggacgaaagccgcactgagatgtatgacggccggcagacgtttgtgcggaaggtagaggctaggccgattggatacttcgaccgttctggcttcactcagggcatcaagtatctaccgatgatccaggatgcggcttacctgcttcccgaggagaaaatcaggtccatcttcgaccgcaaggcggatagcgatttcagaatcgggaccatgctgaaagaggaaatcgcggttgggttgccatggaagcgactcttcaatagccatatcggcatcttcggcaataccggaagcggcaagtcgaatactctggcaaagctctacacggttcttttcgatcaaaagctgcctctcattacaggtaaaagccgtttcatcatcttggattttaatggtgagtacggcggcgagcagctcgcgcctgtggagcacaaaaccgtctaccagttgtccacgcttaccgctccagacctgaacgatcccgcttcccggtttccgctggcaacacaggagttctggcagctcgagactatggctctgctctttcaggctaccccgaacacgcaaaggccttttctcaaccgcgtcatcgcaggttgggaacgctatagagccattcctggctcactcgcgaattatgcgaagctgatgttccaaacgtcgttctgcgccggagaggtcaagacggcgacgctggacttgatgcgcaccgtatcgaggctcatgggaaaccagcaggtgcaggacatgctggcagacgtagcctggcaccgggttggtgggcgcttcacgtacgaagggaggttcataggtaccgatggcgcacaatacgcggcggatatcgcgccaatcgtagaaacactggacgctgcaggtctcgatgagttcgaccagcttgtgctgcgcgtcaacttgcagctgatctcagatctgaacgccggatacgttcagtttgagcatattcagccacttctgaagcgcgtcgaatcttcactcgccaacctgcgtaaagtgttatctgtttcgaatgtggcaccagatgagcgcctgctcacggtaatctcgatgcgccattgcaataacgagattaaaaaggttctgcctctactgttcgcaaagcactactacaacagtcacaaggccatggtcaccaatccgcccgaccgaaccatccatctcatcgtcgacgaagcgcacaacatcctgtctgaccagtctgcgagagaaagtgaaacctggaaggattatcggctcgagcagttcgaggagatcatcaaggaggggcgcaagtttgggatgttcatcaccatcgctagccagcgaccggcggatatatcacccaccatcgtctcgcagctacataatttcttcattcaccgtttggtgaatgaccgcgacctatatttggtcgacaacactatttctacgctggactctttatctcgcagccttatcccggggctctcgcaagggtgttgtgtggtcactggtaccgcttttgaactgccaattgtgatccaggtggaccggctgctagatggtaagcagcctgccagcgaggacgtcgatctcgacagactttggagtgatgctctggcagttggggcagaggagtag

SEQ ID NO: 342273 - DNA, 1479 bp, Pseudomonas aeruginosa
atgagtaagctgccgagtgggtgggccgatgtagaaatcggtgaaatcgctgaggtagtcgctggaggcacccccaaagcaaatgattccagcaactttgaagcgcctggcgctgggattgcttggctcacacctgcagatctgagcggttacaacgccaaagaaatctcccacggttctcgagatctttcacagaaaggttacgaatcctgttcagccaaattgatgccaaaaggcagcctgctcttcagcagccgcgcccctatcggctatgtcgcattggccgctaatgaaatctctaccaatcagggtttcaagaactttgttttccccaaagaaatcgaccccagctacgccttctactatttaaaaagtattcgccaactggccgaaagccttggtacaggtacaacgtttaaagagctttcaggaactacagctaagacactgccattccgtatggcacctgagaacgaacaaacccgcatcgcccaaaaactcaatgagctgctggcccaggtcgacaccctcaaagcccgcatcgactgtatccccgtgcggctcaaacgcttccgccaatccgtcctcgccgcagcagtttccgggcgcttgacgaaggaatggcgaagtgaaaacccaattcatgaaggtgaaatcacaggtctactcaaagaaattgagctagagcgccagaaggcactccaagcggatgcggaacgagtaggaaggaggaaaaaatataatcttccagttccagcattagccgaaagactccctgaaatcccatcctcatggacttggactagcgtagatagcctagccagcaaagtggttgatggcgtgcataaaaaacctgactacaaagaatcaggagttccatttatcacagttaaaaacctaaccgctgacaatgaaatatctttcacagatactaaatttgtgtcgattgaggaccacaaggagttctacaaacgagccaacccagagatgggtgacattttgatctcaaaggacggaactctcggtgtcgtacgacaaattaaaaccaataccgagttcagtatcttcgtttctgtggcgctcgtaaaacctgccctgcggagcatgagtgattatctagaaatcgcattcaagtcccctcaagttcaagcacaaatggttggtgtcggatcaggtctacaacatattcacctgacagacttgagacaggacgcgataccgctaccgacaaaacatgagcagaccgaaatcgtccgccgcgtcgatcaactcttcgccttcgccgatcaactggaagccaaagtcgcctcggccaaaagccgcatcgaccacctgacccaaagcatcttggccaaggccttccgtggcgaactggtgccgcaagacccgaacgacgaaccggccagcgtgctgctggaacgcatcaaagcccagcgtgcttccacgccaaagaccaagcgcgtaaggaaagatacctga

SEQ ID NO: 342274 - DNA, 1536 bp, Pseudomonas aeruginosa
atggagcttatcgccgaagcctttgcctacttggagcgaagaaagcgggctgactttcgtgttcgaaaaaacctaaaatatcaattcaacctaacctatgagtggtcagacaaagacagagaaccactcaagcgctatacggcacaacttgaagcagaccaatcaattctggttagccgcagcacttacacacctgccgccggcgctgatgaaaataaccaatggtcaccgaaggaagactgcctactcgcggatctgcctttacctcgattgataggttatgcatcgggtttaaacgagaacctgcaacgctccttcatgcgcaatgccttacaatactttgaagtaatgcgcacgaggtctcgacgtcgcatcgagttggcgcaacctacgattgatgcggaccatttagaacagatcaaccataagtacagaaagcgctttccaggcattttcggtgccccatcggcaaacgacatagatgacccactgcgcacacgggaagctgacactcttttaccgaactcacttttccttgactacgactgcaccaatctggtggttgcggcacttggattattaagcaatgcagagcgcgatgaactctggccagagatccgcttgaggcatccgagcaaagtggttctgcaatatgatttgaggcgagcccctgttgagcaagatagcatcgaagatatcaagcaacttgtgcgcgcagtcggagaagacaatattcgaggtttatcaccccggacgacagatgagcagtacgacctgtacgaactcaattacctgcgcgctgaaatcacgatcgacttcatggaccctaatatcgccgaacagctcagagaaacatatctagaccctgttagactgttctggaagctctacaaactgcaactgttaggtgttgggaagtggtcgcacgagatatgcagagcacttcgagatgactctttaaacgggcatgtaaaaaagccgcttaagggaaaacttccactttctgtggtcgaactagagctatctgatggagagcactctgcaccaatcgacgacctgagcgacggagaagctcaattactccacacgattggcgctgtaaggctttttggcgacgtcgaatcattgttcatattcgacgaacccgagacgcatctgaacccaagctggcgcacccgttatcacctctattttgagaaggccgggcaagacctagtttcctcacaggcgctgatctcatcacactcgccattcctgatttcgtccttgcatcgcgaagccgtctatcacttcgagagaatcaatggccagtcgaacatggcctcaccgcccagcgaaacatttggtgcttcgtttgaagtcctaatcaagaaattcttcggcctccgttctgcaatatcacaaacggcagtttatgagattctcagccatcttaatgacgtacatatggataacgctcataagcgacaatggatcgaagagcaacttggcgaatcgatggagcgcgcctacctactaaagcgtttggagaactga

SEQ ID NO: 342275 - DNA, 1089 bp, Pseudomonas aeruginosa
atgttacttcctgtaagagcgggtcttcctcctagcgcagttttcaaaggtctaaatgcgctaatgcgtgaagtgttcctcgccagctgctctgggcgagccatcgatgagtcaaccctcccttatgggctttggactgccgctcaagcaaatcccgctactgatgcttgccttcaggcactagatatcgccatcacagctcttgatgatgaggacagatatcagctctatcttggagctcgtgcggcacctagcgtgaggcagctattcacagaccccattgccgctgcacaggcgattccagaaacagtgaatgccgcactgaagaacctgactgcgcatctattcaaaaatagctctatgcttgtcggcatcacagcggcttgcggagaaaccgtcaaggatcattacaatcgctatagcgctattcacccccctggcaatggcaatgtctgtgggatgtgcgcgacagagcaacttgcacaactacggagcgggaccgcggcaaataaccaatggcgggcaccatacgaccacctattggctaaggacaaataccctcagtttggggtcgaccccgataacctgatacccatatgccatacatgcaattcaaaagccaaactcgcaaaagatcttttgtacgatttagatggcctacgacgtacgtgcttcgacccttgggctgaaagtgctcataaacaagtagagctacagatcgacttccaagacatctcgccaatagttacttgggttatgaggcctctatccctgacgaatcaaagaaaactgactacttggaatgaggtttattgcatcaaggagcgcattgaaggagagttcctatccttacaggaaaagctcgcagaggatttagactgtgaaaatctacctgcctttaagcactccattacaaccaaagcccatgctaggaaacaatttgagcgaagaacaccatttaattactggcgccacttactatatgagtcgttgcttcgattagccgatccagacctggagcagctacgaatgctctgccatgccgccctagacccaaatggtgatgctgccgcgacatatggcatttga

SEQ ID NO: 342276 - DNA, 210 bp, Pseudomonas aeruginosa
atgacaaacaccgacctcaaaccgctgctcgacaacctgcggaacgccaccgagttctggaacctagtcaaagaggccagcgctacggacgaaagcaccgttcacaaccgctcctaccgggacgcactcgactggctcgaatcggcggccttggccctcggtgacgccctgatcgcccagcgcaaagctgtcgggggcgaccatgaatga

SEQ ID NO: 342277 - DNA, 630 bp, Pseudomonas aeruginosa
gtgatcggtctgcccaccctgacgctgttcgtcgtcgccgtgctgatgctgctgctttccccggggccgaacatggccttcgtcatgggccatggcatgagtctcgggtggcgtggcggcgcggtcgccgcggcggggatcgcctgcgccgatctgctgctgacggccctgacggtgagtggggtgaccgcgctggtggcgagctggccgccggccttcgacatcatccgctatgccggggtgctctacctgctctggctggcctacgggatgctccatgacaaggccgccgcgccgacgcaaacgctgagcgtcctgccgctgcgccaggtgttcctgcgcgcgctgctgaacagtctgctgaaccccaaggcattgctgttcttcatggtcttcctgccgcagttcgtcgaaccttcggccggaccggtggcgctgcaattgatgcaactgggcggggtgctggccctggtggcgctgcttttccacctgttgctcggtggcctgagcggtccgctcggcgcctggctgcgccgccatcggccgttcgccgtggcgcaatcgcggctgctcggcctgctgatgctcgggctggcgctgaggctgctgttgcttgggcgcgaacgctag

SEQ ID NO: 342278 - DNA, 6153 bp, Pseudomonas aeruginosa
atgtcgatccaggcgaaagttacccctatcgatcagagtatttcttctgcggctgccgtcgaggttccggaaaacgggatactcaaactctcccagagcagtaatatcgcgctcgatgtcgcaccggagtcggtggcgggatactcgaagagcggttcggacctgatcgtccagctgaagaccggggaaagcgtacgcatcgccaacttctatgcggaaggccagccttccagccagctgttcctggccgacaaggacaagctggtggcggtagatctgccgccggtcgccgccgacgggccgctgatggccggctacatcccgcaggaaagcctggccggtttcgagtcgctgaccggcgccggtgtgctcggtggcatgagcgcagggactgcgctgctggtcggtgcggcggccatcggcgccggggtggctatttccaacagcagcggcggcggtggcggcggcggttcttcggtgcccccggacaccactccgccgaaggcggccagcggcctgaagatagcgcctgacggcagcagcatcagcggccaggccgaggccggcgcgagcgtcggcatcgataccaatggcgacggcaagccggacctcaccgtgatcgccgatgccaacggcaatttcaccgctccgctgaacccgccgctgaccaatggcgagacggtgacggtgatcgttaccgacccggccggcaacagcagcaccccggtcaccgccgaagcccctgacttccccgacgcgccccaggtcaatgccagcaacggcagcgtcctcagtggtacggcggaagcgggcgtgaccatcgtgatcaccgacggcaacggcaatccgatcggccagaccagcgccgatgccaacggcaactggagcttcacccccggtagccaactgccggatggcaccgtggtcaatgtggtggccagggacgccgccggcaacagcagcccggcgacctccatcaccgtcgacggcgtggcgccgagcgcgccggtggtcgagccgagcaacggcagcgaactcagcgggactgccgaaccgggcagcagcgtgaccctgaccgacggcaatggcaatccgatcggccagaccaccgccgatgccaacggcaactggtctttcacgccgtccaccccgctgccggacggtaccgtggtcaacgtggtggccagagatgccgccggcaacagcagtccgccggccagcgttaccgtggatgccgtcgcgccggccacgcccaccgtcgatccgagcaacggtacgaccctcagcggcaccgccgagccgggcagtagcgtgaccctgaccgacggcaacggtaacccgatagggcaggtcaccgccgacggcagcggcaactggaccttcaccccgagcacaccgttgcccaacggcacggtggtcaacgccacggctaccgacccgtccggcaacgccagttcgccggccagcgtcaccgtggacgccgtggcaccggccacgccagtggtcaacccgagcaacggcaccacgctcagcggcaccgccgagccgggcgctaccgtgaccctgaccgacggcaacggcaacccgatagggcaggtcaccgccgatggcagcggcaactggagcttcacaccgggcacgccgctggccaacggcaccgtggtcaacgccacggccagcgacccgaccggcaataccagcgctccggccagcaccaccgtggactcggtggcgccggccgcgccggtggtcaatccgagcaacggcgcggagatcagcggcaccgccgaaccgggcgccacggtgaccctgaccgatggcagcggcaatcccatcgggcaggtcactgccgacggcagcggcaactggagcttcaccccgtccacgccgctggcggatggaaccgtggtcaacgccaccgctaccgacccggccggcaataccggcggccagggcagcaccaccgtggacgccatcgcgccggccacgccgaccgtcaacctgagcaatggcagcagcctcagcggcaccgccgagccgggcagcacggtgattctcaccgacggcaacggcaatccgatcgccgaggtcaccgccgacggcagcggcaactggacctacaccccgtccacgccgatcgccaacggtactgtggtcaacgtggtggccgaggacgccgccggtaacagcagcccgccggcgacggtgaccgtcgattccagcgcgccgccggcgccggtgatcaacccgagcaatggcgtcgtcatcagcggcaccgccgaggccggtgccaccgtgaccctcaccgatgccggcggcaacccgatagggcaggtcaccgccgacggcagcggcaactggagcttcacgccgggcacgccgctggccaacggcacggtgatcgtcgccacggccaccgacccgaccggcaataccggcccgcaggccgccaccacggtggacgcggtggcgccgccggcgccggtgatcgatccgagcaacggcacgaccatcagcggcaccgcggaggccggggccaaggtgatcctcaccgacggcaacggcaacccgatcggcgaaaccaccgccgacggcagcggcaactggaccttcacgcccgccacgccgctggccaacggcacggtggtcaacgccgtggcccaggaccctgcgggcaataccggcccgcagggcagcactaccgtggacgcggtggcgccgaacacgcctgtggtcaatccgagcaacggcaacctgctcaacggtaccgccgagccgggcagcaccgtgaccttgaccgacggcaacggcaacccgatcggccagaccaccgccgatggcagcggcaactggagcttcacgcccggctcgcaactgcccaacggcaccgtggtcaacgtgaccgcgagcgacgccgccggcaataccagccttcccgctaccacgacggtggattcctcgctgccgtcgatcccgcaggtggatccgagcaacggttcggtgatcagcggcaccgcggacgccggcaacaccatcatcatcaccgatggcaacggcaacccgattggccaggtcaccgccgacggcagcggcaactggtccttcactccaggcatcccgctgccggatggcacggtggtcaacgtggtggcgcgcagcccaagcaatgtcgacagtgcgccggcggtgatcacggtggatggcgtggccccggcggcgccggtgatcgatccgagcaacggcaccgagataagcggtaccgcggaagccggtgcgacggtgatcctcaccgatggcggcggcaacccgatcggccaggccaccgccgatggcagcggcaactggagcttcaccccgggcacgccgctggccaacggcacggtgatcaatgcggtggcccaggatccggccggcaataccagcggcccgaccagcaccacggtggacgcggtggccccggccaccccggtggtcaacccgagcaacggcagcgtgatcgccggtaccgcggaagccggcgccacggtgatcctcaccgacggcggcggcaacccgatcggccaggccactgccgatggcagcggcaactggagcttcaccccgggcacaccgctggccaacggctcggtggtcaatgcggtggcccaggacgccgccggcaacaccagcggcccggccagcaccacggtggactcggtagccccggccaccccggtgctcgatccgagcaacggtacggtgatcagcggtaccgccgaagccggcgccacggtgatcctcaccgatggcggcggcaacccgataggccaggccaccgccgatggcagcggcaactggagcttcactccgggcacaccgctgaccaacggcacggtgatcaacgcggtggcccaggacgccgccggcaacaccagcggtccggtcagcaccacggtggacgcggtggctccggccactccggtgatcgacccgagcaatggtgtcgaactcagcggcaccgccgaacccggcgtccgggtgatcctcaccgatggcaatggcaacccgatcggccagacccttgccgacggtagcggcaactggagcttcacgccgggcacgccgctggccaacggcacggtggtcaacgccgtggcccaggacccggccggcaataccagcggcccggccagcaccacggtggacacggtggcaccggccacgccggtgatcaatgccagcaacggcagcgtgatcaccgggaccgccgaggtcggcgccaaggtgatcctcaccgatggcaacggcaacccgatcggcgagaccaccgccgacggcagcggcaactggaccttcacccccggcacgccgctggccaacggtacggtgatcaacgccgtcgccgaggacgccgcgggcaacgccagcggtccggccagcaccacggtggactcggtggcgccgtccgctccgctgctgagcatcagcgccgacggcgcgctgctgaccggcaccgccgagccgaacagccaggtgcgcatcgtggtcaacggcgacaccgccaacccgatcacggtcaccgtcgacggcgccggcaacttcagcctgccgttcgcgccgccgctgatcaccggcgaactgatcgctggggttgccgtggacgccgccggcaacgtcagcgggccggccaccatcaacgcgccggacctggcgccgccgaccatcagcgtgccggaagccgccgatacctggatcaacgccgcggagatcggcgacggcatccaggtcgatgtgacggtccgtccgaccatgcaggtcggccaggtggtcacggtcaagttcgccgggcagaacggctacgaggccgaggtcagccataccctcaccgccggcgacatcgccgccggcaacctgaccctgaccctgacgcctcccggcggcatgggcccgttcccggagggcgcctcgaccgtcaccgccgacatcaacggcggcaccgcgtcgaccccggtgccgttcaccatcgacaccattccgccggcgaccccggtgctgtccctggtcggcaacatcctgaccatctcggcggagccgggcaccgagctgacggtcaccgtcgacgtcggcggggtgaccgccaccgccacggtgaccgccgacaacagcgggctggcgtcgctgaacctgctcaccgacctggatatcgacttcagttgggaccagttgctcaatgcccaggtgtcggtggtcggtcgcgacccggccggcaacccgagcaacacggcgagcatcggcatcggcaccagcatcgagcaaccggtgaccatcggtaacttcggcctcgacgtcagcctcaacccgctgaacccgcgttttggtttcagcggcaccaccgagcccaactccagcgtggtgatccgggtcatcaccccggcgttgaacgtcgaattgctgccgatccaggcggactcgtccggcaacttctcgctgaacctgctgagcccgaccatcctcacccagttggggctgaacatcaccgacatcctcaacctcggctcgcagatctcgttcaacctggtgtccaccgacagcaacggcaacgacagcgccgcctacgggatcaccctgacccccaacggactgtcgctcaacatcggccagatcgatgtcaacggtacttccggcgacgacgtgctgtccggcgccaacggcagttcggagcacatcaacggcggcgacggcagcgacctgatcttcaacgtgggcaccggcgatcacgtggtggccggcaacggcaacgacaccatccagatcaccgcgaccgatttcgtcagcatcgatggcggcgccgggttcgacaccctggtcctggccaacggcatcgacctcgactacaacgccgtcggcgtcggcacgctcagcaacctcgagcgcatcgacctcggcaagggcgactcgggtagcgtgctgaccctgaccgcggcggaggtggatgccatcaccgatgccaacaacacgttgcagatcactggtgagaacaacgacaccctgaacgtggtgggcgcggtgaataccggtaccacgcaactgatcaacggcattacctacgacgtctacaccttcggcagtaccaccctgctgatcgaggacaacacggtacaggtcgtggtctga

SEQ ID NO: 342279 - DNA, 1299 bp, Pseudomonas aeruginosa
atggcctggaagatccgcttctacagcgggctgaaccagggcgccgaagtctcgcttggagagggccgggtggcgcttggcagcgatccgttgcaggccgacctggtgttgctcgacgagggcatcgcggcagtccacctggtgctcgaggtcgatgcccagggcgtgcgcctgctggagtgggcggagggctgcgagcctcgccaggacggccaggcgcaagtcgccggagcgatcctgcaggcgcttgccgggcagacctgcggcccgctgcgctgggcattctgcgacccgcagcggagttttcccgagcgtttccccgaagtcgaggcgcagaccgcgccagtgcgccgcaagccgtccgcccgtgccggcggggcctggctgctcggcatcagcctggcgctggccctgtgcctgctgggcatgctcgtcgaaccctggtcggcccgccagcacggcatggctggcgaggagcccctggcgaaggtgcgcacctacctgcgcgagcagggcatgagcgaggtggatgtgcagcgccagggcgacagtctcctgctcggcggctacctggaggacaacgctcggcgcctggcgctgcagcgctacctcgatggcagcggcgtggactaccgactggaagcacggagcatggaagacattcgccagggcgtggatttcatcctgcagaaattcggctatcggcagatcctcagcagcaacgcggacaagcctggctgggtccggctcaacggcgaactggcggaacaggacgaacgctgggcgcggatcgacgcattgctggagtccgaggtgccgggcctgctcggggtggaaaaccaggtccgggtggccggctcgcacctgcgccgcctcgaacgcctgctggcggacgccggcctcgaccggcaactgagtttccgcgagcgcggcgagcgcatcgagttgagcggtacgctcgacgaggtccagctcagcgccttctaccgcctgcagcgcgagttccagcaggagttcggcaaccgcccgagcctggagctgctcagtcgcggcaagcgcgccagcggcgacgaactggagttcacggtgcgctcggtgtcgctggggcgggtgccctatgtagtgctcggcgacggccagaaatacccggtgggcgcctcgacatcccgcggtgtgcgaatcctcgccatcgagccggagtcgatcctggtggcccgcggcaagcagcgtttcatcatcaatctcaaaggggaggtgctccatgatgacagccttggaaacgcgactgtcggtcgctga

SEQ ID NO: 342280 - DNA, 1782 bp, Pseudomonas aeruginosa
atggcaaggctcggttccagcgttaccaacgaaatcaaacaggccctggcggccagccgcagtgcgttgcgcagcgtggcggcgttctccggggtgatcaacctgctgatgctggtgccctcgctgtacatgctgcaggtgtacgaccgcgtgctgtcctcggccaacgaagtcaccctgttgatgctgaccctgatggcgctcggcgtgttcgtcttcatgggcgcgctggaggcgctgcgcagcttcgtcctggtgcgggtcagcgaacgcttcgacggccagttgcacgggcggatctacgccgccgccttcgaacgcaacctgcgcgccggcggccaggaggccagccaggcgctgcacgacctgaccaccctgcgccagttcatcaccggccaggcgctgttcgccttcttcgacgcaccctggttcccggtctacctgctggtgatcttcctcttcgacccctggctcggcctgctctcgctggtcggcgcgctggccctgatggccctcgcctggttcaacgaacgcgccacccgtgcgccgctggccaaggccggcgagttgtcgatcaagtccggccaactggccagcaacaacctgcgcaacgccgaggtgatcgaggcgatgggcatgctcggcagcatgcgcgggcgctgggaacggctgcaccaggcgttcctcgaccagcagagcctggccagcgagcgcgcggcgcggatcaacgcgctgagcaagtacctgcgcatcgccctgcaatccctggtgctcggcctcggcgcctggctggcggtggagggacgcatcaccccggggatgatgatcgccggctcgatcctgatgggccgtgcgctggggcccatcgaccaactgatcggcgtgtggaagcagtggggcgcggcgcgcgatgcctatcgccggctgagcggcctgctcgacgaattccccgcccgcgagcggcgcatggaattgcccgagccgcgtggccacctgctgctggaatcgctggacgcggcgccgcccggcagcgaggcgcgcaccctgcgtggcctgactctggcgatcccggccggctcggtggtcggcgtgatcggtccgtccggctccggcaagtcgagcctggcgcgggtagtgctgggcatctggccgaccctgcacggcagcgtgcgcctggacggcgccgagatccgccagtacgagcgcgagaccctcggcccgcgcatcggctacctgccgcaggacatcgaactgttcgccggcacggtggcggaaaacatcgcccgcttcggcgaggtgcaggccgacaaggtggtggaggcggcgcgcctggccggggtccacgaactggtcctgcgcctgccgcagggctacgacaccgtgctcggcgtcggcggcgccgggctttccggcggccagcgccagcgcatcgccctggcccgggcgctgtacggtgcgccgaccctggtggtgctcgacgaacccaactcgaacctcgacgacagcggcgagcaggcgctgctggcggcgatccaggcgctcaaggcgcgtggctgcacggtgctgctgatcacccaccgggccggcgtgctgggttgcgccgaccgcctgctggcgctgaacgccggccagttgcacctgtacggcgagcgtgaccaggtgctcgccgccttgaacaaccagcgcgccgcgtcggcgtcgcagcagcgcgcggactaccgggtggccggctacggcgcgccgcaggtggtggccgcgccgcgccagggaggtgtggaatga

SEQ ID NO: 342281 - DNA, 1083 bp, Pseudomonas aeruginosa
atgagctttattcgtatccctggcgagcatatttctgcaaagatagtttctaaacatacttggaacgctgatcttgtttattatgatggtcctttagttagcctctaccgaagcgaacgtggtgaagatgttctttatgtctggctcgattgcacagcgacaaggcatcggtggtgcattgtcccaatctctcgagagtctttgcgaggttatttggatgaagcttatagtcttctagagttgtttcgaaggtcaaagtatttaatagcatttgatgtggggcagagcctaaagaaaacaggcataaccttgacttgctatgaagatatgcctgaagattatttgccagaagaggactcgctacttaccccggaaattgcgaccgaatctgcgttgtctttaaaaagtgagctgactgcggattactatcttggtttaaatggtgacgaattgtatgtagaggagctttctaagattcagaggctctttcagcagctatattcatttcattatggtctctcctactcttttagaactgctgttcgtgataggttgcagcactattcctctcagtggtctggtggttttagtgcggttaatatatttagtggtttgggtagtgtgataccttcaattcatcgggctcgtatttcccagctgagctttaactctccagggcatattaaacttgatttgcttccggatttggctgctcaaattcaaagttctatagaagttacatttcttccagggaggcaagttcttctcgaggagctttattctcgagcgtatgagtattttagagagtctggaatatctggttttgaatctgaaagcaatcgtatatcgcaaaatttaacttctgaaactcgggcgacgttagatacgtttgtgattgatttcttttcgataatggaatgggattactcttctcacccgctgcacttgatcgaggataatccgcttctcaaattgaggataatttttgcttattaccgtagactttcgcagctccgaaattttgttgtggatgggaaactgatggtcggagtgtctccattattgctgtcggtgcctgcctga

SEQ ID NO: 342282 - DNA, 255 bp, Pseudomonas aeruginosa
atggagccagtgctccccgacggatgcaccgtggcggtcgataccggcgctaccgcgattcaggatggcaagatgtacgccatcgaccatgccggccagttgcgcgtaaagctgctgtactcactacctggcggcggactccgcattcggagctacaacgacgaggagtatccggacgagcgatacgaagccaactatgtccgcgaacacattcggatcataggcaaggtgttctggtacgcagtccttctatag

SEQ ID NO: 342283 - DNA, 213 bp, Pseudomonas aeruginosa
atggctgacgacgtcgaccgcgcttccctgctagaggagttacacctgcaggcagcactctccgcccgccgccggccagcgccggcctacagcatcagcgaaaccgtctgtgaggattgcggcgaggagatcccagctgctcgccggctggcggtacccggatgtgattgttgtgtcgagtgtcagacgcgccgagagcgttgcaatgcgtga

SEQ ID NO: 342284 - DNA, 219 bp, Pseudomonas aeruginosa
atgcaaacaatcatcattgcggcacctgcgcgtgccggaaaaactcgcaatgccacagccctggccaaggcattcggttgccagcagatcgtcgacgactgggacggctattcggcaatcccaagcggcgccctggtcctcacgaacgtcgagcatcccaagattccacgcggtgcgcgcttggtcagttgggcacaagcgatgcatgcgctggcctga

SEQ ID NO: 342285 - DNA, 2730 bp, Pseudomonas aeruginosa
gtgaacgagcagacttccccacgccctatctccgcctgggcgcgccgctacattgagcaatttgggttggcactggtccccattgacccgggcgagaaagcgccaaagggagaacgctggaatcagcccggcgggtactttaccgacccagcccaggctgaggcgttctggacgaagcacccgaagcacaacatgggcgtagtgctcgggcccagtcgggtatgttcgctggacgtggacgatgtaccggcgacgcgccaggtgctctttgacctgctcggtctggacctggacgccttgcctctggtgtaccccaccgcagtcggtaaccccgaacgtttccggatcctgttcaagatgccagacggcatcgacttgagtcgacattctctcaactggccgaacgaagccgacccggacggctcgaagttcaagttggcccaggcagcgcttcgagcggcgaaagaaaagggtgaccaggtgcagattgctgcgatgaaagccaaggcggatagcctccggcgcttcaccgtgtttgaacttcgcggtgggttggtccaagacgtgttgcctccctccattcaccctggtaccggcgagccctacacctggcgaaacccgccatcaagcgagggtttgccgctcctgccggacattctgctcagtgtctggaacaactgggatgcgttcaagcgtgatgccgaggcggcctgcccctgggcgccggctccgcagaaaccgaagaaggtcgccaaaccgaagcgcccggcggcgactggtagtgccggttcggttatcgatgccttcaaccgcgcacacgatatcgaggcgctgcttgaggcgcacggctacctcaagcgggggaagaagtggctgtgccctcaaagtagtaccgggttgccgggcgtgacggtcagcgagggaagggtgtattcacaccatggctcagatcctctagccaacggccatcagaacgatgcgttcgacgtgtactgcctgcttgagcacaacggcaaccagtccaacgctgtgcgagcagctgcgcgtctgctgggcatcgagcaccaggtcaggccgcccgagccgccgcccgagccaggtgcatccgatcttccccccagtgcggccggcggagagcttccccacgccccatctgatacaggcgacggtcttgacggcgactccgcggatgacggggggacgggggagggcctcactctggcgaaggcgctgcggcgatatgcattgatcgaagggaccaccaacgtgtgggacatcgacaagtcgcgcaagatgaaacgggccgcattcgaagcgctgatcggcaaggatctcttcaaggagtggactgcagtcgttgatccgaagaagaagaaacggatcagcgaggaacaggtgcgcgactgggagcgcgccagggcgatggccggcaaagcaatagggccagtgagcatgccgcctctgacccgatacgtgtacatcgacggtactaaggatgtatgggactacgcgaagaaacggcgtgtgccggaaggcgcggtaaaaatggccctaggagacgcctacagcctatggctcaacagcccggagcggcgggtagtggacgtgaacaacatcgttttcgacccaacgatgtcatctgacccgaaggagaccatcaacaccttcgaggggttgcctctggagcccaagcgcgatgacgcagcatgcgagaacctgcggtggctcattgaattcttgtgcaacgcagacacggatgcgatggagtggctggttcgttggttggcatatccgctgcagcatacgggggccaagatggacaccgcggtgctcatgcactccaccatggaagggtcaggcaagagcctgttgttctccgttgtgatggggcgcctttatggccagtattcggccacggtggggcagacccaactagaggggaacttcaatgcctggcagagcggaaagttgtgggctgtttttgaggaggttgtcagccgagatcagcgctacaaccaggtcgggaagatcaagcaactgatcaccgggcagacggtgcgtatcgagagcaagttcgtgaacggctgggaggaagccagccacatgaacgccgtgttcctttccaacgaaatcatgccctggccgatcagccccgacgaccgtcgctttctggtgatgtggccagaggaaaagctttcgcccgcccggcagaaggcgatcgctcacgaactggcgaatggtggggtggaagcgctatatggatggctgctcgcgcaagatctaggagacttcgaccaacataccaagccgcccagtacaccggcgagggaccgtctggtggcgttgagcagggcaacatggcagactttcctgcacctctggcggataggcgagctgggggagggtctatggggagcttgcctttcctctgacctgtatgccttgttcctggagtggtgccaccggaacaaagagcactcgatgagccagacgaagttcagtctgtttatcagcaccgccggcatcgacaagacgcgagcgattccttggacggatcgcaatacgcgacgtttcgctgcgttcttcttcccgaaggatgagcagtgtttcatgccggccaggccgacctcggccgaactgggtgcgcatgtcgtcgtatggcggcagcgagcaatgcgagctggctggaacgtggaaaattgggaccacgtgaagggggcggccgcatga

SEQ ID NO: 342286 - DNA, 753 bp, Pseudomonas aeruginosa
atgttcgacacccgcctcatccgtctgcccgaccagtcgcacacccacgcccacgagcatcaccaactggtgatgtcgctggccgggcgcgccgaattcgaggtcaacggctgtggcggggaagtctgccggatgcgcgcctgcctggtgccgggcgaggcgggccacgtgttcgccggggtgggcgacaaccgcatgctgatcatcgacctgggcgaggacaacccgaccccggaagaccccgacctgctcgcgcgcctgttcgaggcgccgcgctacccgaccctggacgccgacttccagaacctgctcagctacgccggcgccgaactggcccgctacggcagcgacccgctgctgacccgtgccctcggcggagtgctgatccgcgccctgcacctgcgcctgttcggcaagcagcagcccctggcggccagcgggccgctcgacctggagcgcctggacgcgcatatcgtgcggaacctggcgcggcgcatcacggtcgccgaactggcccaggtcgcctgtctcagcccgagccatttccacgcgcagttcaaggacagcgtcggcctgaccccgcaccagtacctgctcaaggtccgcctcgactgcgccgcgcggttgctgcgggaaagccgcttgcctctggtgcggatcgccgaggaatgcggcttctccagccagagcgcgctgaccacggcgatgcgccgctacctggggctgacgccgaagtcgctgcgcaagggctga

SEQ ID NO: 342287 - DNA, 639 bp, Pseudomonas aeruginosa
atgagtagaattctcgcagtgcatgccagcccgcgaggcgagcgctcgcagtcccggcgtctcgccgaggttttcctggcggcctatcgcgaagcccatccgcaggcccgcgtggcgcgccgcgaagtcggccgggtaccgcttccggcggtcaccgaggccttcgttgccgccgccttccatccccagccggaacagcgttcgctggcgatgcaggccgatctggcgctgagcgaccaactggtcggcgaactcttcgacagcgacctgctggtgatctccacgccgatgtataacttcagcgtgcccagcggcctgaaggcctggatcgaccagatcgtgcgcctcggggtgaccttcgatttcgtcctcgacaatggcgtcacccagtaccggccgctgctgcgtggcaagcgtgcgctgatcgtcaccagtcgcggtggccatggcttcggcccgggcggcgagaaccaggcgatgaaccacgccgatccctggttgcgcaccgcgctgggtttcatcggcatcgacgaggtcacggtggtcgcggcggaaggcgaggaatccggcggcaggtccttcgaggaatcctgcgccgaggcggaacagcgcctgctggcgctggcgcggtcggcctga

SEQ ID NO: 342288 - DNA, 195 bp, Pseudomonas aeruginosa
atgaccaagctcctccgtgatgatctggcgcgcacctcgatcatccatgcctgctggattagctccctctggaaggtgaggtatcgggcgtatgacctggccgaaccagccgttttcaccgccgacaagatgggcctgagcggactgagttcgctggacagctggacactgcttccctgtcagatggaggtgtag

SEQ ID NO: 342289 - DNA, 855 bp, Pseudomonas aeruginosa
atggaattagatttactaaaaaacctaataggctcaaccggtttaggtggcttttgcgtaggcgttctttttctactattcagaaaaattattggagcaaaatttctttcaaaaatgacaaaggaacactcattcaagataatcaacagaataattgtatttacgtttttgatagctattttaggccttgttttttggttcttcctgcaattgaaaaccaaagaagaacctgtggtgaagaatatttcagctgacacccccctcccccggctaattattcaggaaagaaaagaaaccaaacccaaccctaacgacccaaagtggacggtagagatagatattgagtatgtacagctacgcaacttaggaaatatgggtgttcagaagcttatcaacgacgcactcgtagctgacgcgggagctgataaagaatacgaggcagagaattggcattacagagtaggtagccacacaataaaaggggatctattgagcattgtctcttatggcacctactatggccatggagccggtggtgcaggcaatgtaataacaagcacaaacctgaacttgaaaactggcgggagagttgaattcaaggatctatttaaatcgggctacgccgaaacactgaacaagttagtcttggctgagcttaaaaaaaatggttatggcgagttctttcagggattagaggaagatcagtgctatttctttgatggcaactacctttcattgtgctttgatgagtatgaggtggctccaggggctgcgggcgcggtcacagttgagttgcctttgagttctatacgaagccttataagcctaaacggccccctagcctatgcaatatag

SEQ ID NO: 342290 - DNA, 1335 bp, Pseudomonas aeruginosa
atgaacaaccacaacggtaccctgcaccgtggctggcaatcgctccagcgctggcgcatccagatcttcgtcatcacctggctggcctacgccgccttctacttcacccgcaaggccttctcggtggccaagctcggcatcgccgaagacccctccttcgaactcgacaagagcgccatggccgatctcgatgccctctacctggccgcctacgccgtgggccagttcatgtggggggtgttcgccgaccgcttcggcacccgcgtggtggtgctcggcggtttgctcacctcggcgctggcggcgctggcgatgggtaccttcgccaccctgccgatcttcgccgcctgcatggtggtccagggcctggcgcagtccaccggctggtcggggctgtgcaagaacatcggcgccttcttcgccacctacgagcgaggccgcgtgctcggcctgtggagtacctgctacgccttcggcgggctggtggcgacgccgttcgccggctggtgcgcctaccggttgacgcatgactggcgcatggccttcctgtcctcggcgggagtggtgctggcggtggccgtgctgttcttcttcctccagcgcaaccgtccgcaggacgtcggcctgccgcccgtggaggccgaggccgcgccccccgccaacgcgccccggccgagccattccggcgccctgctgaaggcgctcaggaatccccacgtgctggtcctcggcatcgcctacttcctgctcaagccggcgcgctacgcgatcctgctctggggcccggtgatcatctacgaacgcatgccggagatcggcaaggtcgcctcggccatcgtgccttcggccttcgaggtcgccgggctggccgggccgatcctcatcggactggcctcggacaagctgttcggcgcccgccgcatgccggcctgcgtgctcagcctggcggcgctgaccctgagcctggcgctgttcgtcccggcgatgcagagcggcagcctgtacctggtggtcggcctgctgttcatgatgggcgtcaccctctacgggccggactcgatgatcagcggcgccgccgccatcgacttcggcaccagcgaggcggccggcaccgccaccggcttcgtcaacggctgcggctcggtcggggcgatcctcggcggcctgctgccgggctacttcgacaccctcacggtgttcttcgtgttcaccgccaccgcgctgctcgccagcctgctgctggtgccgttctggaacagccggccgggcgcgcgccgcgtcgaaccgaaggcgcatgccggcgggccgctgctggcggccggcaagccgcgttga

SEQ ID NO: 342291 - DNA, 939 bp, Pseudomonas aeruginosa
atgcgtatccagcacttggagctcgcgaattttcgcaagctgaagtccgtcagaatcgatttagccgccgaaacgactctcttggtgggagccaacaatagcggtaagtcgtcagcgatgctggcgttgcgcaagttcctggttaagcccacgacgttccgattgcaggatcttaccctctatcacatcgccacgcttgatgcgattgggcgtgagtgggaacaggcggatgaaagcttcacgattccgaaaaccaacacctgggccgactggctgccgacactggatgtgtggatacacgccgcgcagggtgagttccaccacattcgcgatctgattcccaacttttcctggtcaggcggcatggtgggaatgcggtttcggttggagccggacgaccttccaatgctgtattccgattaccggaaagagcgtaagcgtgttgccaagctcctagaggaaatacagaaccaggctgcggatggacaggagcgacctcctctgcagttatggccgcaaaaccttcatgactacctcaaccggcgcctggtgaaaacgttcaaggtgcgttggtaccgtttgaatcccagcgagctttcaccccctaaccccaagactagaaccgccacccttcaggcactggccgacactgcagtaccgcttgaccgaaatccacttctgaaccttatacgcgttcacgagatcaatgcgcagcgcggatttggggatagtaccgacgaagggcaagaagagagcaaggctggtagcggccgaaagctatctgagcagctacgcacttactatcgccgccaccttgaccctggcgatagtccagatgtgtgtagtggtctactgattccgcagagtatccctcgcctctctccgcggaactcgcttttgggcaagcaatgtccgggaagacggttgacttgcccctga

SEQ ID NO: 342292 - DNA, 1932 bp, Pseudomonas aeruginosa
atgcagccctctgccggttgtgctggtacttgctcaagccccctggtttcatccctcaagcattccccatcgcaggagttgcaatcagtcctgcggctcaacatctcgcacgcattgaaccaccacaccgccaagcatcgcgaccaagccttatggaaatggaacctgctccagccggcactggctcatcccaagcattctcgcgcgcgtggccaggcgttgcgccgcctggctcaggtcgcccacgctcgtcccgatggtcgtcacacgccggttagcctggacagcctctacacctggctgtctagctacgagcaacaaggcctgctggccctgatgcgccgtccgcgccgtgataccgggcggcgtttggtgcaggtcacccgtcgctgggacaaggcctgcaccttgcctgcggaagtccagtcctcacttgccgagcaactggccgagcatgtgcgctcgctgtgggctgccggtgcaccggggtatcgcaccgtggcggacctgggcagtgccttcctgcacgagatatcgcgggcagccggctgggtcgatgtcgcgttgtccgattgccagttgagccgtagctatgtcgagcgttatcgccgctatgccctgctggcaatgcacgacaaggacgcccggcagttctttgacaccagggtgccgcgtattcgccgtcaccgtgacggcctgcaaccgatggatatcgtggtcggcgatgttcatccgatcgacatcctgctgacccgcgccgatggcagcacggtcacgccacgggccatctgctggctggatgtggcgacccagcgcctgcatgtcaccctggtgcaattggaaaagagcgagggcatcaagcaggcgcatgttgcccaatccttcatggccctgtgcagcgcctggggcttgcctcgccaactgtacctggataacggtgccgaatacggctggcatgaaatgatggacggctttgcacacctgagccgattgacgggcgagcccttggacacgcggctgatgcctggcagcagggcggtggtgcgggcacggccctacaatgcaccggccaagcccatcgaaggtctcttcgcgctactggagcagcaagtgctgtccatgctgcccggctggattggtggcaaccgcatgcgtgccaagacccataacgtcgggcgccgtccgcagccctattcgggcgactgggccgcgttccacgactcttttgatcgcgccttggcgtactaccatgcccgcgcccagctacgcagtcgcaccctgcaaggcctgagtcccaatgacgcgttacggatggctatcgagctcggctggagcggcgcgccgcaggtagaggccttggccttgcaggttgccttctccagcgaggaccgccgcctgatccagagtggcggttacttcagttgcaatggcaagacttacttcgatgatgccctcattgcccacactggcaagcgcttgccgattcgctatgtcaaatgggagacccgccaggtcttcgtgttcgatgaacagcagcaactgatttgcgtggcccaggaagcgccgcagtttgccttctttggcgaggcgggggtgcaggctcacgttcggcgcgagcacatgatgcgccggtatattcaggacctgcgccaggatacggtgcgcctggacctagagcaggccatgcaacgccgtaccgcgctggcaccgcctgcccctacgctgccgaaaggcccgcgcatcgagctgacgccggcgctgcggggcatactgcaagccttgcaaactcgtgcctcacaacccgacggccatccctcggcctcgtcgtcgacctctggtatcagtcaatgggctacgccgccgaatcccttgctggccgagttcggagaccccgccgattgggaggatagcgactgcgaaggtgagcgatga

SEQ ID NO: 342293 - DNA, 723 bp, Pseudomonas aeruginosa
atgagcgcattgcccaccatcgaaacccaagccgttcaggaagccctggccttggcgaacaccttgctggccgcgtccagcaatcgcgtcggcaagatcgatggcaagccgggcaccggcaagagcaccatcgcccattacctagtccagcacttaaacgccgtgcgggtctgcgcctatcaaggcatgtcgaccaaggcactgatgttggacctgtgcgcggccctggggctggagatcggcagcggcacggcggcaggcttgatcaggcaggtgcgcccgcatgttcatgaccgcctggtcattgtcgatgaagccaaccatctgaaatggccgcaactcgaaggcctgcgtttcttggccgatgaggcggggatggcattgttgctgatgggcacggacatcatgaaccggcaatttcgcacgccgcaaacgggtatctaccttgcccaattggcctcgcgcatcggcgccaagaccatgcacctgacccgcatgcgacggattgacgagggcctagcctatgtgctgcaaccactgttcgggcaggtcgagcgcgctacggccaagcgtttcatgcaggtcagccaaggctattggcgcgactgcattgagttggcccaggcctgccagcgcctgatggcgccgcaggggctgacccggttgagcgtcgacatcgtcgatacggcggcgctgtggatggccgagcgtaggcaagagtag

SEQ ID NO: 342294 - DNA, 687 bp, Pseudomonas aeruginosa
atgaagccaaaacggctgaaactctgggttctgaccgctcgcattgactttcagagccttgtacatgggcttcgacagcagccgttcaacgaccagaaccgggtcggtgtcgaggctattgaaatcctggatggcaaggctacctttcggtaccacgagcagcgcgacatcacccagtcgttcaccaaccctctgggcgaaaccgtcgagtcgaggtactcgactttcatcagcttcgacatagtgttcgaaacacttgggccggatcgatattcgatctgcatgggttcaccgccgaaagatttgaagccgttcgtggaactcatccgaactgcaacccggactaactttgcgctagagatcgtgaagccggatatctcttcgatctatcagcaactcaaggctgacaagcgcttcacgagagtcatggccaagcggatcgtttctggagcggtgacgtttgatatcgaaagcagctatcgggtcgatattgcatcgacggggaatgcgatgacgaagttgttggagatcacgggtggccgcgcggcaccgatcgataaaatcaaaattgtctacacgtacgacttaaggcctgttcagattgagctctcgcgctcaggttcggttgcagtgtcgtgggatgatgatgagcacctgaacttgctgacaagtctattgatccgttag

SEQ ID NO: 342295 - DNA, 1179 bp, Pseudomonas aeruginosa
atgagaatgggtagtttgtactttgcatccgataaagcgatctacgatgcgctcacgcaacgaagcctgacgagcgccgagctcaggaaggtcttcctctccagggggatcgtgatctccaatgaatcggacaagaaattcctagctagccgattcagcgccctgttccatgactactacgactatcggaacctgtctctcctggttgggggacgcgacagccgtgagaaaaccaccaatgtggttgttacgacagcagtttctaaagacaagctgactgacgcactcacctccgtcaaggaatggctggtggatgatcagcatgagcaggctgaggtggccgtccacggtgatcagctcaagctcactgtcaaataccagaagcttgatctgagtcaggcggagttccgtcaggtggttgagaagacggcggaggtcatcctggagaagcaaggtagtggatggaagattactggccccatgaatgaaaagttcaaggacatcaccgatcagttgtattcccagctcgagatcatgatcgatcaggaagtggttacccgaaccatctccttggaggcagtccctgatgccagcatcagaacgaatttccttcgcagcctgatccgtaatctcaaggacatggaggtggtcgatgtggtcgacgtctccacgttcaaccctaaagatcgagaagatgatgacctggatctcagcgacgatgcgttggtgattgaggattcgattgaggttgaagatgaaaacgacggtgaggagggggaggatggtgaccccgaggtcgaactagccaggccgcagccagaagccaggactcacaagatcatacgcatcgacagggcctccctaaagggtaagggtgtcttggaatcgaagcagttgagtgagctcgagggccatgggttctatctgtggaagattcgatggactgcccgtgagaaactcatagggtctgagatcgttcagtttgaggctcagtttggtaaccaggccaagtactgcgatttctcctacatcgtcaaaggtgtctacaactaccacaatgggaaatattcaaagagcctggtacgtgctgctccggtcgttgagcagaagctcaagatccgcttggaagaggcggcgcagaagaccctggatgacatcgaaaggggtttgaggacatga

SEQ ID NO: 342296 - DNA, 1044 bp, Pseudomonas aeruginosa
atgtcaggcggcgaaaccgaaaaaattgcgagactcgcggagcttgtttctaacgacatcttcagcttcttcaggtggaagagagaagggccagccaatctcaactttgcttgtgtgaagaaggagactcacgcgcccctgaagaagtcggagcacacgcatccggctgacgtagtgttcaaatactcagatccttacctcaacaaaagcatctaccttcatactgacttgaaaagctactcggttggctccatcaaccttggctcgatcaaaaaggccttgaagtccctgggcaagaccatcgactgcgctcgtgtgtcgcccgagtggcaggctcgttaccacctggctaagcgtgagaagtttgaaattcgtggaatgctgttcgtgtataatcacgacgacgagtacgacaagaatttctacgaccatttcagtgattacaagggtgagaatctgcatattaaagactctcagcaggttcatatcgtcgaaccttcattgatcaattacctgaaaacgctgcagctcgatgtaaacactctaagggcggaagggaaattcccgaaggagaattacaccttctattaccccgaccttatattgcacaaggcctgtggggagtactgggagcgtgcggccaccgctgagctaatcgcctcgccgtatatgatcattcaccacaaagaggtgatgtcgtactgtgagaaagctaaagacgtgactgaaacttatagcgaaggctatctgatctattatcgccgcgatggcagcactgagatcgagttcaggtacctctttgacgcgctatccagattccagatccttaacgctaacaaagacttgaaaattcggatcagggtcgctaatcgccaccatcacagcagcatcatcagcaatttcaatgctgccattaacagctatgtggctgagtggggcgaagacgaaaaccgcaaacggaaactgcaggcgatcgaactagacatcgtgaatcacgctattcctaactacaagcccgaagttattggatgggagcgagactga

SEQ ID NO: 342297 - DNA, 1434 bp, Pseudomonas aeruginosa
atgtcaaaggaaatcctcgaggaactcgaagattggaagcttgaagcaaagcttgagcaaagcgggcgttacttctatcacacccgcgtggtggaacgcatcgcgagaggtaagaagtgttatgtaatcggaaggaaaggtactggtaaaacagctatcggcgagcaccttgcgcacctgaaagaaaaagaatatttcgccagcaaactaaccttcaaaaactttccttttaatattttatattcacagagagatgagtcttatactaggccaaaccagtacatatcgatctggaaatatctaatttatatctctgtttgcaagctttttgagcaaaatgccgatgtaggtatagagacaagactgaagttaagagagctctttaatcaagatattgaaaatgcccttccaaatgcagttacagaatggacgggctggaagtttgatctaaaaattctaggaagcggcttgggctttggagctgataagggtaaaaaagaaaaagccgaagttagcatttccgagcgaaatgaaatactagaaaactttattcgcggtcagctcggaaagtctacgtacgtgattctttttgatgaattggacgaagattacaagaacatgctggcgaaagaaaactttgagaactatacagagctacttactagcttgtttaaggctgttcaggatgtgcgggcacgcttcagcactttcaggctatacccggtcgtattccttagggatgacatctatgacatcctccaagacccagataaaacaaaatgggaggactacagggtcaacctagactggagtagagagtcgcttcagcagttgttggctttccggatttctcgcgcaattaaccctaccggcagagtattaccctttgcagatgcgtggggagctgtttttaccggaggcaaggtgcggtatggacaaaacaaccagacccagaccacaagctttgattatataacgcgaagcacacagaaccgccctcgagactatataagatatatccaggtgtgcgccgagcgctcactagagaaaaacaatgaaaccataactccggatgtggtaaaggcacaagataaagcattttccaactacttgaaatcggagcttcaagatgaaattcatggcgctattccagaaatcaaggatgtctttacaatatttactgagctaaggaagcagaccctaagcataggggaattcaaggagcagtacaacttagcggttaaatcgggaagactccctaaaagagacgtttcctttattcttgagatactatttatgttctcggtaattggtaatgtgccgaagcaatcaacctttcaggtctttaagtatacaaacccagatgcgcgattaaattttaatgaaaaaatatgtgtgcatcgtggtctttttaaggcattgcaaattctataa

SEQ ID NO: 342298 - DNA, 3189 bp, Pseudomonas aeruginosa
atgaatttctcccaattcttcatccagcggccgatcttcgccgcggtgctgtcgctgctgatcctgattggcggcgccatctccctgttccagctacccatcagcgaatacccggaagtggtgccgccgaccgtcgtggtccgcgccaacttccccggcgccaacccgaaagtcatcggcgagaccgtcgcctctcccttggaacaggcgatcaccggggtggagaacatgctctacatgtcctcccagtcgacctccgacggcaagctgaccctgaccatcaccttcgccctcggcaccgacctggacaacgcccaggtgcaggtgcagaaccgcgtcacccggaccgagccgaagctcccggaagaagtgacccggctcggcatcaccgtcgacaaggcctcgcccgacctgaccatggtcgtgcacctgacctcgccggataaccgctacgacatgctctacctgtcgaactacgcggtgctcaacgtgaaggacgaactggcccgcctcgacggcgtcggcgacgtccagttgttcggcctcggtgactattcgctgcgcgtctggctggacccgaacaaggtcgcctcgcgcaacctcaccgccaccgacgtggtcaacgccatccgcgagcagaaccgccaggtcgccgccggcaccctgggcgcgccgccggcgccgagcgacaccagcttccagttgtcgatcaacacccagggtcgcctggtcaccgaggaagagttcgagaacatcatcatccgcgccggcgccaacggcgagatcacccgtctgcgcgacatcgcccgggtcgagctgggctccaaccaatacgccctgcgctcgctgctgaacaacaagccggcggtggcgatcccgatcttccagcgtcccggctcgaacgccatcgagatctccaacctggtgcgggagaagatggccgagctgaagcacagcttcccgcaaggcatggactactccatcgtctacgacccgaccatcttcgtccgcggctccatcgaggcggtggtgcacaccctgttcgaagccctggtgctggtggtgctggtggtgatcctgttcctgcagacctggcgcgcctcgatcatcccgctggccgcggtgccggtgtcgctgatcggcaccttcgcggtgatgcacatgctcggcttctcgctcaacgcgctgtcgctgttcggcctggtgctggccatcggcatcgtggtggacgacgccatcgtggtggtggagaacgtcgagcgcaacatcggcctcggcctcaagccggtggaagccaccaagcgtgccatgcgcgaggtgaccgggccgatcatcgccacggcgctggtgctctgcgcggtgttcatcccgaccgcgttcatctccggcctcaccgggcagttctaccgccagttcgccctgaccatcgcgatctccacggtgatctcggcgttcaactcgctgaccctgtcgccggcgctggcggcggtcctgctcaagggccaccacgagccgaaggaccgcttctcggtgttcctcgacaagctcctcggcagttggctgttccgtccgttcaaccgtttcttcgaccgcgccagccatggctacgtcggcacggtgaaccgggtcctgcgcggcagctcgatcgccctgctggtctacggcgggctgatggtgctgacctacttcggcttctccagcacgccgaccggtttcgtcccgcagcaggacaagcagtacctggtggccttcgcccagttgcccgacgcggccagcctggaccgtaccgaggcggtgatcaagcagatgtccgagatcgccctggcgcagcccggcgtggcggactcggtggccttccccggcctgtcgatcaacggcttcaccaacagcccgaacagcggcatcgtgttcaccccgctgaagccgttcgacgagcgcaaggacccgagccagtcggccggggccatcgccgccgcgctgaacgccaagtacgccgagatccaggacgcctacatcgcgatcttcccgccgccgccggtacaggggctggggaccatcggcggcttccgcctgcagatcgaggaccgtggcaaccagggctacgaggagctgttcaagcagacccagaacatcatcaccaaggcccgtgcgctgcctgagctggaacccagctcggtgttctccagctaccaggtcaacgtgccgcagatcgacgccgacatcgaccgcgagaaggccaagacccacggcgtggccatcagcgacatcttcgacaccctgcaggtctacctcggctcgctgtacgcgaacgacttcaaccgcttcggccgtacctaccaggtcaacgtccaggccgagcagcagttccgcctcgaacccgagcagatcggccagttgaaggtgcgcaacaaccttggcgagatggtcccgctggcgtccttcatcaaggtcagcgacacctccggtccggaccgtgtgatgcactacaacggcttcatcaccgccgaactcaacggcgccccggccgcgggctacagctccggccaggcgcaggcggcgatcgagaagctgctgaaggaggaactgcccaacggcatgacctacgagtggaccgagctgacctaccagcagatcctcgccggcaataccgcgctgttcgtcttcccgctctgcgtgctgctggccttcctcgtgctggccgcccagtacgagagctggagcctgccgctggcggtgatcctgatcgtgccgatgaccctgctgtcggcgatcaccggggtgatcctggccggcagcgacaacaacatctttacccagatcggcctgatcgttctggtggggctggcgtgcaagaacgcgatcctgatcgtcgagttcgccaaggacaagcaggaggaaggcatggaccgcgtcgccgcggtgctggaagcctgccgcctgcgcctgcggccgatcctgatgacgtccatcgccttcatcatgggcgtggtgccgctggtgatctccaccggcgccggcgccgagatgcgccatgcgatgggcgtggcggtgttctccgggatgatcggggtgaccttcttcggcctgctgctgacgccggtgttctacgtcctcatccgccgcttcgtggagaaccgcgaagcgcgccgcgccgccaacgacaaaggcctgccagaggtgcatgcatga

SEQ ID NO: 342299 - DNA, 687 bp, Pseudomonas aeruginosa
atgtgtggacgactcagccaatattccggcctgcatgaattcgtgtcggtcttgaacctaccgaacatgctaaccaacctagtaggagaacagccgcagcgctacaacgtagcgccatcgacccaagtgacaacactccgactcgaaggggacgccctggtcgtccaggcgatcagatggggatggaggccgttctgggcccgtgatcgcgcggcgccgatcaacgccagggtcgagaaagtggcgcatggacgcttcttcagcgcagcttggcgccatcgcgcgctttgccccgtttcaggctggttcgagtgggtgaccgagggcgggccgcggaaacagccgtaccacatccagcacgccgaaggctcgccgatcctctgcgcagcaatcggccagttccccaggctcgatggcgcgcaggacgagcggtatggtttcgtgatcattaccgcggacgccgagggcggtatggtcgatattcacgaccggcgtcccgtcgtgctgtcgcccgacctggcccgcgaatggctagatccggcgacaccgccagagcgtgcggagcagatcgtattgctgcatggcgagccgagcgaggcgttcacttggtacgcggtcgacccagcagttgggaacgtccgaaaccagggaccgcagttgatagagcctcagcgctccgcctcatag

SEQ ID NO: 342300 - DNA, 1293 bp, Pseudomonas aeruginosa
atggaaacgtcgactctgccgctattcagcgccgtggaggaagccagcttgtttcacgagcaggcacgtactgggtacttttctctgttggtccagcagcgaagcaaaatggcccaatcgtcccatccactgtcaaaaatggacaagattttgccccttgtagacccgctacgcgacacatggatatctcaggctgagttcattcgccctaatcgtcgagtcgtcaatctagctcgaataggtctactgttcgcggacttggatacgtaccgactatcgtggtccgtcggcaggacacccgagcaactagcagagagcgttttgtactactgcaggttggaaggcatccccgcaccctccctactgatctatagcggccgcggtatccaagcgaaatggctgctcgacggcgcgttaccgaggcacgccttaccacgctggaacgcctgccagcgctacctagtagatagactgaccagcctcggggccgatctccaggccaaggacgcttcacgtgtactgcgattggtcgatacggtgaacaccaaatccggcaacgtgtgccgcgtcgtccacgttgagactaaccaacgtggcgagccggcctgctacagcttcgagtatctggcggaagtactgctaccggtggccagatggaccattgaacaacaacgccgtgagcggaaggagcgccaacagctcaaggtattgctcggcggcaaatacaacaatctacgcagcttctccagccgacagctcgcatggcaccggctcgaagatctacgcacgttggccgttctgcgcggcggcgtcagggagggtgagcggatgaaacacctattctggcgtctgaatttcctgctgctatccggcgcaacgcacagcagtcagatgttccacgaatcagcggcactagcattcgagctagacccgtcttggtcatatagctctagggagttgatgacactctatagcaaggccaaggagtacgaggccggaaagaggatcacgctgggcggcaagaattttgcgcctctgtacacgccgaaaaatgacaccctcatcaacctgtatcaaatcacatccgatgagcagcggcatctgaggaccatcatagactcggggattgctgcagaacgccatcggaagcgtgagacagtccgaaggcgggccgccggcgccgtagatagggaaacctatgaaaacggctccttgaatcggcagaaaccctgggaaacctttggaatgagccgagcaagctggtatcgagcaggcaagcccaccaacctataa

SEQ ID NO: 342301 - DNA, 216 bp, Pseudomonas aeruginosa
atgccgttcgtcgttatcccccagcccttcccgaccagcccgctgcagacgcagttcgacaccgaggatgaggcgaacgctcgggcccaggcgatggtcgaggcctcgccgaagcagccggtctacgttgctgaactgcgcacgctctaccaaggctcggtcaccgtcagtgcgtcgccagcggtgagccaaccgaaggggcctgaacagggctga

SEQ ID NO: 342302 - DNA, 168 bp, Pseudomonas aeruginosa
atgcaagcagaacagcagattgttttgaagtgcctggactcgatggcgttgtccttggctgaccacggccatcactggaccaccgaacagcgccaggcatacgaggcgagcgtggcctacctcacttctgacggttgtaaggagactgattcgtcggtttcaggctga

SEQ ID NO: 342303 - DNA, 204 bp, Pseudomonas aeruginosa
atggcgaagcaacccgagaatgcagggaaggcttggacgaaggccgatgtcgatgcgctcaagaagctagcgaaggaaaatacccctacccgcgtgataggcctcaagctgggacggtctgaggattcgatctacgccaaagccgcagaggaaaagatcagcctgaaaccgacgaatcagtctccttacaaccgtcagaagtga

SEQ ID NO: 342304 - DNA, 462 bp, Pseudomonas aeruginosa
atggcaggtctttcctggtcgcagatatcgaaatacgaatctggaaagtccaagccgagaaaaaaggcgctgtgggcactcgaggaggctctaggctgccctggcgagttggccgccttcgctgagggaaccaaaatcgctgttgaggtgcctgccggactatatgagcggctggagcaagctgctgccgaagcgcagttgtccattgatgaatacaagcatttctttctcgcgcgactgatcgcctggtcacacgacgagattcttggcatccgccctcctacccttttttccaaggaagagattgagcagatgcaaagccggatggatccaggtgaggctgacagtcagagagagaagcgtctcaagcaaatcaaagatggctcggacgatgagagcatgatcctcgccgagcttgaggagcgaaaaattttcgacggccgctcaacgaaaaataagtaa

SEQ ID NO: 342305 - DNA, 168 bp, Pseudomonas aeruginosa
atgggaagcgagaaaatcactacggcggtacggatgctttgcactctgcggcaaaagctggagcagcgcgcggaggagaacggtcgcagcctgagcggcgagatcgtttttcgtctgaggaagtccttggagcaggagatgcaggatgggcaaaaacagcgggcatga

SEQ ID NO: 342306 - DNA, 1878 bp, Pseudomonas aeruginosa
atggatacttctggaaatactttgctggagtctgactgggatgcagatcaactccgagtgatcgaggaggatgcagattcacggctgatcgttgaggcgggcccaggaaccggaaagacggccgtcgcgtgcgcccgccttgcctatatgatcaatgaagaggacatcgagcccagcaatacatggatgatcagtttcacgaggaccgcagtagcagaaatccgtgcacgactacattcgtacgtcggtgatgcgtcttttgctatccggattgcgaccatcgattcgcatgcatggtccatccactccgggcatgatccgaatgccagtctgaccggctcgtacgaagagaatattacgcgagtcattgagctgttgaagaacgacgaggatgtagcagatgagctgctgcagatcgagcacgtcgttattgatgaagcgcaggatctcgtcggacagcgagcggacctgatcgaggctctagtggggcggctgccgtcggactgtggtatcacggtgttcgccgatgaggcccaggcaatctatggcttctctgaaaacagtatcgggagtcacagaaaagaggcaggctgcaaagctgatttgcccttgcttgatcgtttgcaggctggagaaaaattggggttcactacgctggccctgaaggagatctatcgcacgtcctctcccggtcttaagaagatcttttcggagttgcggcaggacattctcgacaaacaaaagcacggcagcggattgcacgccgagacggcgcaaagaattcgagagctggccgacgagagcggattaaaatggactgacatgaaggttgctaactttaccagcgacgaccttctgcttttcagaacacgtgccgaagtgctcatggcgtctcagttctgtgatcttccccatcggttgcgcgtgtcagggtatggcgcaaccctgcccgcatggctggcgatctgtttctcggactttgtcgaactgttcctcgtagagcggcactttttcgacctttgggcggcgcgtatagaaaacaaggtttcgcctccgtatgggcctgctgaggcttggcagcatctcatgcgcgttgctgggcgccaggatggttccatcgatatgcagaggctcaggcggcggttgggtcagactcgccccccggtcgagctaactctcccagaatatggtctgcatggaccgatagttgggactattcacgcgagcaaaggacgcgaggcgagcaacgttgttctcatcctgccgagcgtttcggaattcgagagcgtcgaggatgagattgaagaggctcgcgtactctttgtcggcgccacgcgcgcgcgcgcatctctaatcgtcggagagcgtagtccctttagagcatcaaccttggcatcaggtagggctcatcgctcaaccaagaaaggccaatcaacgatggtcgagattggtcgtagcggtgatatcacagcacgtggtcttgtaggtcacagcgagtttcgcgaagccgatgctttggcaggacaggcttttctgaccaaagtcgtcgatgtagtcaccacctacaagctggaagccgatcccgacctggattggcgctacaggatatatgccggcaacgagaggctctgcgttggtgtgctatcgcgcaaactcacgtacgacctctgggagatactcgagaacaggaaccagaagcgtagccacaagcctccaacctatgtgaatcatgtgagaggtcaggggtgtgcaacgatcgtactaagcccggatgacaatgagcttgagacacttaatgagccctgggcttcttccggtttcgtcctgtcacctagagttgcggcgttccctcccttcacctttttcggtcggagatag

SEQ ID NO: 342307 - DNA, 3192 bp, Pseudomonas aeruginosa
atgcaggataaatcactcgacagggatatcgtcgcctgtcggctctttgaggacctgatcggaccacgtgtagagaatgaggagctgaccgcgcgcccatccgatgtctatctcaccggcatcctttggccccagcgcacggcgatggcgggggaggacgatgatcgcctcggaaccgcgggggcgagttcggtagaggacagcgacagtgagagcgatgcagtcagaaccggatcgatccagaaaccgtctgtagcaggcatatcgttcagcgctacatcctccgccgtaccgcaagtacaggttatctgcagctttgctacgtaccggatagaacaacgtgacggtggtgacatctggattcgccagccgcacagaatagaaatcccggtccttgacctgtcagccggaccgcctcgccagattgcgcttgcggtacacggtaaaggactccccaacgtttcacttagtgtccgatgcatcaatgctggcggggctgttctggtcactctttcgctcgtgaattcgatagttccagagcaaagccgaaacgagattgaggccgcgtcgcttttccagacatcgcttcgcgtccagccttgcaaaggcacattgctggttccgaaacctccccgtcgggggttgtcgagacaccaagatgaagccaatgggagcgccgcgatcagcgatgaggaaagcggggctctgctgtatagaaatgtggcagagtttgctgttgggcatgtctgctccgccgaatgggaatcctccgaacaggtggcaggggctctctccactgcgcgttgggtcgggacgacatggctgccatcagccattgttgagggcgttgacccgaatggtcatgtttttttctctgagctgggcaatgagagcggcgcgctcgatcctctctcggccgaggcattggccttggccgatacagcgtctctccaacaggccctgcagcttttctgcgacgcctacgatcgctgggtacagttgcagctgaagcggcttgatgacatggcagacgtgagccgtgagcttaagtacatcgctgagatgcacctagtccgctgcgaagaggcgctcggacgtatgcgggcctcagtccttgaacttctcacgaatccgcggctccggcgtgcctttcagctggcgaacttcgccatgcacctgcagcactcatgggacagttccaagagccgccacggtcctctgcgttggagaccgttccagctgggattcctgctgctgagcgctccgtcatcagtggcgcgtgaccacgagcatagaggtgtcatggacctcctatggttccccactggtggaggcaagaccgaagcataccttgcgctgatcgcatgcatcgccgtctatcgccgcctctccgatgatccgaatgaccacgggggtgtctgcgccttgatgcgctacacacttcgcttgctgaccacccagcaatttgcacggtctgccgcaatgatagtggccttggaagcgatacgctccgggagagtatcttctcccgctggcctgccgttgcaaggggatgagccgttttcgatcgggctgtgggtgggcggagacgctacaccgaacaagcgtgcggttgccttcgcctcacttcaaggggctttggaggtttcatctccaaagcagctctcccggtgcccggtctgtggcgagaaactgaaatggtcgatggcaagcgcgatctcacctgttgatgttgaatgcacgaacaggtcatgcaagatgtgcggggttttgcccgtcttcaccgtcgacgaggatgtctacgacaaccggccgaccctgcttataggaacggctgacaagtttgcccaggtcatccgcgagaaaagaaccaacagcctatttggtgtttgggacggcgctccgcctgatcttatcatccaagatgagctgcacctcatctcgggtcccttggggacaatcgctggaacctatgaagcggcatttgacctgatgttcgccgcgcgcgggcatcgggcaaagattatcggctcgacagcgacgatccgcagagcgtcggagcaggtgttggctctttttgaccgcgaagcattccagttccctccgccagcgatcgatcacgacgactctggtttcgcggttcgtgatcgtcgaccgaaggcagtgggaaggcgatatctcggtgtcacgacggcgggtcgatcggcaaagtttaccctgcaggccgtcgcaggttccctgctgcaaactgcttttggggcattcagcgatgatgttcgtcgagacgcctactggacgctcgttgggtacttcaactcacttcgcgagcttggcggagcgctcgtcctcatgcaggacgacgtcaccgacagtattgcgctctacgctgatgctcgctccgaagaaagaaggcctctcagcaacgttgaggagctcacatcccggagaacacaggaagaaatccgcgggatgctcgaccttctcgacatcaaagtcgggcttccgggggctgtcgacgctgttcttgcgacaaatatggtcagcgtcggtgtggacatttcccgactgggtctcatgttggtcaatgggcaacccaagactatcgccgagtacatccagtcgactagccgggtcgggcggggagatgttagcggacttgttgtcccggtcctcaacaacgccaaggctcgtgatcgctcgcatttcgaaacgttctgcagctggcaccgcaccctttacagggacgtggaggcgactagcgttactcccttcgcatcacgggctcgcgaccgggcgctgcatgcggcgctggtggctgcagtacgtcatctcgtaccaggcatgctcgactctccacaaatggatgacgacgcagaggatctggcgatggatctcatcgaccggatcgtcgagcgtgcagatcggatcgatccagaagagatagctgttcgggaagagcttgaacgtcgtctcgacacatggagggcaagatcccctactgtctactggagcgactacaagggagggagatcccttcttcagagcgccgagcgtgcagccgctcgccgagctgctggccgcgataccggcgcagcttggccgaccctcaactccatgcggactgtagaggccggaacccctttcaggatggcccctgccctcagggtaaaggatgatacacatgaagaatga

SEQ ID NO: 342308 - DNA, 966 bp, Pseudomonas aeruginosa
atggaagaaatcattcgagtaatgtccgacggtcgagagattgaccggatcgtctgctcaaccaagctcgacgaaggcatgcctgcggtcaaatatcgcgagcaatattggcctgttgtcgatggttgcatccagctagataggcctgccaaccaggaatgtagctccgcagagtgggccgttctcatccagaatcttttaccgccagtgcttcctgatcaaacagattcctgcgagaaactgctgcaggactgctttaggggaagcctaccgcttggtataaccaaggctgtagcctctctggtggcgctgagattcgaacagcaagcccgcgagctgctggtggactttctcagagagcatcgcaacgctcaccggctgtttcgacttgtgcagatgcagctgctgttccgagaacgggcgggaaggactcaagacagcgctggtatcaccccctcctccgtggccgagctgcccccggaatcagcgcacctatccggagtagatatggattgggagtggtccgcgtctttagatgatccagaaatgccggatgtggacgacagttcactcagggctaccgctaccaatctgcaggaaagcatcggttcctaccgcgcaagagagtcaggcgcgcccatcccaggacttgaagatctgaccagtgaactagagaccttcataagtccgataccccccccgctcctgaacgagagtgcgctggtcgagcgaacctcgcagctgggcatgattgccctcgatcttctgagatatttttctgacaacccgggcgacagggccgtacatgcggaggcagtgctcggataccccatgacggaaattcgtcgccttttgctgggtactctcggacactaccttaagaaaacggactctggtggatgggaatgccatccatgggtcgagccagtactgtctgctctcaacgagaatcataaggtggggtga

SEQ ID NO: 342309 - DNA, 417 bp, Pseudomonas aeruginosa
atggagtccgacctgcgcagatacgtctacgcggctgagtatgccgagctttatgaagactctcccaaaggccaccacgacttcaatctcccggggctggaaccggaccacaagaactggaaaaccggcaagttcagcgatcgtttccgtgttcagcgcagagggattccgtccacgacaatcaccagccacattgcaaaggacggtcactatttcattcactacgacccaaggcagtgccgcagcctgaccgttcgcgaagcagcccggctacaaaccttcccggacaactatttctttctggggaaccgaacccaacagttccaccaggttggcaacgcggttcccccgcttctggcgaatcaaatcgccggcgtggtcgcccgtatcatcaacatgggaaaggcagctcgatag

SEQ ID NO: 342310 - DNA, 1491 bp, Pseudomonas aeruginosa
atgcaatcctccttcaaaagccgcagtgctcctcccaaggcaagcgccatggtcgaagcactacgtgggttgggatacaacacccagacagctctggcagacatcatcgacaacagcattgctgccggcgcgaacgaagtacatatcgaattcatctgggctgagcaggaaagccgtgtgctttgcctggacaacggttcggggatgactgcagacgaactcgatcgggccatgcgtctgggcgatcggaatcctctcgaggagagatcggcaggcgatctgggtcgtttcggcctcggcctaaagactgcgtccttttctcagtgccgaaggatgaccgttgccacacgtggccccgatggcctacagaccctccgctgggatctcgacttcctggccagcagtgccgacgacggctggcatttgctggagggcccccatcccggttcggaaggatttctggaacgcctcaccagcgcaacgggcaccctggttctctgggaagagctggatcgcatcgtcacgccagggactacagtgcaggactttctcaatctggtcgacaaagtcgaacagcacttgggaatggtgtttcacagatacctggaaggcaccaggcctcgactgcgaattctgttgaatggccagccggtcaaaccctgggatcccttcatgacggatcatcccggaaagccatataaccctccggtattcaaacaccccagccgcaaagatatcgaggccgagtgccacgttctgccgcacaaggacatgctctctcccggagacttcgagcgcctggcaggcccggaaggctggactgcacagcagggtttctacatctatcgaaacgaaagactgctggtggcaggcagctggctaggacttggtacaggacgttcatggactaaggatgaagctcatcgccttgcgcgaattcgcctcgacatacccaactccgtagatgcggactggaagatcgacatcaggaaatcaactgcacggccgccagtgtatctgcgggactggctgacaagacttgccgaggttacgcgcggccgcgcaagaagagcctttgcccatcgaggcaagccgaccatgctgggcagcagacagattgcagaggcctggaaggtcgaaagacttgcggacggtatgcgatatcggatcgacacggaacatccggcaataagagcggttctggatgatgccggcagccttctaccccagctaaaggcaatgctccgcgtgatcgaggagacggttccggttcagcgaatctggatagataccgccgaaaacaaggacaccccctgcacaggattcgacaagacgccgcctcaagaagtcagcgacatcatgatggtgatgtaccgcaacatgatcgaaagaaagggttattcccccagcgcagcaaaggagcagctgaagcaaatggagccgttccacgcataccctgccctaatcagggctttgccagacagtctttaa

SEQ ID NO: 342311 - DNA, 2844 bp, Pseudomonas aeruginosa
atgtctgaggaaaacaaatggagtgtggtcaagttcgttcaggaaatgctggctgatgaaaaggacaagtcggcgatcacccctcagctcatttcccagaagatcgacatggtgctgaagataatgccgggaaaggccgagggtctggatcgcgactcggtcacggaggagctgatcagacgcttcagtgtctgggttggggatgactcatccctgattgacaccactgggcatgagccttggcaaccaagcgatcggaaaaaggactggcgatactggcggcgctaccgtgagtggcaggagctgaaactgcccctcagcgccatggaagcactggacaagaccactgacaacgttctgtcgatgcttgaagacccaaagcgagatggtgcttgggatcgacgagggatggtggttggccatgtacagtcgggcaagaccggcaactacactggcctcatctgcaaggcagcagatgccggttacaagatcatcattgtgcttgcggggctgcacaacaacctgcgagcacagacccagatgcgtctggacgagggctttctgggctacgaaacaagtgccatcgaaggtgaaggaaacaaactcatcggggtcggcaaaatcgacccatctccggcactgcgcccccagtatgtgaccaacagaacggaaaccggcgacttcaacaccaagtttgcgaagaatctgggcgtatctccggagcagcgcccgtggctgtttgtcgtcaagaagaacaagacggttctgacgcggctgctcaactggatccagtcccatgtagccgaaaccaaggatccggaaagcggtcgcccgctcgttacacatctgccgttgctgataattgatgacgaggccgaccacgcatctgtcgacactggcgagaaggttgtcgacgaagacggcaaccccgatctggatcatgagccgacagccatcaacagcctgatccgccagattctccatgcgttctcaagaaaggcttatgtcggctataccgctaccccattcgccaacatctacattcacgagcatggtgaaaccgccaaggaaggcccggacctgttcccctccgccttcatcaccaatctctcggcgccgtccagctatgtagggccttcgagggtattcggactcgccgctgagagcggacgcacaggtgcactgaacctggtccgaatagttaaggatcagtgctcccaagacggcaagagtggctggatgccggtcagccacaaaagcagccatatcccactgcttgaaggtcaggacgcaatgcctgcctccctaatcgaggccgtacacgcattcgttctttcatgcgcgatcagaggccttcgtggacagggcccccagcacagctcgatgctgattcacgtaaccagattcaatcaggtgcagcagcatgtccaccgccaggttctgggctacgttcacggcctgaagcagcgattccggagacgcacggaccatctgagcgcattggccgaattgaggagcctctgggaaagagactttgtcagcaccagcctcgagatcgaagcccagatagaagaagagtcccgccacccttccacatcctggcaggacatcgaggctgtactgctggatgtgcttgatgaaatcgatgtgcgcatgatcaacggcaaggccacggatgctcttgactatgccgacagtgcaaccgggctgaaagtcatcgccatcggcggcgacaagcttgcccgggggctaaccctcgaaggactttgcaccagctacttcctgcgcgcatccaagatgtacgacaccctgatgcagatggggcgctggtttggttatcggccgggctacctcgatttgtgccgcctgtacacgaccaatgacttggtcgagtggttcgaacatattgccgacgccgctgaggagttgcgggccgagttcgacttcatgatggaaagcaggctgacgcccagagaatatggcctcaaggtgcgctctcacccagttcttatggtcacatcgccgctgaagatgcgcacggccaaaaccttgtatctctctttcagtggcgatgtagtcgagactgtaagcttttacaccgacaaggatattctggaaaagaatctgtcagctctcatggcccttgccgatgagcttggaagtccctcctcaatccccccgcagcagcgaaatggcaagaaggatagctggagcgggattcagtggcccgacgcaacagcgcaatcggttacgcgcttcctgcgtggttatcagacccatcccgactccagaaaggtaaagagtgatcttctggcagacttcattgaagaaatgagtttttccggggaactgacatcttggacggtggctgtcataggcggtgggacagagaagacactcgatatcgtcggcagtccagtcagaatgatgcagcgacagaacaaggcaaccgaaggagaaggcaaatactccatcggcagactgctatccccccaagacgaggccatggatcttgatgaggccggatggaacgcagcgcttgagttaaccaaacgggcctgggtgaaggacccgggacgatccagacgcaaagagccccccgagacccccaatggccctgcaatcaggcatgtaaaaggcctaggcgcagatgggataaaacctcgaccggataaagggctcctgatcatttcattactggatcccgaggactcaaaagtcaccggtgtaactacacctgtcgtggcatttgccatcagcttcccttccagcaatgccggcaaatccgtgccctatctagtcaccaatgtgctttgggagcagcagtatggctcaagtgagtga

SEQ ID NO: 342312 - DNA, 1017 bp, Pseudomonas aeruginosa
atggctcaagtgagtgacctcgaaattctgggagtctggagagcactgcccggcaacgccgccactcccggctggcgctcaatagatctggttcagcagacgggctcctgccgaatcaaggccgcccgacactcaccagataacgaggaagcggttctggttggatttgctactacaaaaatcgcaccggcgactcagcttccccaagggcagggcttccgtatggagcgagccacgctcggcgaaactggcggcaaccacagttggctcgccattgttcgtcagcccgcgggcagtcttgaactgtttgccaaggtagtctccgatatcgtgcacctgctccagtcattcagcgattctcccgaggaaacgctttatcagcgcttcctcgggcgggtgcggggctggcaggagttcatgcgtcagggacgagaaggcttgggcccagagaaggagctggggctggtcggagagctgcgatttctgaatcttctgctggatgcggggatccttcagtttacggcagtgaatgcatggaaaggtccgcatgacggattgcacgacttccagatcggacttggcagcgtggaaatcaagtcgacaatgattccggacggcttccctgttcggattggctcacttgagcagttggatgacactaactccccgcctctctttctggccgggcttcgattcagcgctcaggaggcgggtaaaacgctcactgagctcgttgatgcaactcggcagcgccttgacgctgaccccgccgcaatgcgcctttttgagctggctctccataaggccggatatctggacatgcacgcggcagtctatacacgtcgattcctgctggccgacacaaggttgcatctggtggacggggagtttcccaggctaacccccttcaacgtttcgtcggcaattcgccatgccgcatatgagctggatctttctctcgttacggcaaacaaccacacactggatgatgtactcgaacaattaggagtcgtttga

SEQ ID NO: 342313 - DNA, 1809 bp, Pseudomonas aeruginosa
atggaactcgtcgactttctgcgtgagacgcaggccgcgatccgcgatgaagttgaaaaagatataggcccaggggaagcccccattcctgctgaggccgtattcaccgagcatgtgatgacgcacatggctgacgagggaatcacctttgaaccaactgtctgccattacgaagcgaaggtaggtacgtacaaggtaaaaatcagcggctactccgtatccgacactactgatgattctggcaacccagaccgtctcgatctttttgtcagtctgtacaagggggtagatgagctagagccgcttccagattccgaagcaggaaaggctgccaaagaagggctgcagtttctgaggttctgcgcaacaggccagctatccggcaagctcgatgaaaccaacgatgcctatgcccttgttaccgaagtcgagcgcatcttcaagacgctggatagcatccgtattttcgtcatcacggatgccatagccaaaacgagaaactatgcaccgcaggaggtcgagggcaagcaggtccgcctagagatcatggacattcaacgcctcttcaaccactggcagcaggggcgtccgcgggatgaactggtagtgaacttcagggacatctgcgggactgcccttcctagcgtgtgggttcctggatccggtgacgatgagtatgactacgccctgacagccgtgcccggcgaggccctgcggttcctttacgaaaagtatggcccgcggatcctcgaagcaaacgtgcgctcctttctgggagttagcagcaagggagtcaataagggaatccgtgacagcctgcgcgaccaccctgaccgtttcatggcctataacaacggcatcgtcgttgttgccgaccaagccaagctcgacaccgcggcagatggctcgacaggcattctctggctccagggcatgcagatagtcaatggcggccagactactgcatccatctacttcgccaagaaaaagcatccggacatcgatcttacgagtgtgcgggttccagccaagatcatcgtgctacgctccggacaggctgacgatgaggaactgattgccaatatttcgcggtatgcgaacagtcagaacgttgtcaaacagtccgatctttccgccaacaagcccttccatcgcgagctggaaaaactgtccatgcgtacttactgccccgatggcgttggacgctggttctacgagcgctcagctggcagctacaaggtgatgctggagaaggaagcaactaccccaacgcagaagaaaaagctccaggcgacaattcccccttatcgcaaactcaccaagcccgacctagccaagtttctttttgcttgggatcagaagccacatatcgtcagtctcggcagtcagaaaaacttccaggcattcatggatgagttgatggaaagggaaagtgctggtgagaacgtgataccggatcaagagcagtacaaacagatgatcgcgaaggcaatcctgttcaagtcagctcacaagatcatccgccccatgttcccggcattccaagccaacatcacgtcctacacagtttcgattctagcgctcaagctgggagcgaccctcaatctgaaccgcatctggcaagaacaatcgatatcaccgcaacttcatcgccagatcgcgatatgggcggaagaggtcaatgacgcacttcatcgaggagccggcgggaaaatgatctccgagtgggccaagaaaatcgaatgctggtggagagtaagggacacctcctactcttctgagctaggtgatatcaccgaattatcctaa

SEQ ID NO: 342314 - DNA, 270 bp, Pseudomonas aeruginosa
  misc_feature (26)..(26): n is a, c, g, or t
atgctcgggttgcgcgacgcggtgcncagcggctggttcaaccaggagaccgacgagctgttcagcggctttccgatttccgccgaggacaccgtgctcgacgtggggtgcggcgacgggctgggcggcggggctgggcggcgagacgatcttcttgaggaagttcagcatgaggtggctccggaagtggtggcgacgcggcgggcggcgctcaggcgcttgaccaggcgggagcccaggtcgcggcaggggctctcgacgaagcggtag

SEQ ID NO: 342315 - DNA, 198 bp, Pseudomonas aeruginosa
atggtccatttttcaacgctggttctgaccatgagctttcctcaacgcctggccgccctgcgcaaagaacgcgggctgacgcagcaacaaatggccgacaccatcggcgtgcatatttcccagcttcgccgttacgagggaaataccactcagcccaccatcgaggttttaggcggatcgttctggcgcttaatgtga

SEQ ID NO: 342316 - DNA, 198 bp, Pseudomonas aeruginosa
atgctgctattcgatgaagacgaacgagggccggatgatcggctgaaacttcagttcgaagctgtttccaagcttgacgacaaagaacgcgaagccttggaaaccgtgattgccagtgtgctgcacatgcacgacgccaagcgctggacccagccgaccagaacagcaaagaacgaaccggaaacccgctcagactaa

SEQ ID NO: 342317 - DNA, 225 bp, Pseudomonas aeruginosa
atggctaaggccgatcatacgtcaccatcgccaatcactgaacgctggttgaaaatcgccgccgatttctacccggccaacgacaaggataatgactacgccaccgcccggcccgtgccctggatcaggctacgggggctgtggttgcggcaggcgggggttgaggtgaatgagaacgttaaagttcgggtgatgaaggggtgtttggtgattacggcggagtga

SEQ ID NO: 342318 - DNA, 1443 bp, Pseudomonas aeruginosa
atgcgagcagtaactcttaactacctgtccaccagttccgggacagaccagtttccctgggactggtgggtggggcacaaacctgagtgccgggtggcgcagcgtgacaacgtagaccgtcaccctgggctgatgctgcaatccgagagtcccggtctcgctgggcttatcctcagttgcccgaaatgcggtgcacgccggtcaatggacggggttttctcaaagaagacctgggagcatgggccgaaatgtcgggggtatcgaccatggctggccgacggcgatgaagtctgtggtaaggaacagaacgcggtccagcgcggcgcgtccaacctgtactttgcggtgacggagtcagcactcagcatcccgccgtggtccgaccgtcttcaggaagtcttgggcgattggtggagctctctcacgaatctcgatgatttatcaaggttggaggactacatcggctttcttgcgaaaggtgatctggaaaacattttgaaggatctggaaatgtcgccagcggacctggcagaggcgatcagaaaccgccttgcatcgtatgggcagctccgaaccgacgatttgcgcccggcagaatatcgacagttcgtcaccgagccaggtcgtagtcggactccagacatcgacttcgaaacccgaagagaaatcgtatctccggaaatcgctccatggatctttcgagttgtacgagcggtccgtcttcgggaagttcgcgccatcaaaggattcacccggatcaatccgcctggcgatcccgactcgcccgaggtagcgcggctttcaaaggagccacttgaatggctccctgccatcgacgtccgcggcgagggcatctttctcgctttaaacgaagagcggctatcaatttgggaaaaccgtcctgatgttattgcacgtgcctccgagtgtgagattcggcgtcaggcggactggaaggaacggtacggcgacgacaccaagccgttgcaagcgatcacccctcgatacatgctctgccacacgcttgcgcatgcactcatgcgccaacttacgctggaaagtggatactcctcagcgtcccttcaagagaggatctatgccgggagtggcgatgagcagatggccgggcttctgatttatacggcgacaccggattcggacggaacgcttggcggacttcagcggcagggaaagacagggcgcatagagggcattcttcagcgcgcgattgacgcgatcgagtggtgttcatccgacccgctttgcatcacggacatgatggcagcgatcaacagttactcgcactcagtgtgccatgcttgctgtcttgctccagagacatcatgcgaagctttcaacagcttcttagaccgtgcccttttgatcggtgacggtacaggctctggactcggatatttcgaagacatgcttaggagagactga

SEQ ID NO: 342319 - DNA, 1689 bp, Pseudomonas aeruginosa
atggcagtactctggccaaggaaactgccacgatcggtactggatgacccgaggcgccgcgctgaggttcgcgtatacaaccgcctggcagaggttctcaacgatacctttcatgtcttctactcgagtccttggctgggtaccgacaggctggggaacgagaaagatggcgaatgcgactttctcgttgcacatcctgatcacggtatccttgcgattgaggtcaaaggggggaaggagatttccttcgatccaaaggactctcagtggcgcagcactgaccacggcaattttgtccacaagatcaaggatccagtagcgcaggcgcgaggcgctaagcatgagattctcagccgtcttaataggtcagccagatggccaaagcgtttcatacatgccgctcatggtgtgatcttcccgagtgccggttctccccgaggcgacctcggagctgatcgcccggcctgggtgttctgctgctcacttcagtttgagcagaggctgggcgaatggatcgccgaccgtttgaaggcgggacatcggcctaacaactgccaaccgcttggtcgtgacggcattgcggcgctggaaagaatactggcgcaccccttcacccttagtttccggattggggctgctctagcggaagccgatacggagtttcgcgtccttgaaccgtcccagtaccatgtattggatatcatccgtgatataccgagagctctaatccggggtggggcggggactggcaagactgtggtggcgatcgaggaagcgctcaggtccgccgcagcaggtcgcaggactctactgacttgtcatagtcgcccgttggcaacaaaccttgagcgaaaactgaaagacgttgaaaatctaacagttgctggatttcatgcgttgtgcgggcgcatctcgcgtcaggcggggatcccgataccgtccgatacctgtgagcaggatctctacgacagtgccctaccaaacgcgctctattgtgcgatggagatccagcctgcgctaaagtgggacaccattattgtcgatgaaggccaggatttccgtgctgaatggtgggtcgcgatcgacgcctgtctcactagcagtggaagtcttcgcgttttcttggatagcaatcagaaagtttacgacagcgccgggaatggtgttcatgatctgagcgtggtcccggttaggctttctcgaaatcttcgcaacacgaagaacatccaccaggccgcttcgacacattattcgggccccgagataatcgccgatgggcccgatggtctcgaggtctcttggctcaacgctgatagtcctgattcgaaaatcgctgctgcctacagagagcttcgacgactcgtacataacgaggaagtagctcctggtgacattgcagtccttgtcaatgggcctctggcccggacaagcttcctcgaaaaaagtagtggaacaaatattccgtttacagacgccgaatccatggtactcgaagacgtggtcgtagatacagtacggcggttcaaggggctggagcggtcggcagtaattctcatcgtcagcggcgaggaaatggagcagcgtgagcttgcctatgtcgcgctttcaagagctcgggcctacttgtgtattgtgtgttccgaagatgatgagcgatggctttcaggcaaggaaaatcgcgacacttga

SEQ ID NO: 342320 - DNA, 264 bp, Pseudomonas aeruginosa
atgcgttgcctgggcctgctgatcataagttcgcagttgatcggcatgctggcggcttcgacgcagggcgatgcggacgccaagagcttgcagacgggagcctgggtggcggggaatgccacccaacacaactacctcagtcattggcaggaggagaagaagcggcaggaggtcgatggctgcaaggacaaaccgctctgcaaaaccggaatagaagccgagcataaaggggacagatttattttccctactctaattctctga

SEQ ID NO: 342321 - DNA, 702 bp, Pseudomonas aeruginosa
atgcctaggcaagggcgagtggttttaccgaattatccgcttcacgtggtccagcggggacacaatcggcaagtggtattcgccgaggacgaggactaccagcgttacctctccgatctacgggacctcaaggatgcctttggtatcaaggtctacgcattttgcctgatgaccaaccatgtccatctgctcttggcgcctggtgattcgctgtctggcttggcgcaactgatgaaaacgctggcggcgcgcacgacacgatatcggaatcgcttggagggccgttccggaacgttgtgggaaagtcgctataaatcgagtgtcgtacagagcgatgtctacctgctggcgtgttgccggtacatcgaactgaaccctgttcgggcgcggatggtggacgatgtggcggcctatccctggtcaagttatgggctgcgggcggattggttgaaggagccaaactggttggatatggatccctgcttcattgagctaggtcagacggccgaagagagatatcggcgatacgtaacgttcatgaaagaggcgataccggccgaggaattgaggctgattcgcgaggcggttcagcgtggacaactgacgggcaatcaacggttcgtggacgagatcgagcgggtagccggggtgagaatagagcggcgtgggcaagggcggccgagattagagcagggaaaataa

SEQ ID NO: 342322 - DNA, 405 bp, Pseudomonas aeruginosa
gtggtcgccgacgaggtgcgcaacctggcccatcgcgcccaggaatcggcccagcagatccagaagatgatcgaagagctgcaagtcggcgcccgcgaggcggtggccaccatgaccgagagccagcgttacagcctggagagcgtggagatcgccaaccgtgccggcgaaagcctgagcagcgtgacccggcggatcggcgagatcgacgggatgaaccaatcggtggccaccgccaccgaggagcagaccgcggtggtcgattcgctgaacatggacatcaccgagatcaacaccctcaaccaggaaggcgtggagaacctccaggccaccctgcgcgcctgcggcgagctggaaacccaggccgggcgcctgcgccaactggtggacagcttcaagatctga

SEQ ID NO: 342323 - DNA, 528 bp, Pseudomonas aeruginosa
atgaccatagacatcaaacacaagcactccggccacgtcatcatcatcgaaggtcacgccttcaaagcgaacgaccggggcgaatgggacctaactgacatctggcgaaccctgaagctgcccaaggcgaaaggtccgggcaagtgggcaggccggaaagaggcacagagattcatagcttcccagaaaatggaaagctcgaacggcactggcacatgggcgactaagcaggcatccctgcgctatgccgcatgggtctccgaaggattcgaggatatggtatatgacgccttcgaggcgatccttgagatgcccgaggtggcctcactggtggccgacaagatggcctcactgggcaatgaccatagtgcagacatcctcaagcgcatgaccttcaacgacaagtgcgattggaaggccctcaaggctccccacaagaatactcaaaggggactcatggctgcagtcagacgaggtcatttgacattacggcgcgctggtgagcttggacttagacctgcccactga

SEQ ID NO: 342324 - DNA, 309 bp, Pseudomonas aeruginosa
atgaccatgaataacgcatacacctttcagaacatccccaaggctctccatggctttcaatcgaccgttaacggcctgcccggtttgtcgtacatcgagatcgccgagatcacctctaaggaccttgatggagttcgccgggaggtctcagagatgctcagggatatcggctcagatcaagcgccggtgatgctctttgataagacgctggctccccccttcctgattagccaatcaaggaagctgccttacagccaggcgtacctaatcgtatgccgactatgccaactgggatgggaggataagtaa

SEQ ID NO: 342325 - DNA, 1041 bp, Pseudomonas aeruginosa
atgagcgaacgagacaaccttctcctttccgtagccaacacaatcaaaagttaccgaaacgatgagttgccggagccaacaccagaccacgtagatcgctggcttcgccaattcacccccgaccaccagctctcatttatacgtgaattcgaccatgttatgaaacacagcttcattactcaggataatatcgaaaccttcctgaagaatctcgttcgcaatgaaaagcttgcgggtgcggatcctgcctctttttggtcagctgcaaaatttttgaatgtccagcaaaatggtcatagtcaaaaggaaatgctgaaactttttgagaagtgcttaaaagctgagtgcaatgttgatcttgctaattgtgggaggcagggcggagattatatttaccttgatgatgttatgtttagtggtagcagggtcgggaacgatctcgaagaatggatctcaactgaggctccgcaactcgctaaggtgcatgttatcgtggtgggtatgtatacgggcggaatatactttgcgcgaaagagactcggcgaggtaattgcgaagtctggtaagacaatctcaatcgagtattggcgcgcagtagagttggagaatcgcaaggcttggaagagcaagtccagcgtcctctggccctcgtctataccggagacgaaagaagtgcaagcctttatggccctgcctaccaaatatccctttgagcctcgtcaagaaggcccggtggtataccctttttcatcggaggctggacggcaagtgctggagagtgagtttgtgatcgccggagcgaagatcagggcccttagtgagaatcctaagcaatcgatgcgacctcttgggtttagccagttcgggttaggcttcgggtcaatgctcgctacctaccgaaactgccccaataatagtccgcttgctatctggtggggtgatccgaaggtgacttctggtgcattgcactggtatcctttattgcagcgtgaaggctattcttccttacgcaatatctttgctgatctttcagggatataa

SEQ ID NO: 342326 - DNA, 282 bp, Pseudomonas aeruginosa
atggacatcaataatcgctgcctcgacttaacgttagagaatggaacaaccatcactgtgcaagtcacgggctaccacctgcgctttctggacaagctacataccaacgagcttggaaagctctataaactgggcacctttaagatcaccagccatcactataacgagtggaaaaatataaacacaatcaaatactgcataggcgaatgcactgttctgaaagactcaccaccaaaagagacacccagaacaatcacttacaaaattcgtcaggacttctaa

SEQ ID NO: 342327 - DNA, 978 bp, Pseudomonas aeruginosa
atggagatcattggggagctgtcttgtagcacgtctgtagccccttccatatccctatctgtaaatgcttcctcgacagacccgatcaccttcgaggccctctctgagctgttcatcaaggagcgccaaggcaacgtggaaggctcgactctcaaggccattcaatcgaactgtaggaccctctcagggcttctcggggacctcgacatcaagacccacacacgggctgacatggtggcgctcaaagagcgtgtgatggatggccgcaaggtcctgacagtcaacaagctattgacccagctatccaccgtcatggactgggctgtaaacaacggcttccttgagcgctcctatgacaagggtctgaagatcgagaaaggggctgacagtgagcgtaggcccttctctcgtgatgaggtggcaaccatcatggaccatgccaacgtcctgcctgcgactgactggaagcgctgggcgctgtctctgggtgtcctcacaggtgcccgaattggcgagctgtaccaactgactcaagacgatgtgaagcaagtgaatggcatcactgttatcgacatcaacaaagatgagcaagggaagaccctgaagaatgacttctcagttcgacaggtgcctctggtcgacggggcctatgggttctccctcaagaccttccttgagtgggtcgcatcggaacccggcaagctgttcaaggcgaaagcgcactacttcaacaagcctctcaatgaggccctacgtgagccgctgggattgaaggcaggcagtgaccagtcgttccactcgctgaggcattccctgtcagggctgctaaaggccgctgcgacccctgaggtcatcgctcagagcatcaccgggcacagctcagggaacatcacttacgacctctatgcggggtctcagagggttcctgtggggacgctccatgaggcgcttgtgaaggcattcggcaagaccatgtaa

SEQ ID NO: 342328 - DNA, 810 bp, Pseudomonas aeruginosa
atgcgtaaggccatgctcggattgttcctggtcgttcccctggcctgggctggcgccgcgttttcggccgaggcgccgacggcacgccagcagggtatcggcggaaccgtgaaggttcaggcgaactcggtgatgcgcctgcccaagcgggcccaggagctgcgcctgcgcagagtggagatcggcgaggatgccgccctgctgattccgctggaggtcagcgtcctgcgcatcgaggaactgcacatggcgaagaacgcccggatcggcgtggcgccgggcgaggagcgaatcagcatcgaagtcgtcagcggccgcctggccgacggcagcatcatttccgcgcccggcgcgaccggcaccttccggcaaagcgccggtaacggccgcgacctgaccttgcgcctgcaggcggtggaggtggaaagcctgctgctggacgcccgcggtggcgtcggcgcgccgggttacgatggcctggacggggcttccggcaaggcctccggctgcttctggggcagcgcgctgaaaggtggcgacggccaatccggaagcgacggcggtccgggcggggcgggcggtcggattcgtctggaagtgccgggcgattttcctctggagcgcttgcaaacccgtctgcaaggcggcgtcggcggcgccggaggcaaggccggcaaaccgggtgcggcggataacgccaccggttgctggatctactcggtggatgccggtcgtgcggggcgcagcggagaggacggcgcgaacggcaccaacggcagcgacggcagcctcgacgtcgtgcgcttctga

SEQ ID NO: 342329 - DNA, 711 bp, Pseudomonas aeruginosa
atgacgtacattaatttgccgagtgaccagcaaacttcaatcagcgaagtcgacgagacggtgcttcgagcagcagtacgcaagtgtttagatgaagcacgactagggccaattcacagccttggcctcagtagctgtggaccctacgtggctaccaagctcaatgcgttccaacaagcgatcgctgagtacagcaaggccaaagcccctaccaagcgcgaacgtactttgcaggatgcgctgcgcgccggcagtgatctcgttcacgcagtacagcaaatgaaggaccggctcgaagctgagcgcgaagatggggagctgttcttcatcgatgatcagatcaggccgccttttcatctcagcaagcggctatcggtacaagtgtcgttccgctggcgagcgacgccgtctgcggactggaagcacggatacctcaccttcgtctacgatttctcccctgagccccactacacccagtcactgcccaagcgcaaacccagcgcggcgcaggcagctagggatctcgaagacagcctgtaccgtgagtgggagcgcttgaaggctcaggcgctgttctctatgagagagttcttccgaggtggcggcgatggggatgctgtgccaaaggtattcccagtgaagcctagcccctacgggggcctgaataatttgagctgtaatttctggcaccccgagaggtcggcaccctaa

SEQ ID NO: 342330 - DNA, 1158 bp, Pseudomonas aeruginosa
atgcaggcgttgcgcagtggtgggggacgggtcctggtgggcgtgctggcggcgggcctggtcgccttcggcggttgggcatggctcggcggcgacgccggggcgaaggcggcgcccgcgccggccagggtcccggtgaacgtggcgcgggtggagcggcgcgacgtcgagcaacaggtcagcggcatcggcacggtgacttcgttgcacaacgtggtgatccgcacccagatcgacggccagttgacccgcctgctggtgagcgaagggcagatggtcgaggcgggcgagttgctggcgaccatcgatgaccgcgccgtcgtcgccgcgctggagcaggctcaggcctccagggcgagcaaccaggcccagctgaaatccgccgagcaggacctgcaacgctaccgcagcctgtatgccgagcgtgcggtgtcgcgccaactgctggaccagcagcaggcgacggtcgaccagttgcgcgcgaccctgaaggccaacgatgccaccatcaacgccgagcgggtgcgcctgtcctacacccggatcacctcgccggtatccggcaaggtcggtatccgcaacgtcgatgtcggcaacctggtgcgggtcggcgacagtctcggcctgttcagcgtgacccagatcgcaccgatctccgtagtcttctccctgcaacaggaacagttgccccagttgcaggcgctgctcggcggcgaggcggcggtgcgcgcctacagccgcgacggcgggagcgcgctgggcgagggccggttgctgaccatcgacaaccagatcgacagttccaccggtaccatccgcgtgcgcgcctccttcgataaccgccaggcccggctctggcccgggcagttcgtcgcggtgagcctgcacaccggggtccggcgcgaccagttggtgctgtcgagcaaggcggtgcgccgcggcctggagggtaatttcgtctaccgggtcgccgccgaccgggtcgaggcggtgccagtgcgggtgctccaggacatcgacggcctcagtgtggtggaaggcctggccagcggtgaccaggtggtggtggacggccactcgcggctgatgcccggcgccctggtcgatatccaggagccgcgcccgagcctggctcaggtggcggagcggcagccgtga

SEQ ID NO: 342331 - DNA, 675 bp, Pseudomonas aeruginosa
atgcaccggccacaggcccaggcgggcgatccagtggccaagcaacgaggccagcagcacaccgagggcggacaggccgagcagccatttcagggtggaggtccgcgcctcatggaacgccgcgctgtcgatggcggtgacgtaggtcagccgcggccgcccctcgcgcgccggcaacacgccgacccgcgcagtcagcgcgtaccggtgctccggcaactccaattcgtagcggccggcgccatcggcgatcagccgctgcaccggttcgctgaagcgcccgtagtgatagcgcgggtcgtcgctgtcgatccagaaacggatcagctcgtactcctggctcaggttgtccagcttgccctgcaggtgcggccagcgctcggccaggtcgggatggtcgagcatccgcgagaccatgttgaagcgcacgtccacctcgccctgctgcaggcgctcggtctggcggtcgaggatgcaatagagcatggtgccgatgagggcgaagatcaccaccgcggcgccggcgaacattcccgccaggcgggtcgacaaggacatgcccacctcagcccgactccgccagcgcacggttctccaggacgtagcccatgccccggatggtatgcagcagcttgttctcgaacggaccgtcgagcttggcgcgcaggcgcttga

SEQ ID NO: 342332 - DNA, 618 bp, Pseudomonas aeruginosa
atgaagatcactgccgatcaactcgaccgcgctaccggctgcggtgctgctactgcaacgacatggctggagcacctaaacggtgccatggctcggttcgagatcaacacgcccgagcgtgtggcgatgttccttgctcaggtcggacacgaaagccagagcctcaagcgcctggtggagaatctgaactactccgccgagggcttgctcaagacgtggccgaagcggttcacggtggacgaggcgaagcagtacgcacgccagcccgagcgcatcgcgaaccgcgtctacgcaaaccggatgggcaatgggtcgccggatacgggtgatgggtatcgataccggggccggggcctgatcatgatcaccggccacgacaactacgccgaagccgcccgcgccctggcgctgccactggtagcgcaaccggagttgctggagcaacggacctgggcagctatcgcctcggggtggtggtggaagtcgcggggtttaaacgacatggctgaccagggccgattcgagcgaatcacgctgaagatcaacggcggctgcaacggcgcagacgaccgtgcggctcgccttgaatgggcgcgcgcagcgctggcgggcgcgtga

SEQ ID NO: 342333 - DNA, 219 bp, Pseudomonas aeruginosa
atgagctggttgaaagaagccttcaggcgctggaaggccaagaactgggatcggcaacccttccttgacgaaggtgccaactttgtccacctagggtttgattcacccccgctgcggcgcctctgggacaagcacagaaagtcagccatcactgcgtccaagtggcttgtcgccctggtcggcggcgcaatcatcctcaagcttcttgggcttggataa

SEQ ID NO: 342334 - DNA, 222 bp, Pseudomonas aeruginosa
atgatcgacgtcttcctggtatgcgttggcgctgtgggtatcacgggtgcggtgacaatcttcagctaccactttggctacgaggccggcctgaaggcgggctgccctctatggcgagatcccgcgaacgcggctctctactgcttatccaagcccaagaagcttgaggatgattgcgccgccgaccagggcgacaagccacttggacgcagtgatggctga

SEQ ID NO: 342335 - DNA, 201 bp, Pseudomonas aeruginosa
atgcatcgcatttctctcaaagaattcgccgccaagaaggggcaaaccaaggccgccgcgcttcttggattgactcagggcgccttgagtaaagccttgcgtgccggacgcgagatctatgtcgccgaaaacgccgatggaaccttctcggcagaggagacaaagccgtttccgacccagccatcaagagccgttgcctga

SEQ ID NO: 342336 - DNA, 429 bp, Pseudomonas aeruginosa
atgggtacttacctgattcagtacgcacaagataaaaattatgttcttggagttaccgacgagatgtctggcgcgaaggtcgtgctgcgaaaagcagaaggaacgccctatcgctatgtcctttgggatattgaccaagacacagggatcattaccctgaactcaagcggcggcgagctagcgattgacccacagggtgggaatgtagatgggggggtttttctaactctagctgtcgttaactctgcttctaagagtcagcgcttcgatatggacacgaagccgcgctacatactgagtgcttctaacccgaagtactgcattgataacgaaagtcgacaaacgcaggatggcaacccgatttggctctatgagttcaatggttcgcaagctcagcaatggatcgctcagcgtctttcgtttgcctaa

SEQ ID NO: 342337 - DNA, 498 bp, Pseudomonas aeruginosa
atgactgtaccagaagcgattgactttctcaacggcatgagagagtaccaactggccttggcggcgaaacacgccaatcaacccgcgcgggcaaaaggcgcggaggaacgtgcccagagactcaaggatgtaatggagcttttgcagcccgccccgccccgcccctctcagctctccctcacccccgacgaccttcgcgatttgccagacgagctgctagagcagctcagcatcagtaaatctgattatctggacttcgatatagttgacctcatcaacagtgcaggggggatcaccaccattgatcacctgatcattgccctataccggaaaagcggcgaaatccatgagcgtacaaagctcaacagccggctgtaccgaatgaccaaaaagggaatgatcaaaagtctggagggcaagaagggagtctatgcgactcgcgacataacagatgcagatctatttgaagttgaccagggagaggaaccctctccctga

SEQ ID NO: 342338 - DNA, 240 bp, Pseudomonas aeruginosa
atgtgcggaaggctcagccagtatactggcttgcacgagttcgtcgacgcgctgtcgatgccggccatgctggtcaaccttgtcggcgagcagccacagcgctacaacgtcgcgccgtcgacggcggtgacgacgctcagattggaaggggacgtcctagtcgcccaggcgatcagatggggatggaggccgttctgggcccgtgagcgcacggcgccgatcaacgcccgggctctatga

SEQ ID NO: 342339 - DNA, 1389 bp, Pseudomonas aeruginosa
atgaatcctaggcgccaagccgtcattcatcaacagcagcgcgcccgtcggtatacatcgaatacggacgcttacgccttcttcaacctgctgaccggccctgaattattcgagcatgtcgagtcgttgctgccggttcatcgggagcgcttgttcccgccgacagagacgttgtccatgttcatggcccaggccttgagtgccgaccgttcctgccagaaggcggtcaatgagatggccgttaaacaattgttagcgggtttgaagccgtgcagcacgcacaccggcggctactgccgtgctcgtcagcggttgccggtggagatggtttccacgctggtgcgcaacactggcagcctgatcagccactcttcagccaagacagggcagtggatgggcaggccggttcggctggtggatggcacgacggtgtcgatgccggatacaacggctaatcaggccgcctatccgcagtcgcgcgggcaaaagccaggattgggctttccgatttgtcggctggttggcatcgtctgcctctccagcggtgcagtgctgaatgcggcattgggtcgttttcgcggcaagggtggcgatgagcaaaccctgttgcggtcgatgctcgatacgttgaacgctggcgatgttttgctgggagatgcctactacgcgacctatttcctgctgtgtgaattgcagcgcaggggcattgatggtgtgtttgagcaatatggcgcgcgtcggcgcagtacggactttcggcgaggtaagcgcctggggacgcgcgatcatctgatcggtctggaaaagccccggaaacacccatcttggatgagccaggcttactacgagcaagtgcctgacaggttggaggttcgggagttgaaagcgggcgacaagattctggtcacgacgctgcgctgcacgagtcaaacgcccaaggctgccttgaaagcgctgttcaaaagccgctggcacgtagagttggatctgcgcaatctcaaaaccacgatggggctcgaaatgctgagctgtaaagctccctcgatggctatcaaggaactctggatttacctgctggcacacaacctgattcgcctgatcatggcgcaatcggcctcgatggttgactgcctaccccgtgaattgagcttcaagcacagcctccagctatggctggcgtggcggcaattcgacgatgatcctgacggaggtacgactcttcgcggcctgctggttctggtcgcgcaacagcgtgtcggcaatcgctccgggcgagttgaacccagagccctcaagcgaaggccaaagccctacccattactgacctgcacacgtcaatctgctcgggcagcgatcaagaaacacggtcatccgaaaagggttaagtaa

SEQ ID NO: 342340 - DNA, 1425 bp, Pseudomonas aeruginosa
atgagtagcctagtacccaagccacaaatgcagttagttgacccacaagcgcaaatggtcgtagacgtgttgcaaagcattggtttgccgcacgaaaacattattgcatcccaggaagaaagggcaattattggacaggccttacctgcattaatagaggcacttcctcaagatgcaaaaaaaggcgccaggtacctatctaaatttgtggtgggcgcagggttcgggctatttgattattccctcaatgcaatctggaatgaggtcgtccttgacctgcataaaaaagtaatagcttatgggctcgacattttttacgacgcagcaattggcggaaaaaaccgagagttctaccagtcagaagatgacctacgctcagtaaaagatgcaacccttctggatacatgtcgaaagcttgagcttatcagcgagacaacctcaaagaaactaaagcacatgctcgacatgcgtaacgacattgggatatcgcacccaacgaattacacaataaatgcctacgagcttctggcttggctcaccaactgtatcagagatgtcttgaacgaccgtcccactgagtccgcattacaggttcaagcatttattcagaatctccgcacctacacccaaccccttgatgttgccaatcttaccggcatcactagtaagataaatgaactcgcatcccaccactgcggcaacattctcagaaccatgtttgggatttacgtagcatcagacacggacccgcaagtcaggaagaatatttctctgctttcaatttctgtatggcaagcgagcaatgatgatgtcaggtatcggctcgggttaactcttgaagggtataacaacaaccttcacaaggataaatatgacctcggcgttcagttcttccaagcggtcaacggcaatgcctttcgttcagacgctgagcgtgcaataattgtcgacggactgatcgattctctattggagaaacacaacgcttgggacaactatcatcacgaagcccctgtggcagacgacatcatgtcgtatatacacaatcagcaggatatcctagccaacttcggccccaagcttatcaaggttttcctaatgtgccggatcggtaacggccgagcatattgcaacggcgtttcaccgcgaggcgcatcttattacgataaacttctaggcttgcttggcgattattgggctcctaccgcactcgcagcgcttactagcttcgaaattcaagctcaactcgatcaggaactctgccgcaaacaagcatgccaagcgttggaaaaactcaaagccggggtggttaatcagcgccttttagagtgcatcgacttcctcctagccaatctcccaggcaatggtaaagcaccacttgacagtagatttaagcaattatctgccgaatacctaaactggtaa

SEQ ID NO: 342341 - DNA, 240 bp, Pseudomonas aeruginosa
atgaactactccagcctctccacctacgacctgctgaagcaccgcagccaccatgttgacagcctgacccgcctgcgccgcgcccagccgcagtgggacgaggacgctgctcgacgcggggaaatcacgatggccgatatcagcgaccagatccgcgagatcgatgaccaccttcgtccgagcggctgggagtcagtcgacctcgactactccggcgacaccgccccgatgtgcatgtga

SEQ ID NO: 342342 - DNA, 513 bp, Pseudomonas aeruginosa
atgaccagcatccagcaaatcatcttgggcaccaccaccgcgggcgcactgctgattcttatcgcaaccgcctatctagcgggccgcaaagatcgacaagccgccctcgaggaggcaacgaatgccgcctacttacgcggcatcactgtggagcgtgagcacacccgcgccctgcaggccgatattgcaactctgaaccaacgcatcaccgagcaagccaacaccatccatcaacaatgcgaccaggccagacacgacgacgaagcgatcaggcaggccctggacgactatcaggtgcttgccgctctcgccttgacggacagcgagctcgatgccattcgcaacgcatgccgtctactcaacggacacgcccggcggttcgcgaaaaccggcaccaacaaacgcaacgccgacgaggcagctcaacaacagctcgctgccatcctacaccgccgcgccgccatgcacctgaccggccggaacatgggcgaagacgcacaggaggcggcatga

SEQ ID NO: 342343 - DNA, 336 bp, Pseudomonas aeruginosa
atgagcactcttcgcgaacaccaaaccgggctccgcctgcaaccggcaccaagggcacaaacggttgagcatctggtgcgcatcttcggcgacgtactggttccgctggatgctctgcgcgaacgctggtttcgcaacctcaacagggacaacttcggcaaggccgtacgggacggccggatagccttgccaatcaccaccctggatgacagtgcgaaagctcaccagtacgtcgaggtgcaccaactggcggcatttctcgaacagcgcgcctacctggccgaccaggacctggctcaacgacttcaaccccaaccgggatcagcagagagctga

SEQ ID NO: 342344 - DNA, 174 bp, Pseudomonas aeruginosa
atgaaacgcaaaacgaccacagagcagacagtgaaatccgcgcttgcacgcttattgcggcagacccttcgagaagtgcgtgaagcgagaagcgactatctcatcgacgatgctcaagcccgtgctcgcggagcaatctatctggcctatcacagcactgcgatcaccgcatga

SEQ ID NO: 342345 - DNA, 168 bp, Pseudomonas aeruginosa
atgtcggctgacgaaatccggccgcgcgcctatgcacgccacatcctcgcgctggaaaccaagcagcagaggcaggccgcgctggccgaagtccccgaacacctgcgtgaactgacccgaaagcacgtcgagatcgcgtggaaccacccgaaaggaggcaaggcatga

SEQ ID NO: 342346 - DNA, 294 bp, Pseudomonas aeruginosa
atgagggacctgaccctgcagcaagccgcacagcggctgggcctgactcgcccggacctgataaagcgaatgcgcgccgcggatctcctgaatgaacggcggctgcctgcccacccccaacgcgaccacctgtacctacgcgaacacgagggccattggcatcaccccgagcttggcccgcagtacagcagctcaaccagagtacgcccggcgggcctcatctggctggaacagaagctgggccttgagcgagcactgcccccggccgatcaggatcgccgcgatgtcggctga

SEQ ID NO: 342347 - DNA, 312 bp, Pseudomonas aeruginosa
atgacaaagtaccgactccgacaaccgtcgtttatccgtctgcaggctcaactgaacctaaccggtaccttccacctctcgctcgaggaccaggctgcgcaggcgatcgttcacggcaagatcactaccgagcgcagcgaatcctccgtgcggatcgaccttcgcatgggcgaccagcaccacagcctctcgcttccttcctccgggaagtccaacgccaccaccgttgcgcaatggctggaaggaatcgcgaacggccaacacgaaacggccaagttcaaacctacccgccgctggcgggcggcagcgtga

SEQ ID NO: 342348 - DNA, 657 bp, Pseudomonas aeruginosa
atgactactctcggcgagcgcatcgctcaattcagaaagaaaaagggactcacccaactgcagttggcggagctttgcgggtgggagaacggccaagcaagagtcggaaactacgagcgcagcctgcgcgagccatcgatctctgacctgcgcaccctggcagaagctctggacacaacgctgctagcccttcttgaagaaactccaacctccacatttccatcgccggacgactacgccctaatcccgctctatagcgcggcgggtgcagctggccgcggccacttcaacgaccacgttgaggtcaagggggggctggttttcaggcgggaatggctcaagcgtatgtctcttaaagaacaatgcttacatgttatctacgcaaccggccatagcatggagccggtcatctctgacggtgatgtcattctgattgacgaaagccaaagagagccaagggaccaaggcatctacgtcattcgccgcccagacggagaattcatcatcaagcgcctgattcaaaccgccctgggaggctggatcatcagaagcgacaacgatgacaaacgcctttacccagatgaaatggcacgaaagtcagacataggcgatctggtgatcattggtcgcgtggtatggcacgctggagaactataa

SEQ ID NO: 342349 - DNA, 387 bp, Pseudomonas aeruginosa
atggcgcataagttcaacccccacagcgcgcgccacatcctcagcccagatgaggtcgaggaagcgctgcaggcgacacgcgatccccgcattgtcgactcggtgatcgaggcatacggggatgcggcctggactgatcttcgcggggtggccgaggagttcggccaggggcatggcaacgccgcctccatcctcaaatctatcggtgacacgttggcgcgacagtcgttgctcacccagaccattgcggcgcacctggccaacgacggccgaatcgacgccaacgagttggccgaacaaaagctgttgctgcggcgcttgcatggcaccttgtttctgcttgagcgcagcctggaacaggaagccgaggaggtggagcgtggctga

SEQ ID NO: 342350 - DNA, 2235 bp, Pseudomonas aeruginosa
atgtcgggggaaggactggctgaagtactggcccaactgcaggactatggtctggagccagagacgccgcttaagatcggggaactggtccgctgtcggtcgggggccgggcgccagaagtcgaaaactggttggtatgtggtgcatgagcactacaccgagaaagggcttaccctctattttggggcgtatggcgactggcgggtcggtgagccgcagaagatcaaatccaagggtgtgcgcctcagcgatgaggagaagaagctgttggctgcgcgcatggccgaggcgaagcgcaagcaggaggagcgcaaagccagggatgcgcgtaccgcttcccgtcgggcggcggcgctgttcgagaggctgccggaaaaggggcgttgcgggtatctggagcgcaagcaggttgtcggcttgggcgtacggtatgcgccgcgcaagaacgcaatgttggtgcccatgcgggatgcgtcggatcgaattgttggcctgcaggcgatcttcgctgaacgccaggcgcatcttgatgatcgcgataagacctattggccgaagggcatggcgaaggaaggagcattccacctgatgggatcgcatcctgagccgggtgaggtgctgctggtctgcgaggggtacgccaccggtgctagcctgcacatggcgaccggcttggcagtggctcttgcattcgacgcaggcaatctgctcgccgtggctgagatcatgcgggagcggttcccagggcgtggcttgatcatctgtgccgacgacgattggaagaccacacggccggataaggtcaccccctataaccctggccgggaaaaggccgaggctgccgccgccatcgtcggtgcacaggtggtctggccgatcttctccgacgagcgcgaggacggttggacggacttcaatgacctgcattgcgcggaagggctcgatgctgtgaggcggcaggtcatgtcgcttgtccgtccgcctgctgccggtggttggaagggctatctgcagcgcaccggtaacgggcaactgattcctcacccgattaatgtgaccttgatcttgggcaacgatgagcgctggaagggggtcatcagcgaggacctattcagcgcgaagacggtcaagcgccgggccacgccatacggtgggcaggccggcgagtggtcggatctggacgatatgcgcacgtcccaatggcttgccagcgagtatggcctgcggatcaagaccctttcggtgcttgagggagtgtcggtggttgccaacgacaaccgctatcaccccgtccgtgagtacttggaggggctgtcctgggatggccagccccggttgcggacctggttgaaggatcgcttgggcggggtgccgctggttgcgccgccggggtacgtggaggctgtaggggtgcgctacctgatttccgctgttgcgcgggtgatggtgcctggagccaaggctgactgcgtactgatcctcgaaggcctccagggcaaggggaaatcgacggccctgaagatccttggtggcgagtggtatatggatactccgttcccgctcggcgacaaggaggcgtaccagatgatcaggggcaagtggatcatcgaactgggcgagctggatgctttcaacaaagcggagtcgacgaaggcaaagcagtttttctcggccagcttcgacaccttccgcgcctcctacgcgcggcgcaccgttgacgtacctcgtcagtgcgtgttcgccggcactacgaaccaggacgaatacctgaaggacccgacggggaataggcgctattggccggtctcgtgcaccttcgtggaccttgaagggctgcgagcggatcgcgaccagctgtgggccgaggcgatgcacctgtacaagctgggtgagccttggtggccgcaggaagctgagttgccgtggttcgtggccgagcaggatgctcgacaccaggctgatgcctgggagttcccgatcctcaagtggctggagacgaacccggacaaggtggttaccactgacacgctgctggagaaggcgctgaatctggaccttggccattggggcaagccggagcagacgcgggtcgggcagatcatgcataggttgggatggcgtcgggagcgtctaccggctcgcaccaagagtggtatcaggccttggggctatgccaggccggcggattggatggctgccgcggcgcagcctgttcagcgggagagtgcattttga

SEQ ID NO: 342351 - DNA, 339 bp, Pseudomonas aeruginosa
atgctgaagttgtgggccgaggagcagcattcgccgggagctggctgcgggggttatggtggcgggaacataattgctatgctgatggacaccaagggcgagttgatccgcggaacccggggtagccgagtgctactggaccaagtggcggagatagatctgatcgtgaatcagttgcctgaggtgcagaagcaggtggtggttgagcactacctgaaccgagacagcctgccggagcagaagtaccggcactgcgggtgcgcgatgcgaacgtactacctgcgcctccatgtggcgcatcacacaattcagtctcgactgatgaggcgcgccgcttga

SEQ ID NO: 342352 - DNA, 339 bp, Pseudomonas aeruginosa
atgccgaacgaacagcaggcactggcagaaatgccgatctgggtgctgatcttgctcgctgctgcgggcggagtcagtggcgaaatgtggcgtgcggataaagccgggctcaccggttgggcgctgctgcggcgcctggccctacgctctggcgcgtcggtcgtgtgcggtgtcgccgtgatgttcctggcgatggcgtgcggtgcggcactgttgctggctgcggccatcgggagcctgaccgcagcagctggtgcagaggtcgcggtcgggctctacgagcgctgggcggccaagcgaatcggggtgagcgatgtcccgcctgccgccgacggctaa

SEQ ID NO: 342353 - DNA, 525 bp, Pseudomonas aeruginosa
atggcggggaatgccaactctggccggccaccgttgccggccaccgtccacatgctgcgcggggacccgagcaagcaaggcatggcagcgctacaggcagctgcgcgggcgccggctgtcccggtggaggctccgcccaagcctgatttcctgagcgctgaaggagagcaggagtgggatcgggtcgtggaggccctgacagcattgggctggattagcacgctggacatgatggctctggccacctactgcgaggcggtgggtgattgggtgcggtttcgccggaagatcaccgagctgaacgctgagatggagaactctggtgacgtacagactttcaagacgggcgccaagcaactgagcatctggcggcaactggcgaacgatgctgagcgccgtgcgaatcaggctggtgcgttgttcggtttttctccggtagcacggcgggctatgaaagcgttggccccccaaggcgagttgttccccaatgaagcaagagacgctgctgacagatacttcagctag

SEQ ID NO: 342354 - DNA, 1815 bp, Pseudomonas aeruginosa
atgaagcaagagacgctgctgacagatacttcagctagctgccgcaccaaggcgttcgccgaggcggtcttggccggtgagatcgtggccgggccggatgtgcgcggggcttgccagcgccatctaaatgacctggcgttgggcccggctcgagggctggtctggtgccaggacaaggctgatagagcgattggcttcttcgaggacgtgctaagacttaacggtggcgattacgaagggtcgccatttctgctagcgccttggcaagcctttgtcgtcggcagcttgttcggttggtacgcggaggagggattccgacggtttcgtctagcctacatcgagacagggaaagggtcgggtaagagcccgctgatcggggggatcggcctctatgggttggtcgccgatggtgagcagcgcgccgagatatacgcggccgcaaccaagcgcgaccaggccatgattctgttccgcgatgcggtatcgatggtgaacatgtcgccttcactggccgcccggatcgagcagtccgggcgtaacgagaagatctggaacctgttctacccgaacaccaacagcttcttccgtgcgatcagctccgacgacgggcagtccggtccgcggccgcatatgggactgctggacgaagtgcacgagcacaagaccgccgccgtcgtagagatgatgcgggctggtacgaagagccgtcggcgcgccctggtggcgatgatcaccaacagcgggtctgacaagaacagcgtggctggccaataccacgacctgggcgttcgggtatgccgtggagaggcggtcgacgatacgctgttcgcgttcatctgctcgctggatgagggggaggaccccttcaaagacgagggctgctggccgaaggtgaacccctcgttggacttcattccggagggtcgttccgacggcattccaggtcggcgctatctgcgcgagcaggtcctggctgcccgagggttgccggccaaggaagcggttgtgcgacgcctgaacttctgtcagtggacggatgccgagaacccctggattggtagtgatgtgtggctgcaggcagccgagccggttccaatgcgggtcctgcgcaggcggccggcggttgccgggttggacttgtccagcaccaccgacttgacggccttcgtgttgctgttctacccgaccgtggaggatccgcattggcggttgctgccctacttctggatacctgatcacgagttggaggagcgcgagaggcgcgaccgagttccgtaccgggtgtggatcaaggagcgacacctggagacaactccggggcgagccatcagtaagctgcatgtgctgcggcgcctacagaagatctgcgccttcttcgatgtgcaccagatcggatatgaccgctggaggatcgaagagctcaaggaactcatgatcgagcatgacatcgtgttgccgacgctggtgaagttcggccagggctacgagagcatggggccggcggtcgatgagttcgagcggcgtctgctaggcataccacagagccaagaggatgcggacgggcgtgtgatcgacctcgatcctgaagagtacggagtggtggagacgctccggcacgacgggaatccggtgctgaccatgtgtgccgcgaatgccgtcacgacttcggatcctgcgaataaccggaaaatcaacaagatcaagtctaacggccgtatcgacggcatcgtggctgctgtcatcgcaactggcgtcagcggatcagtgccgcccggtggcggaacatcaatttatgaacaaggcgttggcatatga

SEQ ID NO: 342355 - DNA, 180 bp, Pseudomonas aeruginosa
atgaaactggtccttctggcctggctggccggcctgctgggctttgccctgttggtggcaggtgtggcgctgatcaacgtcccggcggcctttatcgtcgcgggggcttgcttgctggcctacgcaaggctggttgaccgtgcggcggcagcgaagcgcgctctggaagaggagggttga

SEQ ID NO: 342356 - DNA, 1275 bp, Pseudomonas aeruginosa
atgttcttttccagccttctgggcgcgagtaaaggcaacctggtagaggcggatagcggtttctggcggggtatgctgggccgcaactcgaacagcagcagagtagtggtaacgccagagacagccctgggcctgcccatcctgcagaactgcgtgacgctgctggccgagacgatcgggcagctaccgctggagctctaccagcgcaagggtgaaggacagcgagaaccggcggtcaaccatccgctctacgacgtgctgcgctatcagcccaacggttttcagacgccttacgaactgcgtgagtgcgaacagatgtcggccggcctgcgcggtaactcctacaccctgatggagcggcgggatgacggcaatgtaacagcgctctggccgctgtgctacgagaaggtggtcgtatacaaaggggctgacctgctgccgtgttatcaggttggcaactatgcagagcggttgccgatgcgcatggtccaccacgttcgctggcacagcctgaaccactacaccggactctcgcccatcgagttgcacgccgagtcgataggcttggctcaggctgtgcgccagtacaccggcaagtcgttcgccaacgggacttcggtttcgggggtgattgagcggccgagagaggcaccggcgatcaaggatcagggcagtatcgacaggatcgtcgaccagtggggcgaaaagtacagcggcatggacaacgccaagaaggtggcgttgcttcaggaagggatgaccttcaagcctatcagcatgacgaacgtcgatgccgacatcatcaacattctcaatgcatctggaacggatgtggcgcggatctacaagatcccgttgccgatggtgaacgacctcagtaaggccaactacaacaccaccgagcagttgttgatccagttcgtggtgttcggcctgctgccttgggtgaagcggcacgaacagtcgatgatgcgtgacttcctgctgccggctgaccgacgcggatacttcattgagttcaacctgtccggcctgttgcgcggtgaccagaagagccggtacgaagcctatgcgattggccggcagtgggggtggttgtcggtcaacgatatccggcggctggagaacatgccgccggtttctggtggtgatatctacctgcagccgctgaacatggtggatgccgggaagggcatccccgatttgaacaatcccaatgtgcgggcgcagctcgagctgcagcagcgcgaaatcgagaggaccttgagtcaatga

SEQ ID NO: 342357 - DNA, 948 bp, Pseudomonas aeruginosa
atgaaacgacatctgcgagcctccagcctgctgttcaatcagcctctgctggtcacgcccgacatgctggatctcggcatccgctgggcgaaccaggttatgaacctgaacatcatcaatctcggtgctggagcggccaggctttggcaggacgatggagaccagatggtccgtctggaacaggccgaggagcggcgacggtccgcggtaacgaaaaccggtgtggaggtcatcccggtggcgggggtgctggtcagccgcggtgcgcacctagacccctgcgaaaccatgaccagttacgagggcctgcgagcacagttgcgcgcggccgttgccgatccgctcgtggagcgcatcgtgcttgacatcgatagccccggaggggccgccgtaggagcctttgaactggcggccgacatccgagcgatgacccgacagaagcctatcactggcctggtcaacttcatggcctacagcggagggtatctgatcgggtcggcctgcagcgagttggtggtcagtcagaccagtggagtcggatccatcggggtgatcgccagccacatggaccgctccaagctcgaggaggggctgggggtgaaggtcactacggtcttcgccggagcccacaagaacgacttgagcccacacgagccgctgacggagcagtcgttgaagttcctcaacgacctagtgcaagagagctaccaagcattcgtcggtgcagttgctgaataccgcggcctttctgccgaggctgtgcgtgcaaccgaagcggggctgtatcgcggtcagcaaggcatctctgccgggctggctgaccggctgatgagcccacaggatgcactcgatgagatatccctggcggtcgcggagaaccgcgctcggcggcagtctggtcgaatagctattcgagccgctgccgccagcatccagtcgcaactctga

SEQ ID NO: 342358 - DNA, 1314 bp, Pseudomonas aeruginosa
atgtcccttgttcttcaaatgcgtagcgaacgcgccaagctgaacgaccagctccaggcgctggccaagattgaggccgacggcgatagcttgaccgccgagcagttggccgagttcggtaatctggaaagccagatcaacgccctgaccgacaaaatcagccgggcggagagtgccgagcgtgcagccgcttctgctgcggtacctgtcaacgaaagcgcccggggtatcaccggcccgccggaaggtcgtgtggaaggaccttacggcaggccggtgcccggcgcctccgtagcgcagatggtacggctgctggctgccacccagggcaaccagagcgaagccgccaagttggcgaaggatggtggctacggcgctgatgtgcagatggctctcagcactgtcacccctggtgctggtggtgtgctggtgccggagaatatggccacggaggttatcgagtccctgcgtccgcgctccatcgttcgcaagatgggcgtgcgaagcgtgccgctgaacaacggcaacctcacgatgccgcgtatttccggcaacaccgtggtgacctacatcggaaccgagacggacatcccgatcactggtatgaccttcgacgacaccaagctgtcggcgaagaaggccgcggccatcgtaccggtgtcgaacgatctgatccgcatgtccggggtcaatcctcgcgtcgatcagatcgttgccaacgacctaacagtgagcatggggctgtcggaggatctgcacttcattcgctccgatgggtccggtgtgctgcccaaggggctgcgctactgggcaattcccggcaacgttctgccggcgccggtagatccgaacctgcagcagatcgatctcttcctgggcggcatgatgctccgggtggaaacggcatacatcgacatggccggctgcggctggctgatgcacccgcgcaccctgcgctggcttcaggcgctgcgcgatggcaacggcaacaaggcgtatccggagatcgacgccggcatgctcaaggggtatccggtcggtctcagtacccagatcccggtgaacctgggggctgatggcgacgagtcggaaatctacttcgtcaacttcaccgacgcgatgatcggcgaggacatgagcctggtcatcaacttcagtgccgaagcctcttacaaggacgcgcaaggcaatgtggtgagcgcattccaacgcgaccagacgctggtcagggtgatcgccaagcatgacttcgggcctcgtcacgtcgaactggtggtcgttgctactgccgtcaagtggggcgccggtatgtga

SEQ ID NO: 342359 - DNA, 183 bp, Pseudomonas aeruginosa
atgtgccctgcctccgattaccaattgccggaatgggtccgcgccagcgcgccgcccgcggcggagccggcaggcgaacgggaaggcgtgtcggggaccagcgcgccgtcgcgcgaccgcgaacgggaggcgcccggcgcgcgctccggcggcacgccgcccgatgacagtctggcctgttga

SEQ ID NO: 342360 - DNA, 384 bp, Pseudomonas aeruginosa
atgcccgtcgctatctcctacatccgcttcagcacgaaggaacagttgagtggatcgtccttggatcgccagcagaaaaaggtggcgagtggctatccaagtgacctgcccaccagtcagcagcttgtcactgataccggcatcactggccaggtcatgaatattattaacgacatgctgattgacctgatggcaacgatggcacgtctagtggctgacaaatgtacaaagggcgagaaagtcggcgggaaaggtaggaatcgggagaagtggaacaaggttgcgggcctgctcaagcgcaatggcaatacaatggaagagattgcgaagctggctgatgtggggtatcgccactgtctaccggatcaaaaaagaactgtctga

SEQ ID NO: 342361 - DNA, 687 bp, Pseudomonas aeruginosa
atggggagcacagcagtagataaaggatttctctaccgaatcgtcaggtttgatcatgctgtggaggttctaaagggaaaccttcacttctctcatccttcgtcttgggatgatccatacgaaacgcacatcaaacacgaatttgaccatgcgatctttggtcaatgctggacgaaatcaagtgtctcggatgcaatgtggcgtatctattcgccaaacatgctcggcgttcgattaagaacgactagggagaaactggagtctgcgatgcaatcatatactaagaacaatccgggctttaaaagaaggctgcgagacgttgaatatctacggccgataaaatatcgagataaggtggctggtattgagcagcaaatgcagctcatagttagcagtccgtcacttgctgccgatatgctctgcttaaagcgtgacgctttcaagcacgagaatgaagttagagcaattctctataatggaaacgcagaacggatcgaaagcgcaagaattagcccgatcaaggtcggtgttaatgggcgcgaattgattcagcaaattgtattcgatccccgcgctcccgatgagctctgcaatgccatgaagcattaccttaaggaaatagttaatttcaagggtgaggttaagaaatccaaactctacaccgtcaaaccaagcaagactgaataa

SEQ ID NO: 342362 - DNA, 945 bp, Pseudomonas aeruginosa
atgaattcaatacggctaattgctgcgttctgtatcgctatgggagtcgtttttggtattgagttttacaaacaaaacttcaacatagttaatgtaattgtttttttctttttaattgctgctggagtggcaactggatggtatcgcctagttaagattccatcgtggcgtcgagcgcgtgccatctctctgagaaaagaattagaaaagcatggtgcaagcgtcgttgacgaatttggcttattaattctcaaggcggactatatggagataacaacacgccttgagtgtaaattgttaaacactgtggcagaaaatttctctgaaaagcatctcaggactcttgctcgcaagaaaagtcagtctatttttgctaacgactatgggcgagttatcgagactggctggcagaaggagcttactggatttgttcggaatgaactattcttcgagttcgagattcaattcatggaggtcaattttgaggcgcctgccgcgactcacttgcttgaccccactcaggttcacgtgatcgaatattgggccagctttgttgattcaataatatccgactatgattcatgtgctatatctaacaaaaagtttgaggaagtatcttccgggcacgaatacgaaagtttcgtggcggcgttaattgttgacctgggctggtctgcaaaagttacaccgggctccggtgatcatggagccgatattattgctgaaaatgaaggtgaaagagtcgcgattcaatgcaagctatatactgggccagtggggaataagagtgtgcaggaggccttttctgccaagtcttactatgactgtaacctggcttgtgtagtgtcgaactcttcgttcacgcactcagcaaagcaggctgcatctaaactgggcgtagcattgctgcatcacgatgacttagaagattatttaggctcatag

SEQ ID NO: 342363 - DNA, 870 bp, Pseudomonas aeruginosa
atggatcgcccagatacgttccttgagttggttattcataacaccgtgaacggaggtgatgatttaacactttgcgctgggtttgagcgcggagagtggcgtcgtgatcagctcgccaatcatgtaatggagtggctgccagagtttgctttgagccacacagagttaatggagctagggcatcacaacgcgatcaagttgacaaaaaaagctgcgcaaattgtctatcaaaccgagaaatatggattgcggggagagtttggagagattcttctccacattgctatccgtcaggtgtaccaaaccattccggcagttagcaaaatcttttacaagtcggcagtcaatgaaactgtcaaaggctttgatgccgttcatgtcgtgagaactggtgaggatttagagctgtggatcggagagactaagttttatgatgatctgaatcgggcgatcagagatgtttgcgctgaaatagtggatcatcttgaaacagactatctgcggtctgaatttattcttatacagaataaaattgatccagcctggcctggtgcagaagagctaaagcggctgttgaatcagaatacctccttggacaaggtttttaaaaaggcatgtataccagtcttgttgacctatgatagcacggcagtgggttccgcttgtggggctgatgatgcctaccaaaaggctcttgttctggaggttgaggatgcctactcgcgaatgcgggatcgtttggggcgtaaatattgtgagcgatttggtagtccgctgcccgtaaccttacatgtaattttaatacctctcaaagagaaaaaatctctaatagctgcattagacacgagattgaaggcgcttcagctatga

SEQ ID NO: 342364 - DNA, 3507 bp, Pseudomonas aeruginosa
gtgcccagcaatgccacaccgagcaacagccacaagtatctgatcgagaccaacccggcgctcaccgagctgaagcagttcctcaactcggactacctgctcggtggcctgggtatcaatccggatgacagcaagaagcgcctgggcgacggtctatacgagcagcgcctggtacgcgaagcgatcgtccagcgtacggggcagcgcttcatcgccggattgaacagcgacgaagcgatgttccgctatctgatggacaacgccatcgccagcaaggacgtattgggactgacccctggcgtcaccctcagcgccgcccaggtggccgcgctgacccacgacatcgtttggctggaagaagtcgaggtgaatggcgagaaggtcctcgcccccgtggtctacctggcccaggccgaggggcggttgggcccgaacggcgcgctgatccaggggcgcgacgtgaacctgatcaccggcggggacctgaggaacgccggtaccctgcgcgcgcagaacgacctcagcgcgacagccggcaacatcgacaacagcggcctgatcgaggccggcaaccgcctcgacctgctggccagcggctccatccgcaatgaccagggcggcatcattgccgggcgcgaggtaagcctctccgcccttaccggagacgtcatcaatgaacggacggtgacccagcaccagtcctcctacaggggaaccggtaccactgaggcatttgccgatagcgccgcgcgtatcgaggctgcgcagaagctgaccgtttcggcaggacgcgatgtagccaatattggcggtgtcatcgacagcaagggcgacctcgccttgcaaggcggcagggatgtccgggtttcggctgcggtagcggagcggggctggacggcaggaagccaggcataccagacccagacgacccagatgggcgccgaggtcgtggcggggcgcgatatcagcgtcagcgccggacgcgatatcagcgtcgtgggcagccgcatcgacgctcgtcgcgacgtgacattcgaggcgggtcgcgatgtgggcctggtcgcggctgccaacgaagagcatgcctatggcaagaccaagaaggtcactttccaggacgacaagatcacccagcaggccactcgcgtggacgctggcggcgacctggcgatcaatgccggacaggacctgcggctggtcgcgagccaggccagcgccggcgacgaagcctacctggtggccggcgacaagctggagctgctggccgccaacgacagcagttactacctctacgacaagaagagcaaaggcagcttcggtagcaagaagacccggcgcgacgaaatcaccgatgtgacggcagtgggcagccaaatatccagcggcggcgacctcaccctgctcagtggcggcgaccagacctaccagggtgcgaagctggaatcgggcaacgacctggccatcgtcagcggcggcgcggtgaccttcgaggcggtgaaggacctgcaccaggagagccacgagaagagcaagggcaacctggcgtggcagtcgtcgaagggcaagggccagaccgacgaaaccgtacgccagagccagctcgtcgcccagggcaacctggcgatcaaggccgtggaagggctgaagatcgacctcaagcacatcgaccagaagaccgtgagccagaccatcgacgcgatggtgcaggcggatccgcaactggcctggctgaagcagatggagcagcgcggcgatgtggattggcggcgcgtgcaggaactgcatgacagctggaagtacagcaactccgggctgggcgtcggcgcgcagttggcgatagcgatcgttgtggcctacttcacggcgggtgcggcgagtgcagcattgggatcgatggcgggtgtgggggcgggctcaggaagcatgatggctgctgccggtagcactgcaatggtccaggccggtacagcagtaggaacagctgccgccggctgggcgaatgcagctggaactgccgtggctatgggcatggccagcaatggagcgatcagcaccatcaacaaccggggaaacctgggggatgtcgtcaaggacgtgacctccagcgatgcgctgaggggctatgtagtcgctggcacgactgcggggctgactgccggcgtctacgacaaatggacctcgacccagaccggcacctcgaccgctctaccgaacaccggggccgtggcgcccgccgcagggttgggcacctggcaaggcgtgggccagttcacctcgaaccagttgctgcagaatggtacttcggtgctgttggaccgggcgctgggcggcaagggcagcctgggcgatgcgttgcaaaacagcctggcaaatgcctttgcggcctacggcttcaagctgattggcgacaccacccatggcgtgctggacgacggcagcctcggcaagatcggcttgcacgccctgatgggaggtctggccgccgaagcggtcggtggcgatttccgtaccggagccctggctgcgggagtcaacgaggcgctggtggatagcctcgccaagcaatacgccagcctgcccatcgatgacaagaagggcctgctgatcatgagttcgcagttgatcggcgtgctggcggcttcgacgcagggcgatgcggacgccaagagcttgcagacgggagcctgggtggcggggaatgctactcagaacaactatattgaacactcggatgttctggcttttgccgaagacatgaggtcttgcggcaaagacgaaggttgccaaaaggacaagtgggagaaagaaaggtacagcgacgaaagtaaactcaatgtacaggaggcccaaaatacctatggtccgctgagagcaaaggagaaaaggctccaaatcgtcgagagcatggacacattggtgtccatccagtgcgtgacgtcgcgatgcgagtcgtacaagacggaattgttggagcaatcagtcgatagctatatacacctgagcaaggtcctcgatgaatgggtgccgacgctggaccgattggcgcttatcggaggtgctgctgcaggtaagcagatagactcgaaagtcaaacgtccgggtatgccggagcctgtagagcttgcgcaggttcagaaggctgtggattatcttgcagccctaaaagcgactggggcatcaggaaaaccgctggtttcaaagggctcagaggtgacccctgaagttattcaaaaagcattgcagggtgatcgtgttattactgcgcaaggcgctgtgtcattacctgcggtgcaaagatatgttgatcggcttcttaagggcgatgttgccccggcaataaaaatggatggcaatgtgattgttgatgggaatcatcgttatatcgcagcaaaaatattagggcgaaatctagatgtgacgccggggtctttatctcctaataaagtccatcaaaccaagcctgtgtctgagctgaagatagatcaagtggattgggggaacaaatga

SEQ ID NO: 342365 - DNA, 339 bp, Pseudomonas aeruginosa
atgatcgaagagctgcaagtcggcgcccgcgaggcggtggccaccatgaccgaaagccagcgttacagcctggagagcgtggagatcgccaaccgtgccggcgaacgcctgggtagcgtgaccagccggatcggcgagatcgacagcatgaaccagtcggtggccactgccaccgaggaacagaccgcggtggtcgactcgctgaacatggacatcaccgagatcaacaccctcaaccaggaaggcgtggagaacctccaggccaccctgcgcgcctgcggcgagctggaaacccaggccgggcgcctgcggcacctggtggacagcttcaagatctga

SEQ ID NO: 342366 - DNA, 267 bp, Pseudomonas aeruginosa
atggcaaagcatctgttgattccgcatcacctctccgatgattttgaggccgagaaaaaagctgccatccaacgatggtatagcgaacacgccgacgcacttctgagggcgcctcaatcaaatgaagtaaccagcgcgaaggatggtaaataccagggcaccattacgttctacttcgaaaaaagtcgaagcacattccactacgagtactctccatcttgtgccacgggcaagaaattcgcgattaccaaggattggaacgactaa

SEQ ID NO: 342367 - DNA, 264 bp, Pseudomonas aeruginosa
atgcgttgcctgggcctgctgatcataagttcgcagttgatcggcatgctggcggcttcgacgcagggcgatgcggacgccaagagcttgcagacgggagcctgggtggcggggaatgccacccaacacaactacctcagtcattggcaggaggagaagaagcggcaggaggtcgatggctgcaaggacaaaccgctctgcaaaaccggaatagaagccgagcataaaggggacagatttattttccctactctaattttctaa

SEQ ID NO: 342368 - DNA, 408 bp, Pseudomonas aeruginosa
atgggctggtatttctctccccaatcgcggtctgaactgatcgcggaactgatcgcaccacagcagaccgagcgcgtcagcgcgaaggttatcgctcacgcattgcgcagcaacgtgctgtggtccgtggtcgaactgaccgccaaggtcgaaggtgtgcatcgtgatctcgcgccgggccagtccctgcgctacatccgctgcgatctgctggaacgaagcggcaaccagtggggctacaagccgctggaagagtccatgcatccgtactattactcgtgcccgctgtcctatctggacctcgcaccggagcagtccgccgactggcgtgcaggcgttcgcgcctaccacgcacggcggcgcacacccacggctgtcacggcacccgccgcggcgctgttggcctga

SEQ ID NO: 342369 - DNA, 489 bp, Pseudomonas aeruginosa
atgagcaacaacacccaagcccaagaagccaaatatttcgacctgcacaccaccggtatcggctacctcaatcgcatccgcgaagtaccgatccgccgaggtgaaccgttcctcgccgtaaccgtcgcagccctccatggcgcggcagacagcgtggaatactcctacatcgactgcaaagtggtcggcgcccaggctgaaaagcttgtccgccgttgcaaggaagcagtcgaggccaagaagaaggttctgatttccttccgtattggcgatatctgggcggatcccttcatccaccagaaaggcgagaaacaaggcaagcccgacgcaagcctcaaaggccggctgctcttcatctcctggatcaaagtagatggcaccaccgtctacgatgcgaaggaagaagctgaaaaagcccagcaaggccaaggcgaaccgcaaggtgagcccgcagctcctgctgagcacgctgaacaagccgctgcttga

SEQ ID NO: 342370 - DNA, 900 bp, Pseudomonas aeruginosa
gtgcatttttccctccgcagtcgccacctgcgtccttcattgctcgccagcagcctgctcctggcggtgtcggcccagggccaggaaaagctcgacgtggatctgcccgccgcgccgctcggccaggcgatcaacgccctcgcgcaacaatcctcggtacagatccttttcgccggcgatctcggcgccggccgccaggcgcccgcgctgaaggggcgtttcacccccgaagaggcattgcgccagttgctcagggatagcggcctgaaggcgcaggccagggacgaacataccttcatcgtcgttccggccagcgaagccgccgtgcccgctacgcaagcccgcagcgaaccgctggacatggagcagatggaaatcaccgcctcgcgcaccagcagcgacctggtctccgccacgcgccagtccaccgtcatcgagcatgcccaactggaggagctgcgccagggctccgacagcctggccaccgtgctggccaaggcggtgccggggatgtccgattccagccgcaccatcaccgaatacggccagaccctgcgcgggcgcagcatgctggtgatggtcgacggcgtgccgctgaacaccaaccgcgactcctcgcgcaacctggccaacatcgacccggcgctgatcgagcggatcgaggtcatccgtggcagcagcgccatctacggcagcggcgccaccggcgggatcatctccatcaccacccgtccggccggcggcgagaaccgcgcggaaacccgcctcagcgccacctcgccgctgacccggctgggcagcgatggcctcggcggccagttccagcaatacttcgccggctccctgggggcgctcgactattcgttcgacttcggcacccgccacgtcggcgcttcctaa

SEQ ID NO: 342371 - DNA, 270 bp, Pseudomonas aeruginosa; identical to SEQ ID NO: 335280

SEQ ID NO: 342372 - DNA, 3063 bp, Pseudomonas aeruginosa
gtgcaggcactgccttcggccgttagggctcagggcagcctgcctcgcctcgaagagcggagcgccgttcttgccgagcctccggttgggcagccggcgttgcaaaccctgccgtcggttgcgcgcgttgagggcgtgcccagcaatgccacaccgagcaacagccacaagtatctgatcgagaccaacccggcgctcaccgagctgaagcagttcctcaactcggactacctgctcggtggcctgggtatcaatccggacgatagcaagaagcgcctgggcgacggtctatacgagcagcgcctggtacgcgaagcgatcgtccagcgtacggggcagcgcttcatcgccggattgaacagcgacgaagcgatgttccgctatctgatggacaacgccatcgccagcaaggacgtattgggactgacccctggcgtcaccctcagcgccgcccaggtggcggcgctgacccacgacatcgtttggctggaagaagtcgaggtgaatggcgagaaggtcctcgcccccgtggtctacctggcccaggccgaggggcggttgggcccgaacggcgcgctgatccaggggcgcgacgtgaacctgatcaccggcggggacctgaggaacgccggtaccctgcgcgcgcagaacgacctcagcgcgacagccggcaacatcgacaacagcggcctgatcgaggccggcaaccgcctcgacctgctggccagcggctccatccgcaatgaccagggcggcatcattgccgggcgcgaggtaagcctctccgcccttaccggagacgtcatcaatgaacggacggtgacccagcaccagtcctcctacaggggaaccggtaccactgaggcatttgccgatagcgccgcgcgtatcgaggctgcgcagaagctgaccgtttcggcaggacgcgatgtagccaatattggcggtgtcatcgacagcaagggcgacctcgccttgcaaggcggcagggatgtcctggtttcggctgcggtagcggagcggggctggacggcaggaagccaggcataccagacccagacgacccagatgggcgccgaggtcgtggcggggcgcgatatcagcgtcagcgccggacgcgatatcagcgtcgtgggcagccgcatcgacgctcgtcgcgacgtgacattcgaggcgggtcgcgatgtgggcctggtcgcggctgccaacgaagagcatgcctatggcaagaccaagaaggtcactttccaggacgacaagatcacccagcaggccactcgcgtggacgctggcggcgacctggcgatcaatgccggacaggacctgcgcctgatcgcgagccaggccagcgccggcgacgaagcctacctggtggccggcgacaagctggagctgctggccgccaacgacagcagttactacctctatgacaagaagagcaaaggcagcttcggtagcaagaagacccggcgcgacgaaatcaccgatgtgacggcagtgggcagccaaatatccagcggcggcgacctcaccctgctcagtggcggcgaccagacctaccagggcgcgaagctggaatcgggcaacgacctggccatcgtcagcggcggcgcggtgaccttcgaggcggtgaaggacctgcatcaggagagccacgagaagagcaagggcaacctggcgtggcagtcgtcgaagggcaagggccagaccgacgaaaccgtacgccagagccagctcgtcgcccagggcaacctggcgatcaaggccgtggaagggctgaagatcgacctcaagcacatcgaccagaagaccgtgagccagaccatcgacgcgatggtgcaggcggatccgcaactggcctggctgaagcagatggagcagcgcggcgatgtggattggcggcgcgtgcaggaactgcatgacagctggaagtacagcaactccgggctgggcgtcggcgcgcagttggcgatagcgatcgtcgtgacttacttcacggcgggtgcggcgagtgcggcattgggatcgatggcgggtgtgggggcgggctcaggaagcatgatggctgctgccggtagcactgcaatggtccaggccggtacagcagtaggaacagctgccgccggctgggcgaatgccgctggaactgccgtggctatgggcatggccagcaatggagcgatcagcaccatcaacaaccggggaaacctgggggatgtcgtcaaggacgtgacctccagcgatgcgctgaggggctatgtagtcgctggcacgactgcggggctgactgccggcgtctacgacaaatggacctcgacccagaccggcacctcgaccgctctaccgaacaccggggccgtggcgcccgccgcagggttgggcacctggcaaggtgtgggccagttcacctcgaaccagttgctgcagaatggcacttcggtgctgttggaccgggcgctgggcggcaagggcagcctgggcgatgcgttgcaaaacagcctggcaaatgccttcgcggcctacggcttcaagctgattggcgacaccacccatggcgtactggacgacggcagcctcggcaagatcggcttgcacgccctgatgggaggtctggccgccgaagcggtcggtggcgatttccgtaccggagccctggctgcgggagtcaacgaggcgctggtggatagcctcgccaagcaatacgccagcctgcccatcgatgacaagaagggcctgctgatcatgagttcgcagttgatcggcgtgctggcggcttcgacgcagggcgatgcggacgccaagagcttgcagacgggagcctgggtggcggggaatgctactcagtacaacttcctcaaccatgtggaaaatgaggagcgttggaagtcccaaaaggcctgccaaggaggagacgaggccgcctgtgggcgtgcggatgcttgggataagttggaccgcgaccgagatctagccttgatgactgcctgctctacgggcggacaggcatcgacttgtagtgcattgcgtcaagaagcctggaaggctgctcaaagcctcatgtag

SEQ ID NO: 342373 - DNA, 306 bp, Pseudomonas aeruginosa
atggcatcacatcgcatcgaaacctactgtcagaacctggcgttccccatcggggcgcttatcttcagcaaaggcattgaccgcctggtccgctcgggtcgcctcgacccgatcccgtacttcaggcgccacacccgtggcgactggggcgacgtcaacgtccagcaatggcaggccaacagcaccgcgcttcaatcaggcgcatcgctggcatcgcactacgtgatccatccggggctggccattcgcatcgttaccgacgcggagcgccacgccaccgtcatcgttctgccgtccgaggactga

SEQ ID NO: 342374 - DNA, 996 bp, Pseudomonas aeruginosa
atggatgttgtcgccgagcatcgaggccaggaagccgtctccgaacttctgcatcagcttctgcgcggtgactgccccgatggtcgggatgcgcttcaaggctttcagcacggccgaggactggtcgctgccggacaggctgcgtgggcggatcagcgtccacaggggcgctgcgcaatggctgcacttcctgcggtactcctcggcttcgagcgcgaccgggttgaccggctcgccgtcgaggtcggtgatgaccgtgccgcagtccgggcaggccgccacgtcgccgtggcgggtgcgccgctgggtgaagacaggcttccagtggaaccccatccgcatcctgacgcgccccaggacaaagaactcctggccggtcggctgcacacccaactgctcgcgcagcttgatgagcttgaccaaggtatcggggccgttgagcacccagaccttcgcgcccgctactgtctcctggatctcgcgccgccacttgtaaacaaggtgcgggggcgagagaaccaaggtccggcggtagccttcggcgttgagcacagcggccgtggcgatgccgacggtcgtcttgccgcagcccatctcgccattgacgatcgcggcgcgctcgccacggtcaatcagcagctccgcggcggcgtggacgacttcggcctgggcctggaacagcttgcgcttgaggctggcgacgatgagctggcgatgtgcttgcggttggccggtatagaccggcgggttggcgctgttgagggcgtcgagcagttcgtcgccgaactcgccgacgaaatcctgaaggctcagggtcagaggggaagattccgcgtcgagcagttcgccctgtacgggcgcggcttcagcggcattggtttcgagatcgagggacatggtgatgctccaaagaaaaaggggcatgcaccacccccagcggggcagtggcatgccccgtggtgggaagtaaatcgacgcgtggccgacggtggttga

SEQ ID NO: 342375 - DNA, 225 bp, Pseudomonas aeruginosa
atgcatgcggtccaccagatcacgaggcggtttccagccctgtacgtccagggcgatgtgcacagcggcttggttggtttcgcagtggctcagcacggcagcggccaagtcatccagcacgccctggaggatatgcgggtcggcaccgtcgagggcatggggcgacacctcgatcttgaggtgcgagccaagggtatcgaccttgatgttgtgattcttgattag

SEQ ID NO: 342376 - DNA, 435 bp, Pseudomonas aeruginosa
atggcccgccgcaaagacgatcgaacgctggacatcttcgatgttccgcagccggcccgcgctatacctggtgagtgcaactacgccgcccaggtcagcgaactggtcagcgaaattctgaaggcttgcgaccttgaccgttacgaggtcgccgcccgcatgtcgcgcctgtccggcgatgacgtgagcaagaacatgctcgacgcctggtcgagtcccgcccgagctgatcacaacttgcctttctaccgagccgccctcctggaggacgtctgcgcgagccatctgctgaccaactggctggtcgatgtgcgtggcggccgcgtggcttacggccgcgatgcactgctcgccgaactgggtcgccttgagcggacccgcgaggaagcgagccggcaggcacgtgaactcaagcgacttatgggaggcgtctga

SEQ ID NO: 342377 - DNA, 1050 bp, Pseudomonas aeruginosa
atgcctaattttggatttcatatagcacccacccatcctgtggcagggcgcctgatttatgattctaaaaaattatcagaaaatatattaaagcagcagagcgatgaacgggttttttcaagggcgcaagagcaaaaaaggctttctgaaggtgacgtagtcggtggtgcgccttgctgtaaagctatccatattacacttggttttgatgggactaataataacgataaggctgatggttcatcggtttctccatcttgcagtaatgtcgctaggctaattcatgcaagtattgggagcggcgatgatataaacagtagggggatttttaagtactattgcccaggtgtgggtacggtgtttccggatattaaagaatttacgccttcaaacatgggattaattggtgctgagggaggcgaaaatcgaataaactgggggctggttcagttagttgatgctcttttctatactttattaaaaagtaggcttaaactaaatgaggttcaggacctagtagaagaaatgtccactaactggaccgtcagtacgctcactggtggtttattggaaaacggcgagaaaaaacgccgagctgccttggagccaaaactcaaggaactggaagaaaagcttcgacagcgtcagaactctggacagaaaccgcatatcctggccatgcgcttgtatgtctacggattctcccgtggggcggcagaagcacgagcctttgccaactggctgcaggagctaacccgggtcagcgatgccgatggtcgggtggaatatcgctttgccggtctgccgatctcgatcgagttcctcggccttttcgataccgtggcggcagttgggctggcggatagtgcgccgttcgctgccgggcatatggattgggccgatgacaccatgcgcctgcccgatgaggccctctcccagtgcctgccgaccatcctgccggaagactgttcttttctgaaacgttgcgtgcatctggtttcctgtcatgagcagcgccagttttccactcgattcgatccgccgtcgtga

SEQ ID NO: 342378 - DNA, 1107 bp, Pseudomonas aeruginosa
atgctgccgcaccctttccaccagcgcctcgcacttccagccgatgcgtccggcgatgcacaaccgcgcctgcgaaccctgggcccaggcacgctcgaaggcatccagcaggtaaccgtggttcttccgcggctcgatggtgctgaccatcaggaataccggcgccttggccttgaacatgcgcagcagatcgggctcgacggaggcgccgtcctccaccaggtccagctccgaacccaggtggaaataatcgaaccagcgttgcgcgaccttctccgggccgatgcgccgcagcatctccgcgcgcacttcgtcgcggatggtctcggaaatcgcgacgtagccgtcggcggtggccgcgatccagtcgaaccagtggttgaacaccttgaccagtccggcatcgcagaattgcggatgggtcaggggaatcaggtcgtagatcaccgagacgatgcccacgccctcgctcttgaggcgttccgccagcgggaagaaatcggcgtgccaggaggagtccagcaagaccagttggtcgccggcccgatgttcgagcggggtcgcgcgcacgggtgcaggctgctgcttgccgaggatgcggtcgagcaggcgcagcggaatgctgaggaaggcgaaggcgaacaggcggcaggctacatagagaaggcgccgggcccacggcgaggaacggaacgggcggcgcttttccagggtgcgctggcccagccagaagtagttggcggctcgctccaccaggatgcgcaggcgtaccagcggcgaatgcggccgcgggtccagcggtgccaggctgtggacctgatacagggtgccgtcgagcattgccaccgggatgcactccaccgtctcgtcggcttccggcaactcgcggatgacgttgcgcaccacccgctgaataccggaattgaccttgggatgctcgaacacataggtgcattcgaccaacagacgcgtcatggagtgctctccgcggaagtggggtccagagccgcctcgccggagcggctgatatgggtttcggcgcccagccaggagcaaccgacgaagtcttcctggcggttgttgatgacatggaagaccaggccgtag

SEQ ID NO: 342379 - DNA, 240 bp, Pseudomonas aeruginosa
gtgggctcggagatgtgtataagagacagcagccagagcagcagggcaaccgccaggaacgacagccagaaccccgcctgcaggctggccagcggctcgaccagcaagaccagcaccagcgttgccagcagcggggtcagcaagcccaggtggcggaaacgcaggcgccagaccagcgccaggctgaccatcaggcaggcgcgccgcaccgggacctcgaaacccgccatcaacccgtag

SEQ ID NO: 342380 - DNA, 1803 bp, Pseudomonas aeruginosa
atggatcgatctgtacctgggcctctccttaagctgaagggtctgtggcgtgttgatggcgtgtctcaagcgaattgggacggcaaatgcttgaaagccggggttgtgctttcagagctcaatcctgatgtagcagattactattctgcagaggctcgtcagccgaaagatcctgaacgaattgtactcaacccccattggctcagtgatcttaccgttggctcgatttggcgtgaggggaagaaggtttacaaacctgctccgctaccagatatctatcagatagacaccagaaaggccgaggtccacccgttcgatcgcggtgtgagacttggagaaaagtacacagagaatgggattgctgatcccgattttctcgaccgcagcattcaccgagatcttatcgcaagcccctatgtgcttgctcccatccaagcggataagcagtacaagtggatggttattccgtgctcagaactacttagattttatatgggacgagaaaggaggctcattgccagagttttgcgtggcgaacttgactccttggtagaaaaagtagttgtcgagggaggaactgtcactatttatgaaaatgtcgagcttacccgcactgaggccatcatccttgccagagcctatgtcgacgaagaaaattatctaaacgaaatgcagatggtgttccagagactcagacgcacaagcattaacaaccaaaattccaagagccgagccgcactatcaatcgaagtgacttttccaataaaaggcataacaaatctgagcatctctggcgtccccatgagcttggcgggcggcaaggacaacgccctatttgcaatggaaatattcagctgcacattccctagcggctactctaaaataataatcgagcgtgcgaacgaccttggaaaaggcggcaataaaaaagtacaagggagggcgccgacctttgtaccacaagaagatgatgatcttgacgacgtaattctagatgaaccgtcagattcgcgcattcccaagaggagtgaatcaagatatgaggccctcttcccttggagtgaatccatcaaactcgagtaccgtcacaacaataccgctcgtgattggagaactgtatcacctcgcgtaaatgttgatgtcgatgcctacgcactagatgaagacagcaatgaaattgcacacagaggaaaccagggagtatccgacactttaacaaaccctccacccccagccattaagctttcagagttcataaaaatccttccagagatagtaaaagctttcaagggaaagtggtcactatgtactatcatagtaaatgacacgattgaatctccgaacaaaaactatgccttgacgaacttcccaaaaataaaaggcaggcgctggaagtggcacttggtcgacaccaaaaataacggaaagatatctaccactcgccgacaacttgcctgcattgaaatcgagtgcggaataggatcaggtcgctatttttatatccttgagatggaattcaagactgacgcgcactgcacagccctattacgagaaaaaaacttcaagaaactcgacacaatcacaatcaacgaatttctcgaagccactacctacaataatggctggcctgagttcggccagccaattagagttaaagacacagcaacgaaaactgcatctgagctatatagcaagtgccgattggtagttggcaagtcaaaacatccccaaaaccgggagaagtgggcagactcccttttggcggacattaggaagtggcttgagggatcacttaagggatag

SEQ ID NO: 342381 - DNA, 1623 bp, Pseudomonas aeruginosa
atgagcagctattcgttccgtttagaccgccacctcaagaaccaggctcgaaagcttcggcaggctggcgagctcacccatcaacaagcactagaccgcgccgctatcgactttggcttcacaggctggaagcaggcccgccagcatatggctttggcggccgccaggattcgtgaatgtgagtcgtctctccctcaggaaatcgcgcatttcgcagtgcagctccgtgccacagttgggtatccctatgccgcagatgatcgagttggcatccgttatatgccccgcgacgcccagcatgtcgaaagtgttgcgaagtgcctcgtgtacctacggttgtatgaacatatccacgcgccggagcacctgaaccgaaccgataatgccaagctttggtttcgcccggtgttgctacttgaggacgcggaagaccagattgcaatcggtcgaatgaagctgcagtccctggctgcctcgttgatcaatccgaccgcgccttccacgtttcctcgcgagcgtgccccgctcacaccggagcttgttcgtactagagtactgacctacctgcatgcgttgcactcgatgtcgctgatcaggtgcttaggaaatcggcccgaatcggtgctggagcatcccagcttcaaatcattcgttggctacgctctggccgggctgcaggcgcatgcccagctcggtagttctcatagcgttgtcatatccttcgcggaaatgtccgagtgggcgcaacctggacccgcccggttcgattcacacgtgttgcggtgggtggatcagcctgctgagttgccggaaacgaaccaggccgcctcgctatccaaggaggggccaataaagcaggcgagtagaccgacccattccttacctcaagatcagcaccgttggttggctgaaagtctgcatttgatcgagcagcttcttcctgaacagccaagtttgcggaagcagttggatgtcatccgaatcaccttggcagggtggctcgcggacgaatctggcagcgctgaagtggcaggcgaggtctacttcaagccaacccaaaactacagggggcgagcgttcttggctccagccgaggagaagcggatcctgagtcttctccaggatctacgtcgatggattgaggaaggctacgccccgtgtgctccccgctcgagccttctcgacaggctgggcagcctgaagatcacactaggtcgctggttggagcgtactcgccatttttgggagaagaccaaccagaaggtcttgatggactccatagggttggtagcggtggatcccaagtatgatgtgctacacgaggaagagtcgaagtggaagcgaacagagctgatgggtacgagctgggaacgcagcttggtttcgtcagttcgtccgcacctcttcaaatactggcgtgaagaagacgaagctgacggatattccttcgacgagtcttcggaagacagcgaagaatccttggccgagcacctccacggcttggctttctatcgttacgtcgggaaggcaacaacgccagcggcctttatgcgcgacgctcgcaaggcgttctacttcggcgtggagcacgcttggtttaagcaaagacttcttcagggatag

SEQ ID NO: 342382 - DNA, 1278 bp, Pseudomonas aeruginosa
atggttaccatcgcaactcctccgtccaccgttgacggcattaagcgtcttgccatccgtatcaagcgcgctcaacaaattccccatcaaaaagctctcgaagcagcctcgcagcaggcaggcttccagaacttcctgcacgccaaacgtgagttgactaagcctctggttcaggagaggtatgccgtctacctgacggcgtactggctcgaacgcgaaggtagcccgcgacgcgcggggcgcgaaactctggaaattactttgtcgcgcaagcttggagacatcattactcgtcaccagttgggccgcggtcgcaacctgaagggtttcaagtgggaggccgaagaccaccttgaaaaggtgcacgacagctacagccgggagaaagcgctgctagcgctgtacagcgctagggacgcactgcacttcctggatgcgacggggttgattccggctcatacccaggcgcacttaaacgccatgaggattgccagcagggtcccaggcagggatcacgagtcctggtgggttgaaccgcatactaaggcatggttgtcacttaacgagccgtatgggacccgcgcccataaagaacgatatgagtgggcgcatgagcacgggctgaagctggcggagcctctgtgggatgggctttatagtccagggcagtgtcatcccttcctgctttcgcccagtgatgagttgctcgcaagggtcaagactcaggtagaggggctgcagaatcgccccccggcccaaggctctctcatctcggataaatatttttctaacttcatcagcccgtcgcgggtcgctagtggcaagacgcgacggcctcgacctcacccatcatacggtgatcgcatgggggcgacgccttacggtggggcacctggagtgccctctgactggaggcctgcaacggccatgtcgctggagcttcacatgctggtggggccaatgctgaataagctttgctgcagttccgccaagtcctccggtattacgacgcgggcctacggcaagatcaacgctgtgcgttcccgccttgaagattgggcgttcattgaacacaaggcaaccattacccgcgaggttgaggaaaggctctattacggggcggcggttgacggctattcaagtccgcagcaggcattaagcgcagtcgaatcggccattagcatacttcgctccgggtatggtgagtgcaagccacgtcgcgaactgctcgcactacttgaagcggcggcggaaggtgtcgcaggcagcatcacctaa

SEQ ID NO: 342383 - DNA, 222 bp, Pseudomonas aeruginosa
atgggccccaagcaagtgactattgaagactgggacggcggtggcgctatccgcatcccggatgaagcccttcaggagctaggcgtcgacgttggcgacactctctatgtgatcgaggagtacgttggtaatgtccggtgccttgtactcagcaagacaccacagatcccggatcgtaccgatgagctggtcgcccactggaatcgagatggagacgaatag

SEQ ID NO: 342384 - DNA, 2628 bp, Pseudomonas aeruginosa
atgagcgcaagcgaagcgagcagtaacgttttctttcaccgccatacgctctatagcttggcgagccagggcaaaatgggcacggatgtcatcgaagcattgctgcccaaaggggtgcctctggagtacgagcgtgagctttgggactacaaactattgcttccgcagaagtgcaagggaaaaaagctcacggccgaggaagctgcagtctatgacggtgctctgtgcgagataatcaaagacgtggtcgctttccataactcctatggcggctacatcgtcgtcggagtgaaagacagccccaaagaaattactggtttcgacggcgatttcgactgcgatgaattcaacaagcgcgtcacttcttttaccgggcgaaagatccagtgctatttcgaaaagcacacagtgggggcaccgctctccgagcctaaaacggttggtctcctctacattcccaaacgggccgacaacgaagttcccgttcaattcaccaaggacgccgttcagaaaaacgcaaagcgcgcctttagccgagacgatatctacctgcgcgttgatgaccaatgcatacctgcgcagtccacagaaaatttcgcgttgctgtatacgcctggaaagcgagtcatcaatgccgaacggtacatcaccaacctacccattctcgacacgaatctgggccctcgcgaccctggatttattgatttcgttgggcgagaagcctacatctctaggctctggaagtggtttgtcgaccgattcaatccggtcaagctcctcgcgggtatcggtggcgtaggaaagacggctttggcccgagagttcagcgaacaggtggcgcgagctgcgccatttgagtttcagaagatcgtctggcttagtgccaaaaagcaattttatactgccgtacaaggcaaatacgtggcctctacccgcgtcgacttcgagggtaccgatgggctgctaaggcagatttgtcttgagctcggcatgcttgatgatgagattcaggaagacacatcgcgtgaggaactcatcgaactgaccatcaacgcgttgaaggaaatgcccgcgctggtcattgttgatgacattgactcacttgaacctgatcagcagcaggatacctttcatgccctactttccattttcagtcagacaatcggtaaatcacccgtagggtctcgtgcgctgcttacgtcccgacttgatctaggcgctggtgcggggcaagttattcgcgtcaaagggctcgagatcgaagagtttgtcgatttcgtcaacatgaccgctgaggcgcttgacttgcatatgcggtttgagaccaatgcaaaacgcaccacgcgattccatgctgtgactgagggatctcctacgttcgcatcatcagtcttgcggttagtttcccttggagagcccgtcgagcaagctttgtcaaaatggcaaaatgcagatggagaggaggttcgtcgcttcgctttccagcgtgagcttgaccagctctctgatgccgccagggcaacgctttatgcgttgtgcattctctccgaaagtcatctgctcgagctgagcgtgatcctaaccagaagcgagcagcaaatcagagatgatttcgctgagctcagacgctatcacttgatcactcactttgagtcacaccttcctggaggtaaccgcatctcagtgccatcaagcatccggatgatgaaggacatcttgaaggagaagattaaaaatccgaaacggatcgaactgaattgcgctaaagccaggtcgcaaaatggtaagtccaaaaaagacattggttatgaggtcaaacggatcgtttctctctggtctaacggcgcacccgaggaagcgcttgagcacagcatcgtcctagacaagcagtatcccaaccacccggatgtcaaatgcctactggggagggcatacctgcagatagaccaaccagaccctcggaaagcagagatcagtcttcgtgcggcgcatgagctcgaatgtcggcgttcggagctgctcactctttggattaaagcaaagtcgctattgggcgactggaatggattgctcgacattacagagttcacggataaaaaggtcccagatgtcgatgtccttctcgcgcgtgctaatgctgtcgaaaacctcgctcaaattgatctcaaggctggaaacgttatgtcagcggccatgcgctgccgcgacgcgggtaccgaaattaacaacgtgttcaagttgaacaaagccacaggcgctgttattgatctcaagcaggcgcgcaaaaacctgctctcgacctatttctatttgaccaaaaacaacactacggatgcggacaagtatctcgacgtatggcttactgcgctgtattgcttcgactcgttcgtgcgaagtccacgcatactgtaccttggcctggaatatctgcaggcctggtggacggctgtcgagcgtcgcgaaaatttcagcgaaaagactgagaaaaccatgaggctgcagctagacaagctcaaccacataaaaaaaatcttcaagaagcaagaggtgccagatacagaccttgtgagcaccttcgagcgaggttttgaagacttgaaccgtcgctttgaaaagtacatcagttga

SEQ ID NO: 342385 - DNA, 744 bp, Pseudomonas aeruginosa
atgacggtttgtcatcgtcaacggatgccgggaaactgggctcaacagaaatcggataagggctgcaaaatggccaatgcaaaacagtcagcaaaacgccgcttaacgatggcggaacgtgctcagcaattgatgctagttcacttccccgagactccagaagcctggaaatggacgcgcaaaactcacgacggcttcagcacgattcctcggaccttgcccattgccatgcagatcatcgacgcccagtcgaagggacagcctgccggccacgtgctgttttgcctctgggcacgtatgcccgatcatccggtcatcacgatcgagaaccctagcacttttgctgctgaggcggggttcctcggcgagcgggccgtggacacttggcgtcgccggatgaagaagcttcgggagcttcaattcatcattaccaagccaggagcatctggcgaattccactacgtgatgctcaccaatcctaacgctgcagttgagtggatgcgccataacagcaaggttcaggatggcctgtatggccgcttcatcgaccgattgccagagattggtgcctatagcgatatcgaggcaatccacgctcattgggaagctttcgcggaagcacaaaaagcagttgctgcggctgaagccgccaagcaggcatctagtgcgtctacaccacctccgacgccgccagctctacccaccaagccaaaacgtatcaggagggccaaggccaatgcgtag

SEQ ID NO: 342386 - DNA, 1167 bp, Pseudomonas aeruginosa
gtgctccccatgcatccgcagccaatgcaagacgagttgttttcgtcttggttggtgcggcttgcattctccaaccacttcccactccactcgttctattccggccttctcgggttcaagggccaaatctggaaccgagacattgatcgctctcagcctgatcagttgttgacgctgctttcccaggcaactgggcagccgcttcaggttctgcagggtatgtcactagccaggtacgagggcactttctatcagcagctctcgagtaatggatctatcgcgtggctgctgccgcttgggatctttcatcggacccataagcttgcgggattgcagtactgcccgctgtgtttgaatgaggacccgcttccctactaccgccagccctggcgagtggcgctcgccgtcgcctgcaagcatcacggctgtgtgatggaggatctttgctcgcgatgtaaggcaccgatcattttccatcgccatggcgtaggacgcgacaagtgtccacatgtcgcgcagcttcgaaagtgccatgcgtgtggcgctgatctcgggctctccatcccccggtatccgtcctggccagatgagcggacgctggagctttcgatggcgctggctactgattttgaggcgtgcccttggaggcagattgtccaaggtgtgccctgtgcgatgcccttctttgtgggcctgcacaagctcctctctcttctgaatggcaggtacggagagcgactgcagcgcacattctgcccggatctaggcgtcgaggtgttgctttcctcaaaactccactttgagcgccaggggattgagcgccggctgcagttggttcttcgcgcatgctggttgctgcaggagtggcctgagcggttcgtgcgctgttgccgaacaatgggcatgtccagaagccgaacgacagagctcccagggatgttgccctactggttggagacggtgctctcgaaccatttggacctgcgggtctacttcgtttcggagcaggaggtctccgaagcggccaactatctggccgcgcatggccaggaggtcgctttggatacgttgatgccgcttcttggtcagcagcgtgatgctactaggcggttgtttaaacaatggtgtgccggcagagatcgaaaggctgctctgatgaggtcgtag

SEQ ID NO: 342387 - DNA, 894 bp, Pseudomonas aeruginosa
atgagcgaatttacgcacctaatcccggctgtggcagataaagcccggaatatgagcaatcaggagcgcaaagcgttgctggcagcgcctcgctggctcacctacacgcgggcgaaggaaatagattcgaagcttgagtggctgtatgagcatcctcgggtaacaagaatgcccaacatgctggtcatcgggcgcaccaacaacggcaagacggatctgattacccgctttgcctctcggcatccaccttgtgataaccctgacggtgagcacattaccgtgccagttctggtcgtgcagacccctccaaagccgacagaggctgggttttacttggagctggtccgccctctgctgaagcgtcttcctaatggctcagcagatgctaagcgtgcattcgtggtggatattctcaagggcattcagctgaaggtcctcgtgatcgacgaaatgcacaatatgctttcgggaaccgcgcagagccagcatctctttctgaacgtcatcaagtacctaacaaacgagctgcagatttccatcatcggagtaggtgaccagacgctgatcaatgccttcagtgtcgacgagcagctccagaatcgatttgagcctgagattcttcccaggtggaatcgaggcagtgagttcaatcggctgctttcctccttcgagttgatcctgccactgcgacatccttcgcgtttggtcgatacgcagctgtcgatgaagctgctagcgatgtgtgaagggactattggagagctttcgaagcttctgaatgccgcaacacggtatgccattgactctggagccgagcagatcaacgacctggtgttggagaagtgcggctacaagcccccctctgaacgcaagaaagcggtagttgaggtttga

SEQ ID NO: 342388 - DNA, 1866 bp, Pseudomonas aeruginosa
atgagtgcgatccgtcctggagcccttgcctactggcgtgatgaggcctgtatcgttctggagatcaagggcttaacagaagccgtgatcagaactacagccgatcagaccacccacgtagttcgggcaacggagttgtcgactacgcccacatctaatgtggggctgaaagcgaagcacatttttgcggaggaccatgaatgggacctagcaacggagcgctatgaaatcatccgtccgctcttggggaatgcgcggtgttctaaggaagacgtgaaggcggttgctgaagctaacgagaaatgcgtcacaaccatctatagatggatgaagcgttttaagcaaaccggattggtttcctctctgatacgtacagcccgctcagatgcgggagtcttgcgcttgtgtgaggaggtggagtttgtcatcaataaaaatatccaagagtattatcttggtcgagaaagaaagaaaatctcgaaggtgcactcatatattcaagcggagtgtaaagagcttgggctagaagagccgcatataaataccatttatcagcgcgttcgattaatcgatgagaaagagcgtcagcggcgaaggttagggcctaagatagccaagcaaaacttagatccgctccgaggtgcatatccggatcccggatttcctaacgctgttgtgcagatagatcacactcccgtcgatgttattttggttgatgagttgcataggcttcctattggtaagccgttcctcacaatgagcattgatgttgaaactcgcatgattggtgggttttgcttgactcttgacccgcccggtactttgtcgaccgccttgtgtattactcacgctgttctcaaaaaggactattggctagcgaaacgtgacatttcagccgagtggcccatttatggattgatgcagaaaattcacgtcgacaatgctgctgagtttgttggtaaggcaatggctcgtggctgcgaggagtacagaattggtgtcgaaaaccggcccaaggggcagccaaattatggcccgcacattgagcgtgctttccgaacctttatgtcggaggcacattcgttgcaggggaccacgttctcaagcgtcgctaagaaactagactacgactctgagggtaaggcctgcctaactcttgcggagcttgagctttggttaactatttttattgtttatgtttatcacaataaggagcactcaggaatttgtgatattccgccaatttatcgatacacggagcttgtgcatggaactaaggatcgcccaggcattggattgccggaggtcataggaaatgaagagaaatttcggctgaactttcttccattcaaattaataacggtgcaaaggaagggggtggtttgggatcatattcactactatgcgccaattttgcaaagaagaattgcggagaagggggccgatagcaagggacgtaaattcatattcgttcgcgatccacgtgatataagcgtaatttattttcttgatcctgatgactctacttattatccggttccatacttcaatgcgaatcacccgcctataagtatttgggagctcagagaggttaagcggcgtattgaaagctcgagactgcctgtcaatgagatccaaatatttgagggttataggttaatgagggaggtcgagaaaacgtcactcgagaaaactcggttagctaagaatgctcgggctgtggataaaaggaatagaagaaactctgcgcggcgtgagggctggaaaggtgttcattccaaacctgtgcgtgataacgatatccccgtcgtgccagctgatgcagagcatgatgacatccaaccgtttgagatcgagttaggttga

SEQ ID NO: 342389 - DNA, 702 bp, Pseudomonas aeruginosa
atgtccaccgccactcaccccggtattcggagtcctgactccacccaacgccccggtccagttcgtgaggtaagtcgtacctcccgagggatcactggtactgtcgccggcatggggcgctatgagtcgacgcttgaacgggacgtgatggagcttattcgctttgatcgaaccgttcgccagttcactcctcagcctctcaccatcagctaccgcagcgccgaaggcgccgagcgcagctatacgccagatggcctcatccattaccaccatatgtgcccgcatgagccctccatcctttatgaggtgaagttcagggctgacttccgcaaaaagtggaaaacctacctcccgaaattccgagctgccaaggcctactgccaggagcgcggctgggttttccgtgttttcactgaggtggagatccgcacggcttacctcacgaatgtgaagtttctctggccatacctttcgcgaaacgtcgatccggcacttcgagatcatgtactgacagtgctttgggatcttggggaagccgatcctgattttctgctccacgctctgagctccctgcccaatgggcgggggcatttgattcctgtgctctggcacatggttgccactggcgacatcggctgtgatttgggcttgaagctgacaatggcctctcggatttggcccatgaaggaggttcagccatga

SEQ ID NO: 342390 - DNA, 321 bp, Pseudomonas aeruginosa
atgagttttccgaccgcagtcaacgaccagatcaccgatgccgtcacccagtccaacgtcaaggtcgtcggtgaggcgccagccatggcgctgggcaccatctaccagaccatggcccactccaccgggattctcttcgagaacgcggtgagcgcccagcaacagcagaacgccctggccctggccgcctccaacatgggcgtgatgcaaatctacagcctcgacaccgccgccgatgccggagccaccgagaaagtcggccagttgggcgtggccgacaacctcaccagcctgctgaccgtactgaaatccttcacctga

SEQ ID NO: 342391 - DNA, 1983 bp, Pseudomonas aeruginosa
atgactccgtacgacgaaattcaagttgcaattgagagtaaaacaaacttcgtcttacagggcggtgcaggcagtggaaaaactgaaacattaaaagtcacgctagaatacatatcaacacacgccccaacaaaaagagtagcatgtataactcacaccaacttggcagcagaagaaatagccagccgagttacaggggagcattacataggaacaattcactccttccttgccagcctaataaaagactacaaaaaaaacataaaggaaattatagacattctattcatactaaaaaaaacatatgaatataaaaaaaccgagggagaagcggcgcataaaagctataaaaaggcgtatgaaaaatatcaaacaaggctatatagcctaaaaaaagaaaaaatagataagtgcatagacaaaaggcaattcgacaaagatcctgataattacacacatgaactgaatgcaaaaattgacgacctaaacctatatataagaaaaagaatcgaatccactccgacacaggcaataaattacaacgaatcaccgttcgatagtcttgatgacttaagttacggacatgatggactgattcagctatctgcagaattaataaaacgacatagaaagctacgacgaatcctatccgatagatatgactatatattcatcgacgaataccaagacacatcacccattattattgattcactactgacaaaattcggtgaaagatcaccagtattcggtctctttggtgactcaatgcaaggaatctatgaggatggtataggtgacgtaaacgagtatataaaaaaagcgattctaagaaaaatcaagaaacccgacaactatcgatgctcagaacaagttattcgcttcatcaatcgattccgaactgatgacctacaacaagaactagcattaaaaaaagtagagggaaatttagagtcagtagaaaatcgacaaggattaaccaaacttttctacatagtcatcgataacaaaccgcactctcgcagctcggcagaagagaagtctagctatatcaacacaatccatagcctcatcgaaactgcaaaaggagaaatggttggccccttcagaattctcatgttaactaacaaggcaattgccgaaaaggcagggttcggaaagttatatgaaattttctctaaccgctttggccgcaacctaaaggatcaacttgaaaaaactcttaacacacttcaattcaatgaaatatttaaccttataaagaacaaggaagacaataaaacctgggcaacaatagagaacatcaaaaagtccggctatcggctcgatagcgcagcgtcgaaaaaaaccttatccgcatcaataaaaaaacttaccgaccccatgctttcagcaaatgaagcgatttctaatttactttcattaagaattctttccgaagcgccgtcccgagcaagattcataacaaacagcaacattttccttgaaagcttaaataaaaactccaaataccaggatttcaaactcctatatactaaaggacataacactttcgcaaaaatacaaaaagagaacttcgacattgacgagtacgaattcaatgaacttgagaaggacctgaccaaagaaatttttatacaatcattgcttgcagacagtttaaagctatctgaaatagtcaactattttcgatatctaaatgaagaatctgaatacatcacgatacacaaaacaaaaggaaccggaattaagaataccatcgtagtatttgaagagtttttttggcaagactacaagttcaatgaaattttcacagaaaagcattttccagaaatatctcccacaagtaaaaaaattctatatgtggctacctctcgaaccatttcaaatctttattgcatacgtgcaatatcatcttctgaaaaagaagatattggaaagttctttgatgtgtcgcaggagataacaattgaccagatttaa

SEQ ID NO: 342392 - DNA, 1944 bp, Pseudomonas aeruginosa
atgaaaatccagcgaatcacagctcaaaactttcgaatgctgaagaactcaaaattggaccttcagtcaagcctgtcactgctcataggaaggaacaatagcggcaaaacttcacttcttatcctctttgaaaaattctacagcaacaattgcaactttacatttgacgatttccccctcgatcaccgcaacgaactactaaatataacggagagtacggatgaaaatagcctagccatacgaatgcttttggaaatcgaatactctgagaccgacgacttaaaccacctatcgcactttatacttgacctggacgacacttcaaactctataaagatattgtttgagtgcacaattgacaaaaaaacgcttctcaaagacttagaggaatcaagcgctgaaaaaagccgatacattagaaaatacatcggagattaccttcgaacccatatctatgctttagataacgaagagagcatatttgactcaagagagaaattagtccccagagaattaaaaaaggtaaaggaacttataaatttcgaaataatccatgcgaaacgggatgttgcaagttcagagggcggcaagaaaatactttccaaactgaccactcaatacttcaacaagaagaatagcgaaccttctttattcgacccaataaatgacctaatcattgacatggatgaaagcctagaacaggcttacatgacattttttgaaaaattcctagaaagctcaaaaaacttcctaacaatagacaatataaaagtaatatccaaccttgaaagcaatgagatattagaaaacagctctcaagttgtttacggagcaaatcaaagctttttacctgaaacgtttaacggcttaggccacatgaatatcctctatttacttttaacaatagagataaaaaaagaatcattcataaaaaatcacaggcagataaacctgttattcatagaagaacccgaggcccacacgcatcctcagatgcagtatattttctccaacaagatcaagtcattgcttgccgaaatagaaaaccttcaaacagtcatcactacccactcctcacacatagtatcgcagtgcgacttcaaagatatacgatatttcaaatgtgcaaattcacaagtggaaataataaacttccactcagagttaaaacttaagcactcaaacgacctcgactcctttaatttcatcgagcaatacctaacactgggatcatgtgagcttttcttcgccagcaaagttatatttatcgaagggatttcagaaagaatattatggccatatttcgtggatgcctttgacgctaaaaacaaaggaacagcaaattacacgcctatttcatcacaaaatataacaatacttgaggcaggagctaacgcaaaagcattccagcctttcctagaattacttgaaataaaaacccttataataaccgacatcgacacaacaagatacgagaaaaccaacgacgaaaaaaaaggagtctacgtggcatgcccagttttacacggaacccacaccagcaacgcaactataaaatattacctgtctgcgccggagcataaagaagaagacaaattcaaagaatggtttgaaaaattcatcaataacgaaattaaagaaaaaaacagcttcattaaagtctgctatcaaaaatcagaagaaggctaccacggtcgaagcttcgaagacgctttttataatctaaacaaagaaaccataaaaaaatatattgaaaatctatctggaacacaaaatatagacaagatagaaacttattcagacccttatgagaccatagaaaaaatagtttcaaagaaatccacctttgcctcttcgctactataccttgcattaacaaatcacgaaatcaattggaaaacccctcaatacatcaaggatggcctagagtggatatcacaatga

SEQ ID NO: 342393 - DNA, 699 bp, Pseudomonas aeruginosa
atgaaagcagactgggacgacgcaccgcagcacctcaagcgcaaacgccaaagcgctggaaagtgggtggctgccgttaccgccggagtcgccttcaccgccctggccgtctacgtgacagatcaaaagctcacgtttcctcctgagccgccaattgctcaagcgcccccggcagaaagctacacgccgaaatacgcattcaacgagcccgccggccagcccgccacgtcaacagagcaactgttctgggacgatgtgaacgagcgcaaccgccaacaggcccaaccaaagcaaactgtttataacgacaccaactacgtccccaagggcgccacaaacatcgtagacatggaggccgtacgccaatcagaggcgtaccggaattccactgcggcttcgggcatatcttcccgcaatagcatcgagcaatccggcgcatgggtagataaatggagcggcggcgctcgttactacgcagagtggacggtgttcaacaattacatcgacgatacttcggtatgtgctaatcacaatcgtggatcaataagctatcgtgaatgtagaaaaggagcgaagcagttcttcaaagaggaatgccgttcttggaaagaaaaattacaagatgaccggaaatccttcagttatttaattagacagcgatactgttcggccgctagtagtttcaacccaatgggatag

SEQ ID NO: 342394 - DNA, 204 bp, Pseudomonas aeruginosa
gtgggtcaggatggcctcacttcaccactcaaccgccctacccgcatcgccgaaatcctcaaaaccagccccggcgaatcgatactgccaacgctccacgacgtgcagattcacggcatggcaaccaatgcactggtgatcaccggtatcgagttcatcgacggcgtggcctcctcacaaccctggcattgccgggtgacgtaa

SEQ ID NO: 342395 - DNA, 2448 bp, Pseudomonas aeruginosa
atgagtatatctcttgcggaattaacaaaaagaataaaaccagaaaagacaatcctcttctttggagcaggctcatcaataccctcgggcgccccatccgtatcaaagataatggagagatttgcagaaaatttccacattgagcaaaacggatactcattaagtgaattctcaagcatagtcgaacagagtttatcccgaagggagatgattcaatcactaagaagcctgttcaaaaacttaaccccgaccggcagtctactgaatcttcccttgtacaactggaagaatatttacaccaccaattatgacacactgatagaacagtcttacgcaaggaagaataaaaatctatcggtcatctcttccaacttcgactttaccgtccaaaagattcctgaggcaacaaaactatacaaactccatggaacgattgacaaagatgaagtagatggagtccatagcagaataataatcacagagaacgattacgacttaacaaatgaatatagagagcacctttacgagtctctaaaagtcgaccttgcgggctccgatataataatcataggctattcactatcagaccctcacataaaagaaataataacaaaatcactagacataaacagcaagagccatagccctgccacagtaaacctaatcctctatactcctgacgagaatcgagcacaactccatgaaaggcgtggaataaaagtagctttcggagggttagacgagttcttcattgagctagacaagagctatgatccaccaccggtaagctatagcttcacgggcgatccattagataattacccgtcccttcacccagtaacaattgacgtagagcatcaactaacgtccacaacaaaggatgcaagcgcaatgttcaatggctggcctgccagctactcggacattgccgctaacctcaccttcaggcgtactcatacggcaagcatctgcaccgagatagaaaagcacaaagcactattcatcatggtgcttggcgccagcggcaccggaaaatccaccctcgcaaaacaggtaatttactccctaagccagagcaactacaaaacttgggaacataaaacagaccatacacttctagcagatcagtggagacaagtcgccaagaccttgaaagagagaaacgagaaaggagttctcttcattgacgaagcacacaaccatctccacgaaatcaacgcgcttgctgatcttttagttgctgatgagtctgaaaatctaacactacttttagtttccgcaagaaaccaatggaacccaagaataaaaacgccaaacctctttaaaagaggcgaactatttagattaaagggactggacccggtcgagatcgaagaacttctcacactcgtagataccaacccggacctaaagccattggttgaaaacaacttttccggcttctcccgagcagaaaggaaaaggcgacttaccgttcgctgcgaatctgatacttttgtatgcttgaaaaacatatttgcatctgaaaaatttgacgacattgtattgcgcgaatatgccgcactctcaagagagcatcaagaaatatatagattggtagcggccatggagagttcgggaataaacgtccatcgacagttagtcataagactcctcgggatacctgccgagaacatcactgcttcgctaaccaacttagtcgatattattcatgaatacgcgatcagcataaaagatgggatatacggctggaaaggaagacacccggtaattacggacataatttcgcaatataaaatgaccgacgcagctgaatactatagtttatttgacaatgtaattgaccacattgtgccaacctatgatgtagaaattagaacaattcggcagctatgcggtttagaaaaagggatcggcagaatcccagacaaacacgtgcgaaacaagctactgcgaaaaatgatatctaaagcccccggagaaagggtgccacgccataggctaattagaaacttaattgatataaacgagcttgaaaaggcagacacagaaattcgcttatttgaaaatgatttcaaagcagacggcccagtccatagattcaaaataatgctcttattggccagggctgatcgtacaagtggaatacttgaggaagacagaatcgcgattcttgagagagctagcacttacgcgaaagacgtcactgaacggttcaaagataacaaggacattcttagaacatactgcgatgtcggcgttgaaattttccgaagaactaaagactttagtgtatttgacgatgcgatgggaaaattgaaacaggcggaagagcgtatcggcgatccagatataacatcaataatagtttactatcaaagattagtatcgggactagattttggtgggcaacagaagctggaggacgaaataccgtccgaaagctaa

SEQ ID NO: 342396 - DNA, 1128 bp, Pseudomonas aeruginosa
gtgattcgagttcttataggcgatatttttcaaagcgatgcccagaccctagtcaatacagtgaactgtgttggcgtgatgggtaagggggttgcgctcgaattcaaaaagcgctggccaaggatgatgcaggactacgctgaacgctgcaaagaaaagcgcgttaagccgggagagccgtatctatactctgatatattcggcacctctatcgttaactttcctaccaaagatcattggcgttcggcatctcggctttcagatatcgaaaagggcctttcaatatttattgaaagctacaaaatatggaatgtaacttcagtagccttccctcctttgggatgtggaaatggtggactggaatgggagatagtggggcctatcatgtacaagatgctctctaagctggatatccctgtagagattttcgctcctttcggaacgcctccgaatcaactttcacctgacttcctggcaccatcacaacatcgtctattcactgagtcaggccacaaaggaagtcgtggccagaaattaaaccccaactggcttatcttggttgaagttgttaatcaacttgagaagcaggattacgcaccaaaggtcggccgaaccatattccaaaaaatatgccatgccgtaactgctcttggaattgaaactgatctagattttcagagaggaagctacggcccattctcagatgaagttaaaaaagtcttagtaacactagccaatgcaaacctgcttcaagagtctcagcttggaagaatgaatctgttatcgacaggccccgagttcgcaaaggcaaaagaaaagtacaaagacattattgattccaatcgtccaaaaatcgacaagaccgtcgatctctttagtcgaattaaaaacacagagcaggcagaagaggttgccactgtgttttacgcggttagtaagttaaaagaagagaactctactagcacaattccagagcgtgaggtttacgatttcgtatttgactggaaaaaatcctggaacaatgaagataaaaagaaagcgatagcttcagctattcgcaatctatccatgctcggctggatcagagttagcatgagtgattgcttgccatttggcgaatttgcatga

SEQ ID NO: 342397 - DNA, 876 bp, Pseudomonas aeruginosa
atgagtcagggattttttgagctaaatatcgcatggtggaattgcggggtttctcctccctctacggccgcaacccctgcggacatagactcagctcacttagaaaccataaccgagctggtcgaaacttattccgctgacataattgctatttgtgaagttgacttagaagacatagagaaaatcaccgagcatctaaatgaactctatcctgataaattctcgacaattaatctctatagaaaatcaggaaactcaattgatgatttattcctaatcatcaatagtgcaaaaataaagcagacaaatgaaccagagcgattaaatcgaaaagcccctggaacagataactatctgaaggccggatatcttgtccacttggcgctttacgatggaacacctctctggcttactttaagccattggcaaagtaggcgtacatatcaaactgacacagctgttcgcgagctgctcggcgaagcccttagaagtagcgtcgagccaattctatcgaaacatgccgaccctctcatcgccctttgcggggacttcaacgatgaaccttttagtccgtctattcagcgactaatatccagtcgtgacatgaactttgtacggagacgatctgacactttcttcaatcctatgtggggacttctaggaatggactttctatccgattctggagttgtgcatggaacctacaacggcaatgcaactcatctatcccacaagatgactcttgatcaaataatgctctcccccggattcttgaagaatggttggtcttttagtgagattggagttactgcggtaaatcacgcgagtgcatccgatcacttacccatcgtgtgccagcttcaaaggataatttaa

SEQ ID NO: 342398 - DNA, 201 bp, Pseudomonas aeruginosa
atgagctatctcgtacttcagcgtcatgcgaatgagcgcatcgtgctgactgcgaacccggatgcgggtgatgagaacctgatccagggaatcgcggtgtgcgtgacgcgtaccggggaaaagacagtgagtcttgggatcagcgcgcctgagtcgatattgatactgcgcgcggagctgctggagccctgcgtgctgtag

SEQ ID NO: 342399 - DNA, 993 bp, Pseudomonas aeruginosa
atgaaaaataagtcgaccataacaatatgggacggatgcgatcccactgtctcggaagccattggtcagcttcaggatcgctggcacccgtactccaagtattcgaagcgctatcccatcgttcggctgatacaggagctgatcgatcccgccgtggccgcgtacacgacgacgctgccacaacgctacttgggtcacgtccctggcgcaggaacaggggtgagcctcagcggaatcattcggttggtggggcttgacgcgatggttcgtgtgcagcgtcagttgctgcgccagttcgtcaaaactgcggacatacaatctgcgagggaccagcggtttgtggcgacactggaaacattgattgagctggtggaggactgcgcctgcaaacggccggcaaagtcccgagtgcgcaccacacgcctaaatggggagcgccgccagggcttttgccgattctgcggatcacttaccgaactcactatgtacgctgacgggagcgacaccccgaaggccaatgatctagatgaagagcttcggctgagcagccaatactgcctggatcatcgacccagattgccgagtggcgcctggaacccagcctaccggcaagcgaagcgatcagtcgcacagttcgatctcgaattggcaaggcttagccggcaatgcgcaaagcggtccatgccccatgcggcagcatccggagacccgttggttgacgactacttttttcactacatgctaggtcagaccttacagcctgccgacatagctgagctgcgcaacctggcgcgactgatggtggactccaagctgtcagacaccaagaagagaatactgatgctccagcattcggggctcaatcagtcggaaattgcagaacggctcctaggcaaggaccaacggccactgacgcgccaagcagtgtctaaggcaattgcctctatccccaagagctttcacctgaaacaaccgaagcgtcctgggcggtga

SEQ ID NO: 342400 - DNA, 753 bp, Pseudomonas aeruginosa
atgagcggtggtaatgccgtgacccccaccagtaccagcgcgcaggcgcgagtaatgctctatcaacctagccagcgcccgcgcttgcgcgaaggcgactggatggatacctcttttggtcgctgtcgcgtgaccggcaggttaggccagcggcacgccgatattgttgaggcggttttgtactgcgccgaacgtcggcgcgatgtttctgatggtggtgtcgagctgctcgtagacccggcccgcgtgcgaaaaacgctttccgacagccggtacagctttactcagatcgaaaagctgttggccgagctgagagctgcgacgatcacaattgagacgccccagttcgatttcccaatcatcggcggattgattgatcacgttatcccttcacccatgacacgccctgaccctttgacgggaagagagcggaatctgtggagggtgcggcttggggttgcgcttgtgatgctgctcgaacatgacttgagtttgtactatgacccggcccccattgctcgcctacagcatggcatcagccaggccgtcgcaaggcacgtcttaagccacaaagtcgagccgacgggtggttggtatgtagacaccgttatcgtagctgttgctgggaccgtgccaagcaaggcaatgcgcgatgcacgattcaggctgagggaagacgccgacgaattgaaggcgctcggcctgactctggatggcgaccgcgtgaggaaaaaaggtgctggtgacgcctaa

SEQ ID NO: 342401 - DNA, 177 bp, Pseudomonas aeruginosa
atgcgagaggtcatcgcgcacgtcgagcgcgaagaaaaacgcgagacgttcaaacaggatgcgctccgcgcctggaaagagtatcggcgcaccggcctgcacctgacacttgaagaagctgacgcctggctcgcaaagctggaagccggcgaggatgcggagctgcctaaccagtga

SEQ ID NO: 342402 - DNA, 711 bp, Pseudomonas aeruginosa
atgagagataaacacgacccaggcacgctcgacctggaaagcggtcgtctgttgatcggctacgccagggtatcgactgatgaccaggacttgagcaatcagcgccacgagctgcacgcagccggctgctcgcgcatctttgccgagaagatcaccggaacccacgcgaagcggccggaactggcacgtatgcttgatcaccttcgctccggcgatgtggtgacagtcacgcgcctggacaggctggcccgcagcacacgcgatctgctggacatagccgaacaatttcaggcccgaggcgcgggcctgcgtagcttggccgagccgtgggccgacacgaccagcccggccgggcgcatggtgctcaccgtgttcgctggtattgccgagtttgagcggtccctcatcattgatcgcaccaggcgcggccgcgatgcagcgaagggccgaggcgttcagttcggccgccgtcctgccctgactccgggccagatcgaacatgcccgcgatttgctcgcggatggccgttcagcgagcgagacggccgagctgctaggagtgcatcgggcgaccctctatcgcgccctacgcggccaggaaacgagccaggccgacgccatcaggcgcggcggcgcgttcgtcgagggcgcattgacagagaggacgccttggcggccgccggccaaggggacgcacgaccatgacgaatga

SEQ ID NO: 342403 - DNA, 1182 bp, Pseudomonas aeruginosa
atgagtaactccgatcttgacgacctggcggcagagctggccgagttcgctccggctgcgaagaaaaatggccgcccagccagcgaggagcgtgtcattgctggcttcgaggaaatccaacgcttcacagagcagcacgggcgtgcgccgcagcatggcgaagcccgcgacatattcgagcgcctatacgccgtgcggctcgaccgtctacgcgcgctcccggattgccgcgccttgcttgagccgctagaccatcagggcttgcttgctggggcaccgaccgttgccgcttcggcggacgaaactatcgacatcgacgacctggctgccgaactggcggatgttgccggcgcggacgacatcacggtcttgcgccatgtccgtaccagcgccgaaaagcgcgccgccgaggagattgcggatcggaagccctgcgaggattttgatgcgttcaaaccattgttcgatcaggtacgcagtgatctgagttcaggtttaagagtgactcgacctttcgggcagtacgcaacgattgaagtaggccattggttcatcctggacggtcaaacggcatatgtggctcaggagggtgaagagttcgactcgccacaggggaagaaggatgctcggctgcgtgtcattttcgcgaatggcacggaaagcaacctgctgcggctgtccctggctcgcgctttgtacaaagacgaaacagcacgtcgaattactgatccagacattgggccgttgttcagcgattctcttgaagagggtgatctggatagtggcaccatctatgtgttgcgctcgctatccgataccccctatgtggccgagcatcgtgatgttatccacaagattggtgtgacaggtggcaaggtagagacccgcatcgccaatgccgaacacgattccacctacctgttggcgaaggtcgagttggtagccacctacaagctcgcaggcatcaaccgcacccgaatggagaacctgtttcacaggttgttcgcacccgcacggctgaacatcaccatcaatgaccgcttcggccgtcccgtacagccggaagagtggttcctcgtcccgctattcgtcatcgatgaggccgtcgcgcgtatcaaggatggcagcatcaccggctacgtgtacgacccaaaggcggcgaagctggtaaaggtagagtag

SEQ ID NO: 342404 - DNA, 945 bp, Pseudomonas aeruginosa
atgcttcagcacgccagtgaaatgttaaccaaggcgttgctggttcagaaggggcagagcgtcttcgacaaggagaaggggacctccatcggtattgagaaggcgttgaacattgctcagtctcaagggtggattagcgctgcgcaagcgggggctgtccgcgtcattgacgccatgcgcgaccaggcacagcactggatgatagtagttcctgaggatactctctacatcaacgccagggcgttaatcaccgttctggatgaagtcctgactgaacatttcggagatacgctcgccgacaaccttccggtgcgggtccttcccctttctactcaagcgctccccgatttcttaatgctggtgaatcgggaatacgcgcagattcgagaactgcttgctccgggccgaagagcacgagatgaagccagggggcgaattacagcgctcctagctatggaagcccacgtcagtgaagaggtagcggtttccaaacgagacctggatcgaatcgaagaggccatcaaaggtaacactcccgtggagcagatattcccacggttgatgaccctggcaacgaacgttgaaggagaaggcccaacgattcgtgtcagaattacccgagcggcagacgctcctgcggtccgcttcgtatcgggcgatgaccctgagggtgcggcagccatccgtgaagtagatcttcagaagaagtaccactggagtccgagcgcgttggcggaaaagctggggttgacgatcaacaaggctaaggctgtccgcgacttcctgcatatagacgaagatccagccaacgttatggtgttcgagttcgggtctcaaaagcatccccggtattccgacaacgcactgcgcgcgcttcgggaagctatcacccccgagttggtcgaggaagcatggcgtgcacgtccacggggtcgtattagatag

SEQ ID NO: 342405 - DNA, 3300 bp, Pseudomonas aeruginosa
atgttgcagaagaagccctacaacggcctccacgaaaaggaactcaaccagatcaaccagcaggatggcagcccctgcgtagccatttccgcaccgggctgtttcatcaaggggtccaacctcttttccgaaaagcgggccggtaaccgggtccgcttcttcaccaccggccgggactacttcagcgacctggccagcgccctcgacagcgccagttcgagcatcttcatcaccggctggcaggtcaactacgacgtcctcctcgacggccgccgcagcctctggcagtgcctgcgccaggcgctggagcgctcgcccgcgctgaaggtctacgtgatgccctggctcagcccttccggcagcctcggcacctatgacttcgaaaccatgctcgcggtgttccagctcaacgccggactcgagggcggcgcgcgcgccttctgtacgccggcgatccagcagagcgacatgcagggactgggcgtcgccttctcccaccaccagaaatccgtggtgatcgacaaccgcatcggctatgtcggcgggatcgaccttgcctatggccgtcgcgacgacaacgatttcagcctcgacgcctccgggcgccggggcaacgacgcctataatcccggcctaccgcatcttggctggatggcggaggacgaacacgtcagctccatgggcctgatgatggccaccctgttcgacctttccaggccgctcgccagcctgacgctgcatgcgcccacccttcgcctgtcgcccttcccgcacatcgccgccagcgacgaaccgctgctgagcattcccctcgcacccagccgcgcccgcgccctcaacggcgccgcctacctttccgacctgttccgcagcccgatgctgccctccctgcaatggctcggccgcgcctacaacagctcgaaagaaggcctggacgaaggcttcgaacggctcgatgcgctcaggcggcagatggtcgccagcagcatccgcgccattgccaacctgatcgccgacaacctcgactccctgcccatcgagcctgaactcgaacgccgcctgcgcgcctggctggaggaactgcgcacggccgcgctcaacctgccggaagccctgcggatcaagagcctgctcctgatcaaccagtggatgagcgaaaccgaactgggccaggtcctgaccctgatcagcggcaagggcttcgaagatatcccgcagaacctgagcggcaaggccggcgagttggccggctcgctgttctggacactccacaggctgttgcaggcccgcgccggaggccaccagcaaccctatcgctacctggacgaagcgcctcagccattggcctcgccggacaacgcccggctggccgccgaccagccgcgcatgccctggcaggatgtgcattgccgcatcgaagggccgtcggtgtacgacctggcgcgcaacttcatcgaccgctggaacggccagcaggcctacctggccaagacgccggcgctacaggatacggcgctggtacgcagcgccctggaagccgtgatgaagtggctgaacagcctggccgccgccgcgggattggagaactacctggacgagaagcgcaacctccggctcgaactggacccacccatgccctgctggatcaacgcgccggaacagttgccgcaagagccggaggtgcgccgcggcggcatgaccgtacaggtactgcgcagcgccgcggcgcgcatgctcgaacaggagcaggccggccgcctcggcgcgggagtgaacctgcccttgcaggtcggcgtctccaccgaaggagtccagagcaactgcaaggacgccatgctcctggcgatttccggggcgcagcagttcatctatatcgagaaccagttcttccagagcgagttcggcaaggaaggcgaagttttcaaggatctgcccctttcaggccccatggccagtctgcgcgacgttggcagcctgcgacgcgacttcgtcgtccggatacgcttggaggaagccctggagcagcgcgacctctggctgctggactgggccgaagtggagaagatcgcccaggagcctggcaccgaggcccgccagttcctcaagtcgatgctcgccatgtggggcgtgaacgcccagggctggctcacccacaagctcggcgaggcccagcacggcctgctcaacgagatcggcgaagccctggcgcggcgcatcgaacgggccatccagcgcgagcacccgttccacgtctacctggtcctgccggtgcacccggagggcgcgctgaacgtgccgaacatcatgcaccaggtgcacctgacccagcagagcctggtgttcggcgaacagagcctggtcaagcgcattcagcggcagatggcgctcaaggccctggaaggcaagtccgacccggcccaggcccgggaaatcatcgagcgcaaggacgctcgcggtcgcccggtctacgaacagcaggactggagccgctacctgaccctgctcaacctgcgcacctgggcggtgctcggcgggcgggtggtcaccgaacagatctacgtgcacagcaagctgctgatcgccgacgaccgggtggccatcctcggcagcgccaatatcaacgaccgcagcctgcaaggcgagcgcgactccgagctggcggtgatggtgcgcgacagcgagccgctgacggtcaggctggacggcaagaacgacgccatcgtcggcaaggccatccaccagttgcgggtgaatttgtggaagaagcattttggcttgagccaggggccaggcggtttcgtcaagccggccagcgagttgagtacttatctgtccatcccggcggctcaagaggcctgggaagctatacaaacattagccaaggagaatactcgtgcctatgaacggactttcaattttattccccaaaatatcagccagactcaactgcaactgactccagagccgcctaaaggatttgaggacggatttcccgcctccatatggcccacctgggcatacagaaaacctggcgagttaagggcgggcggacaactgatggagccgatgccatatcaggaaatcttctggcgctcatctaatctcacttcggtgaaaaccttcccaccacccaacggggtttccggtttcatcacggctctaccaaccagttggacccgtggtgagcgcaatgattctggcttgaatctaagcatcctggcacatcaggacagcagatcgcttcccacccaggtcgccatgaatggagatagctcggcacaaggaaagcatcgcacatga

SEQ ID NO: 342406 - DNA, 507 bp, Pseudomonas aeruginosa
atgccgttgacgccgggggcggcggacgccgatgtcgcaggacgcccgctacaacccgccaacgccggtctccacgccagcgatccgaagcagaacggcgaataccgcttcgatatccgtttgcaggatattcccggagacgaaggattccccttgattcatacgccctggcgcatcgtccagggtaaggagcacaacctggtattggaaggcgagagcgacgagaagggacggttggtgctggacgacactcaacagcgtcagctatcgaacgcctgcgagcgtgcgcctggcgatgtctggctggtgtatccggggcaacgaataggcatccgtccgcatcgggagcgtgagggttgggacgccacgcgccacgcgctgggcgcgctggacttccatgacaccctgggcggccagcgcgcgcccaccccgctcgaacaccagcgcggcaagctcgacagttgctgcgaaggcgacctttattcccacctactggccaaggactga

SEQ ID NO: 342407 - DNA, 306 bp, Pseudomonas aeruginosa
atgaaaaaacgtgatttcctgctgccccttgccaccctgaccgccgccgttaccgccaaccaagcttcggcctccaccgtgatacccgagaccgatcaggctgacgaaagcatgtccatcgagaaccacggcgtgacactgccaattgttaactttggcgagcaaatggtcaccggtcgccacggtgacaacctctttggcttcgtcctcaagcgtggtgaggacggcaagatggtcgctgcgcattactcacatagctcgcacgcttcccatagctctcacagctcacactattcgagccgctaa

SEQ ID NO: 342408 - DNA, 981 bp, Pseudomonas aeruginosa
atggcattggtgggtagacgcgatggccgcaatttcggctacggcaggcaattgagctacgcaggaccacaggcgctgaaagacatgttcggcggtggccactacggtacggtcaaggcgcacagtggtcggtggcaggcattcgttaagtggtgccgctccgaacaggggccaggtatcaatgatgcgcggcagattgatcggaaggtattggcggactatgcggcgtatctgcgcgatgcggttgagtgcggtagcctcgccatcagcaccgcacaaaaccggctatccagcgttaacagaacaatggcggcgctgcgcggtgatcagcgtgtcaaattgcccagtccgagcaaggcgttgggaatgcagcgcagcggagttcgccaatcggctccgcaaggccaagaccgcgaacaggttaagcagatcgtcgatgcgctttgtcgcgatcatcaacaacgggctgcagcgattgttctgttggcgcgagccaccggcatgcgcctgcgtgaggccatcctggctgacctgccacggttaagtcgtgaggctaacgacctaggtaggatcaacatccagaatggcaccaaaggcggccgagctggcgcctcagcgccacgatggatagcggtggaccaccatgttcaagacgcacttgggtttgcacggcaggtgtcgcctgtgagtagccgtaacctgattgcgccagacgaaagctatctgaatgttctgcaggaaatcatccgccctgcgcgggaaatcctccatgcccacaatctcaaaggcctccatgagctacgagcggcgtatgcgtgtgatcggtatgagcaaatcacccaacacctcgcgcccatcaacggtggccaatgtcgcgagatagataagacccttgatcgtgaggcttgtagacaaatcagctacgagctggggcacggcaggatcgacgtagtcgcggcctacataggtggccgggcatga

SEQ ID NO: 342409 - DNA, 1767 bp, Pseudomonas aeruginosa
atgtcagaggtaaggattagctcagtaaagtttacaaatttcaaagcgcttagcaactattttgttagtctggctgagacaaatattttagttggggctaacaatgcaggtaagtcgactgtaatcagtgcttttcgaatacttgatgtcgctcttaggagagcaagacgcctaaaagctgaacgtgttccattaccgggtggaggatctgggcttggtcatcgaattcctgagcagcaaataagcgtatctcttgaaaatgtggcgactaattacaatggtgaggacagcaggattgaatttaagttaacaaacaaaaataagctttgtttgttttttccgggtgatggtggttgcatattgtattgggaggcagaagggaatcttatcactaccacctcgagattcaagtctgcttttcctatccttattcaagtcgtccccgtgcttggcccgcttgagcatgaagaggcctatgtctcagaagagactgtaaaaaacgcactaaatacgcatagggcaagcaggcatttccgtaactattggcactacaataagagcgagtggaaaaaattttcggatatgatagcgtcgacatggcctggaatgttgatgaacgagccggagctcgatataagtagtagaactttgcgcatgtttgttgctgaggaccgtattgatcgtgaagtctattgggcgggattcggttttcaaatatggtgtcagcttctaacgcatctgtctaggtctgatgatgccactatagttgtaattgatgagccggaaatttatcttcatccagatgttcagcgtcagctattaaatattcttaggtctttgggcgcagatgttttattggcaactcactctgttgaaataatgggcgaagcagatccgtcggaaatactattggtgaataaaggggcaaagcaagcgaagcgtctcagagatgttgagggcgttcaattagcggtcgaagaacttgggtcagcccagaacatcacacttactcatctggcgagaacaaaaaagatattgttcgtagaggggatgagtgactataagagcattcggcggtttgctaagaacttagggctcagtgatcttgcctcggggaatgatctaacagctttcgaatcaggaggtttttcatcttgggagaaaatcaaagctttcgcctgggggttaaagaatactattgatgctcgaatgaagctctatgtcgtgtatgatcgggattactactgccaagaagaaattgaatcgattttatgtgggctgaggtcggagttgacatctgcgcacattcacagtcggaaagagatggagaattactttttggtcttgccagtgcttcaacgagtgctggaaaagcgtctgcaatcgagaaatcgaaggtctggtgaagaagtagtgccaaacaaagggatcaatgaatatttagatgagattacttctgggttgaaaattgatgctcagtctcaatacatagctaggcgccttggttattgtcaagggaggaaggaagatacaagtactttaagtaaggttgctattgaaacatttgagcgaatgtgggcagatatcaacttgcgaatgcatgtagtgcctgggaagactacgctgcgactacttagagaagtcgtgcaaagagactacaatgttaatatgacagatgttcagattatcgacgaatttaatcgagatgaaattccagaagatttgttgggtttaattatggggctggatgcctttcgcaaaagctga

SEQ ID NO: 342410 - DNA, 1374 bp, Pseudomonas aeruginosa
atggaaatccaagatcagataaagaatatagagcttttttctcctagaggaataactgccgattatttggcggaggtagatgaaagcgttaaggaaatagactctcaacgtccgttgcaaccacacattgtcgagaagctacagtcagaaatattatatgatagagtccatgcttcagctgtaattgagggtaataagctttcgcgaagagaaactattgttgtattgagttcgggaattgtagaagctgggtcaaggaaagatcaacaggaggtgataaatctggcggatgcatgcttgtatctgcaagagtgtttggataataaaactccgctatcagttcaattggtaaaagagctgcatcagaaaatacttactgatattgacccagttaatgctgggtgttttagaggggtggatgttgctatttcaggagcaaaaatttctccgccatcacatttggatgtcccacatctaatacaatcgattgtagccttggaaaactctgccgcgggacatccaatacaaattgcggcatggatacactgggcttttgctcgagttcacccttttgttgatggaaatggtcgtgtagcccgcttagttcaagactatgttttgctaaagaataattatgttcccgcatcagtacagccggaagatagagagcgaaactattacgaagcgcttgaaggtgcagatcttggcgatggcgaagatttccttgagatcgttgctaaaaacgttctcagaacatccgaaaggtacctttcgataatcagagatgaaaagtcgaaatcgacatggatccaaggcatcgcgaaagcagcttcggaaaaggtcaaacagactgagcatcgcaagtttttgataactcaaaagacctacgactccttaaagcatgagtttgaaagcatttgttctgacttgaattctcaacttacagatatgagggttaatttcaaggactatggaagccttgattttgataagtatcttgatctgaagtcaaaaggacgagcgtcaaggacttggttgtttggtcttaattttaagtacggcgaaatcgatcagagatttattttctggtttgcatgtcactatcgttctgctcaggatattcgagacttcgggcaaaatgcgataactatactgctgtcaatgcaggatagcgctggaggatacaaaaaactggaggatttcgagtccgaagatcgcataacgctaagggagttgttagtcgttgatcgtgagttctatcggaaaagatataatccagttaagcgatgctcagagtgggatgaggaagtttctaccacagatatagcgcaaaactttattcaggaggttttggccaaggtgggtctgatataa

SEQ ID NO: 342411 - DNA, 720 bp, Pseudomonas aeruginosa; identical to SEQ ID NO: 322380

SEQ ID NO: 342412 - DNA, 1302 bp, Pseudomonas aeruginosa
atgacacgaccgattggaattgatcttttcgctggggctggtgggatgtccctaggctttgagcaggctggtttcgacgtggtggcggccgtagagatcgatccaatccatgcggctgttcactcttacaattttcccaattgtacggtaatcccccagtccgtatcttcgctaacagccgatgatattcgtgaggctgccaatataggcacgagaaatgttgatattgtctttggcggcgctccttgccaagggtttagcctaattggtcaacgtgccctcgatgacccgcgtaactcattggtaaaagattttgtccggatcgtggtagggttggactcttcgtacttcgtttttgagaacgtcaaaggcattacggttggcaagcataaacaatttctagccgagttgatcgcggagtttcagggtaaagggtataatgttttaccctggaaggttcttaatgctgcgaattatggggtgccacaagagcgcgaaaggcttatattgattggaggaaagcgtggtctaacgcttccggaatatcctgctcctgttacacgatcccctcgatctaatctgttgatggattcggaattgccgaatggaccgacctgccaagatgctctgggcgacatcccggatgcagaagcttatgaagagcttatggaggcggattctgctgtggttcaatggggcaagcctagctcctacgcgaaagttcttcgagatttagtctccggatccaatttttacggatataaaagaagttgggataaaaatcttttaacgtgcagcttgcgcacaaatcactcagagctttctcgaacacgcttcgcttcaactgagatggggcagatcgaaccgacctctcgattctttaagcttcacgctaatggtgtatccaataccttgcgcgcgggtaccgattctgcgcgcggtgctttcacaagtccacgacctatccattacaagtacccacgttgtataacggttcgagaaatgcttcgattacatgggtttcctgattggtttcggacacatgtaacgaaatggcacggtgcaaggcaggtaggtaacgctgttccaccaccgcttgctcgggctgtagcggcaagcgtgattgaggcgattggttgggaaccagttagtcccgacgatactctactgttaggggatgaaaaactgctttctatggatatggggcaggcgtctcgctactttgaaattaatgtgcccatcaagcagcgagaccgcaaaggatcaccaaagcctaaacaggttatgcttaatttggcataa

SEQ ID NO: 342413 - DNA, 855 bp, Pseudomonas aeruginosa
atggctgccagcgacaaaacgaaaatcattgagagaattttcgagacgctatatgacgagaccactaaggaattttcccgcaccctggtgacatctgaggacgtccaagaggcaaaacgctactgcgcagagcatcatggaaccaagctgaagctagacggtaatccttacaacttcatgaaagatatcgtaagaggaaaaagtgcatctagaatttggccgcagcggttgaaagatcttgggattggaggtgttcaaaggacaggagatggtgccatttttgaattcgttcatggcatagagggagctctcgacagccttgacgaagattttcgcccttctgagtcgacccccaattttcctgtacaaagccttagcctaccgctagcgtctaaggcattagggcgtacggatgagtcatggcttcttcaggtagcagtaaacctgcgagtaatagaaagccacttcgccaactctaagcacagccaaattgaagcgttagagctcacacatcttcagatggacataaaactaagaaaagtccagattgatgcactgtttcgcgcactacatactacacccgatggcagcccttcagatgctttaatcaccgtggaagccaaacagggaaatcaacgaattctgaccgagcaaattggccgccaagtcatagcagctttcgagtctactgaaaccgaacttgtaattccagtagctattgcggctgtaaaaaacaaaggaatttacgttgttgagttcaccgcagtgcatagacaagaactagataattttagcgccccgcaattccaccgagacgctatgttcatacttcaaccaaaagtcaaaggcatctaa

SEQ ID NO: 342414 - DNA, 1794 bp, Pseudomonas aeruginosa
atgcgacttcacagactttgtattagcggtttcaaacgccttcatgatgtccaagtagaattcggaaacgccacctttttaatcggtgctaataatgcgggaaaaagctctgtcctaaaggctatagagtggctgctttcgaacaataaaagaatggaacccggatactattgttcagaggtagatgaagacacgggcgaaaacaaaatagtttgtaaaacaattgtcttggaagcggagtttaggaacgtacctgaaaaagcttctgaatggcgcggttttaagggtcggatattcagttacgatgcaggcgactctggagaaagtggaaagtcaatattctatcggaagacttatccgttgggtgaggacgtaaagattgagttgaagagtctcactaggtcaatgaaggcagagtttgtcggtttgcaaaagcctgaggagttcattgctgcgggagctgagtccgctgtgatagaagaaatattctcggtactggataaaaagatttctgccggtgagaaagaaaaactagaacttgttgatgatatttgggagttgtctgatgagcagcaatggataacaaacccaggcggtatcggaaccgttgtgttgtcgaagttgccatcggtccttatcattccagctgaagcagctgctcatgaaattgatcaaaaaaatggagtgttgcacaaaatacttaatgaattgtttaaggaggttcgtgaaagttcgaagaactataaagatgctcaggtctgtcttgatctgttagcaaaggagttagatccaggtgatgctgggtctgagtttggaaaaatgatgtctgaacttaatacggttctaggcggagtttttccagagtcacgaatatacgcatccgcagacttgtccagtcctgaatcgctaactccgactttcgcgatcgagatgtctagtaatgtgagaacgagcatcgcccatcaaggaacggggatggtcagagcggcagtttttggcctattacgcttccgccaacaatggttaaaaaaacgtgctggaaacgatgatcgcggtctgataattggttttgaggagccggaaatctatttgcaccctagtgcggcaaatcagatgcgcgatttaatctacgagctttcagatagtgcttcgcaaattgtagcaactacacattctccatatttgatcgacttgtcaagaaagccgaggcaagtgttgaatcgttttcactatgataataatcatactacgatcctaccgttttctgtttctgaagagtttaagaagctgcaaggggatgacaaagatcaagttaaaatgcttattaagctagatgatcatgtgtcgcgaattttcttcacaaaaaaagttcttgtggttgaaggtgatacagaagaaattcttattaaagaagctgttaggcggatgccgtctgatatgcgggttagggttttatctaatactgagttggtgaaggcgagagggaaggcgtcaattattggcttggttaagtatctgtcggcgctgaaagttaatttctttgttgtgcatgatcgtgataaaggcgtggcaggcgctgaaaagtttaatgatcctatccttaaggttgttggagataaagaaaaggtaataatgctagaggagtgtgttgaggactttctcggatatccgccgccaacctcagaaaagcctttcaatgcttacaagcattcgattggttggggtgaggattggggtggagtgccagataagttaaaagaattgctgaaaaaagcttatcatcctttgatgtaa

SEQ ID NO: 342415 - DNA, 693 bp, Pseudomonas aeruginosa
gtggaaaccctcgtcaagactgcactcgctgcaacaatttttcttgcaacacatgcctacgcaaatggtcatccagagttcgatcaatacaaaacgtccgacgtaatcctctgcgaaagcaccggacgggtgatgtatgggttcccgcttactctttgcttagaagaaagtcgccctggaaaacacgtagtgcgttaccagaatcgtgagactggtgaaatcactatgaaagaagaggaaacatttgaatacatacgctgctctaaagctcaggacaaatgtaccgaccgagatggcaattacaggggaaagttttccgctccaagagacacatactacgcaatctttaaagatttctatgtgtacccagggaatgatggtaaagactatgcctataagaccggaacagggcctctatttggcggtgcggcggctgcaagcgtagcagcacagcctgcggcacgtttgactgcaacaccgacagcaacgggcacatacgatgtatggtgcgacccacaaggcgactcatgtgaaataactatcgatggaggtgacgacatggtcagccgcgaacggcttcccgtatatgtcccaatggcctcagacaccaataactgcacattagagttctgctacaactcaagccaggatgtgataggcctaaatcccgactaccacctttggaaaaaataa

SEQ ID NO: 342416 - DNA, 969 bp, Pseudomonas aeruginosa
atggctcatttcattgaacaaatggcttacgttggcgcaactccttggcatggcctgggcaggcgcctttccccaaaacaaccaatcgaagtatggcaacgtgaagcaggcatggactggaagatccaagacagcccggtgcatttcaaatccgacagcatcggagctctgggatcaattcataccttccctgaacagaaggtactttatcgatccgacaccaaaactccattgtcagtagtctccagccgctatcaggtggtgcagccccgtgaagtactggagttctaccgggacctcactgaagtctcggggtatgagctggaaacagccggagtgctgaaggggggtcgcaaattctgggctctggcccgtaccgggcaagccacggtgctgaaggacaacgaccaagtgaatggctaccttctgctggctacctcctgcgacggcaccttagctactaccgccactccaactaccgtacgtgtagtctgcaataacacgctggccatcgccttggatgggagcaatcgtgcgatcaaggttccacataacacccgcttcgattcgcaggcagtgaaaaagcagttaggcattgccgtctcgcaatgggacgagttcatgtaccgcatgcgagcactgactgaacgcaaggtgcagtggcatgaagcaatgggctttttcatgaacgtgctgtgtgatgtagctcctgatgacaaactgcccgaagcccttccaaacgagcgggcattgcgcagagtccaggggctgtacgaaggcggaggtcggggagctttactaaaatccgcccaggggactgcatggggcttgctcaacgctgtgacagagtatgtcgatcacgaacgtcgagcgcgcagcattgagtaccgcatggattccgcctggttcggaaatggtgcgcagattaagcaaagggcgttggacgcggcgctaagactcgctgcttga

SEQ ID NO: 342417 - DNA, 156 bp, Pseudomonas aeruginosa
atgcaggcattgatagttgttgagaatcctttcatcaacctgttcgccaatcgtggcaccagttatcccgccagctactccgccaagcagtccaccgacaagagcgccagcaatactgccaatggctatccctactgggccaccgaccacgcctag

SEQ ID NO: 342418 - DNA, 1104 bp, Pseudomonas aeruginosa
atgaagaagaaagagtttctgtctgttggagcggctttgttggaaagtacaattacgtatttcgatacctacaatgctaacgttatggctgttggtggtgagagaaatgctgtattaaaaattaaagatatagaaatgttggtaaaggaaatatctgctagtgatgaagtccatttctatgaaaaaatcagtcatggtgtagctagggctgatttgacaaagactgggaagcgattattaatgaatgtgtgggcatgggaggaaatagagcgttactatccaattcatgacttcactccaggcgtaaaggttttttttgagtgtactaaggagtatgccagagctttctattatcgcaggaatcttcgactttttgatggtagtccttcggcggttatagagtctctgaataacgtggttgagcgtataagatccatcgttagagggtgtgcatttaagtctgagcaaaatgcacatcgtcggctttcaaataaaaactacaagagtttgcttgattatatcgaggctattttcgagaagcggtcgcgagtgctagtcttaagagtcgacttgggttactcaaaaccactgattcaaagaaatttccgacaggatctaagctttaatgaggtaaagaagcatcgtgaaaaattattaaggttattgcgacgtaaactgccggctaaaactttcctaggtcatgcgtggaagttggagtttgggctgtctaagtcttatcattatcactgtatgttttttttggatggctcaaaattgcgtgaggatgtcgcatgggcaaggactattggtgagctatgggctgaaagagctacaggcgggaagggggtgtattataactgtaatcgtgcaaagggtaattatcgcgcctgtgggattggcatgattgagcacactgatagaggcatgcgtaaaaacctacaaaaagcggcgctttaccttacgaagatagagtattacatacgtattgcaactgaggggcaggctcggacatttggtcgtggtggaatgcctaaaagagatagtaagaagatggggcgccctaggcagtcgccctcatcggtgtgtggtatttctactgtttga

SEQ ID NO: 342419 - DNA, 663 bp, Pseudomonas aeruginosa
atgctttttaaagatttgtccaacacttcaccagagataattatttcaagaacctgggagtctcttcgtgaaacgcacgaaaacctatttgaaaactcccgatttgatgaattcatcctagcactaagggaaagcataaaaaacggcgatattaccgaggccttgcttgacgatcttaggctgcaacatatcgctgccaatcaaatgagtgcagagtatcctttcctttatgcctgcattctgaacgagctggcacagcaggcttttaattctgggaatcataatcggagctggcctttaattgcccatgctagcgcaagcgcagaaggtgctgccacccatgcgttctatagcactgtaatagacaccacagcagctctaaatcatcgtagagcgatggcaggtgcgaatgcccgcaatgctaaattccaaacagtgaaagactacgctttaactctcatgatagagaaacgtcccaaacacggctgggacgactttacgcacgcggctgaatcaatcaaaaatgaactaggtaattttatcgacataaagaaaatcggcctaaggaaagagctaattacaaagactctacggagatggcgaagagatgatgagatctttcggagcgccatcgccgaaatcattccctcgctcaaacagtag

SEQ ID NO: 342420 - DNA, 1227 bp, Pseudomonas aeruginosa
atgggtaagctgaatccgaaacaagtcgaaaaccttaccgaacccggcacctatgaagatggtgatgggcttcgcttggtcgtcaaacctaccgggcgtaaatcttggttgcttcgctaccaactggcaggtcggcgaagggagatgggattgggctcatttcctgaggtaagtctcaagaaagctaggcttgaagccagtgccaagcgcagcctactaagcaacggaatagatccgctagctgcccgtgacatcgaacgagcagcacagcgcgaagctcagaaagccagtgaggcgaaacagctaaaatttgaggccatcgcgaaagactactgcgatgcacacagcgcctcttggtcggataagtggcgcaaaggctggttacgcaagcttgagctgtatgcgtttgagcacattggtaggcttcctgctgatgaaattgacacacctcaagtacttaaggtccttcaacctatctggcagactaaaacccgcacagccgacgaagtgcgcgggcagattgagcagattctagacgcggcaaaagcacgcggcctacgccagggagaaaatcccgctcgctggcggggacacttggacaatctgctcagtcgtgctgaaaagaaaaaagcccgaaaacgagagcattttgaagctctgcgctggcaggatgtccctgccctaatggtcaaactcagagcaagcaccgcgccagcgtcgttggccgctcagctcctgataatgacaggcgcacgcgctcacatggtgagatttgcacgttgggacgagttcgaccttgatgctgccacctggtctcttcctgaagagcgcatgaaaatgcgggtggcctttgtaatcccgctacccgatcaagtcgtggagctagttcaaagcattccgagagaatcaggatccccctttcttttccctggccaaggcaaaacaggggtaatgcacgccaatgccatacgcactctgctacatggcatggactacaaacatattacccgacacggctttcgatcctcatttcgtgactgggcaggcgaaagcacaaattatcctcgcgaagtatgcgaaatggcgcttgctcacgacgaacgcggccaaaccgaaggggcatactctcgctccgattttctcgacaagcgacgcgcactgatgaccgaatgggccaagtttctaattaaaacagaggctcagccagcagtgaaaagagaggaataa

SEQ ID NO: 342421 - DNA, 228 bp, Pseudomonas aeruginosa
atgccccgctacatcgaacgaagccgccacggcctctattaccttcgcctccccaagcaccttgcccacctcaatgagggcaagcgcgtgtcactgcatacgcacagcaagcgacttgccatccaacgcgccagccggcatataagcagccttaacctctgcttgagcatgaccgtgaccgataccgcgcccacttccgccgctgaataccaagccctcaaagtgtag

SEQ ID NO: 342422 - DNA, 171 bp, Pseudomonas aeruginosa
atgcggaataaaaaagaccgctctcccctgcccggatcggagcggtcgaaaccgttgcccgcccggcctgcgccggacggcgtggattcgcttcagcgtgcggtgatcaccgccagcctggtgatcccggcgcgctcgatggaagccatggccttcgccacctggccgtag

SEQ ID NO: 342423 - DNA, 789 bp, Pseudomonas aeruginosa; identical to SEQ ID NO: 322412

SEQ ID NO: 342424 - DNA, 765 bp, Pseudomonas aeruginosa
atgagcaacaacccgcacttcatgaacatgaccgccgacacgctcggcaagagcttgctgcagggactgatccaggaaatccggatcatgccggactgctggcagaagcttcccgaggccaagcagcaggacattatcgaccgcctggagcgccaggtacggaatgccgccaccatcgcggtccacaccattgccggcggcgaccgcgacacggtctacggcaagctggagtcgatgaccgcgaaggacaagatgaaggccgtattcgtggtgaatccgagcagccctcacaaggaggacctgctgttcgcggtgaacaaggattgcctgctcatcatcggcggcgccaacgagttcaccgagggcatggaccaggtcaagcctgacccggaccagaacccgctggacctgaatggcggcgaccacgacatggaagacgccggcgcctggggcggtatgcaaccagcagacgacagcgacgtcgtcgatgccgagttccaagagctgccgcaactcaccgtcgagcgcttcgccggccacaccctgggcgagatcgccatcggcgtcgccaccaagaaggacgtgttcgacgcggcctggctgcaatcgcgcttcgctctcaccaccgaggaagccgagcgcgtcattctccaactgctggaccagggcgtcatcgtgctcgagcaggagaacgaggaatcccgcgagttgaacacttaccgcgtcgtcaagaagccgggggatatcgccctcgacctggagtga

SEQ ID NO: 342425 - DNA, 999 bp, Pseudomonas aeruginosa
atgagccaagaatttaacgaaaacgaaagcgaaggtgatgacctggtcgtactggcaaacaaactgccaacatccatgaaaacagttcaaagcatctacaatgaaataactggaaaaacagaaaaaaaatcaagattcctaaacgataatcacatcatagaattccgagacattgagcaactaaatataaaaataaaccaactacaagagcagttccacattatcgcaagcaactgcaacgtgacaatctaccacataaatgactgcaaagagcagttcagttcctttgaaagatttaaactttacgaccaaagttcaataagcccttgtgaaaatattcgcctagagtacaacatcctcatcaaactaccttcaacaaaaaaaccacagccttataaaataactatagaccttcactcacgagcagcactacaaaaaaaagcagtactagaaaccggcttaagtcgccgaatgattgagttagtttccatgcgcacagggcttgttgagattgaatacatagactacaccgtttcacgcactttcatgacagcaattaatgaatggtatgacggattaaaaaaaaccaaagcaactcgagcaatacctataatacagtcccactcacacaacatcccaagcttattgaaacttctaagcctagttggactttttgcagcatttatttattacaaagaagctctgatcccgccacacgcgaccctacagaatcttttttctgcaacagtatcatgcatcattggagtttcaattatcggcgttatgtctactcgactaggaagcgcctgcgaaagagccattgacatgtattccccactatccacactaaaattaaatcgcggagacgaggaaatagtagaaggttacaactcctcaaaccaaaaaagcatcttgagcgcatccttatttgcgatcattacaattacactaaacttattgtcaacatatatttcaataaaaatcgggatagactcctaa

SEQ ID NO: 342426 - DNA, 1017 bp, Pseudomonas aeruginosa
atgcttctctttgccacgctggcgagggctgaggattactactggaaaattcagtcactgcctgaacgcttttcttcaccctcggcagcttgcgcggcgtgggccaaagccacgggacgccctggggagttcaccttcaccgggtctatgaaagcccgtgaccagacctcgttttggtgcgagttcacgaacaacgaaaccggcaagactgctgccgggtatggtcctgccggacgctatggcgatagctgtcccgaggggacggaatacgataaggcgaccggggtttgtaagtcgcctccgcaagaatgcaaggaaggcgaactgttcccggccaagggcccggactcgcctgtagttacctcgggaggccgtaactatgtcggtgacggcggcgccccgaccgcctgctatcaaagctgtgagtatggcggcaatcccagcccggccagttgctatctggtcaaaggctccaccacgacgggcttctgcaactacattctcaagggcaccggccaaagctgcggtgccgactcctacaccttctctcaaaccggcgattcgctgaacccgcccgacactccgaacaccgatccctccgacccgaacgatcccggctgcccgcccggctggtcgtggtcggggactacctgcgtcaagaccccgaccgatcccacggatccaaccgacccgaccacgccgggcggtgacggcggcggcgatggcaatggcggtggaaacaacaatggcggcggcaatgacggcggcaccggcaatggtgacggcagcgggggaggggacggcaacggcgggggcgatggtagcggcgaggtgacggcagcggcacgggcggcgatggcaacggcacctgcgacccggcgaaagagaactgctccaccggccccgaaggccctggcggcgaactcaaggagcccacgcccggcacctgggatgacgccatcgccacctgggaaaagaaggtcgaggacgccaagcaagaactcaagaccaaggtga

SEQ ID NO: 342427 - DNA, 423 bp, Pseudomonas aeruginosa
ttggaattcgccgcaccagagggtttcgatgtcgcggtcgcgctggttgtcgcggttggcgttgagggcgacggcgcgcagttgcaggcggccgttgtcggccttgccgccgacttccaggccgtagccgggggtggcgggtttgcgcaggacgaccctgccggtctgcgcccaggcggtggccatgccttcgcggacttcgtagccgaggctggcgaggccctggagcacggcctggcggcgggcgagggcggcctgttgctggaggtgggtggtgaggatggcgttgcatcgctcggtgagttcggcgagttgctgcggatcgctgtcgggctggcaggcggcggcgcgctggagcagttcggcgtgttcggcggcgcccagggcggcgacttcgctggcgaggtcttgcaggtgttctag

SEQ ID NO: 342428 - DNA, 135 bp, Pseudomonas aeruginosa
atggaaaaagctctgaaattggcgtcatgcctctacggcctgctgatcctgctcagcctgccgctgctgatcccgctgatggtcgggctggttgtctgcgaggcggtgcgggcggtggtgccgaagaagcgctag

SEQ ID NO: 342429 - DNA, 702 bp, Pseudomonas aeruginosa
atgaagccgattaaaattctgttgtgtatactttctattatttttgctggcctcatacttgcctgctttccggcctatgatgtggtgtctaaaaataagctttatttttgtttctcgtctgggtgctttaataccgcctctgagctttttgctgagtctctttctattgttaaaaactcggctctgatagcggcttatgtagctgccttggtgggatcttatataggcttaaaaactttcaaggagacgcgtgatagggatgcctacactaggcatacaggaaacatttcaatttttaaggccgagcttgagaaaattcttccaggttcagttttgaatgctgattctttaaatatcaacaaattttatatgtgcatttttaaggggtcgcgttcgggagatatatctgtgtcggatggctatattcagattgttaagggattaaagaattgtgtggagttgactagcgctcaatatggcggagactctcatggtgctgcgggtgtacgtatagaacatcttaatgagatgttggcgcttttagatgctgttggtattattattgaggagcctgatatagggcgtcttattgagttggagtcaggtatattcgaatttttagataaagtaaactctcgtctaacagatgttgagataaaactttcaaatcttaggagagattactcggtacattctttctga

SEQ ID NO: 342430 - DNA, 1176 bp, Pseudomonas aeruginosa
atggatgagctaaaagtacgcctaaaagacggcgttgatccaatacagtcagtagataatctctgttccgctctggacatccctcgttctgaactagacgaagtgctagcgctgtctgatgatgagcgctacattgaaatatctcttcccaaaagcaatggctctcgacgtctggtatacgatccccatcctcggctcagacgtattcagagacgtattaaaagccggcttttagtgtctcagattttgtatcctagatatctatatggatctttgtccgatagtgagtatcctagagactatattcgttgtgcttcgattcactgtggtgcaaaagtcttactaaaggctgatataaagaattttttcgataatatatctcgccgtttggttcttgagattttcgagagagtttttcattatccggaagaagtttcagatgttttgtctgatctatgtactagagcgggggttgttcctcagggagcgtctacttctagctttctagcgaatctttgtttgttgaatgagtggtgtttcgttagagatattcaatatgagaaattaagatatacaaggcttgttgatgacataacgatatcatctactactactgggaaagatctgagtagatgtatgcgtacgttaacggctatgattgaaagtgcaggttttgaactcaatgaaaataaaacaggaatagaacatgttaccactaaggctttttccgttcatggtttgaggattaacaagccaagtccatgtttgcctcgggaagaagttagaagaataagggctgatgttcataatctaaagcgtaaagcttcggttccaaatgcacgcgtgagttttgaatatcgtaagctttatgagagcatttccggcagagtgaataagctaaagcggcttaaccatggcaggtataatgagttgaggaggcagatgaatgcaattctacccttgccctcaacgaaagacataaagagatgccagattatgctggctacgctagagcgtgattatgatctgcatcgggactcttatctctataagttaaggtactcaagacttatacatcgcttaggtatattgaaaagaatatatcttcatgaggctgccgcaatacgagatgcgctacaagatttaaagccggaatttgtaaatgaagccgattaa

SEQ ID NO: 342431 - DNA, 636 bp, Pseudomonas aeruginosa
atggacagtcttgtattggaactgcagagagacgtgcttgaccggacgatccaccttccagatctgctgcgtaaagcattgctcgtgtccagaaagcttaagatcaaggacatcgaggaatggctcaatgacgaactgaacggatacgagacacgatcggtgcccagctaccgaatcgttacgggcgaactgaaagctttcaatccatacagggggtggatccctgtggacatgggcggcgaactccacgcgtctatgtgtgaacaccctgcacgcgactcagtgagtcagattattgatctggtggagcgcacagagaccggaacggtgatggtgaaatttcctgccgatctcaacacggcgttcaggaatctcatgaggacagactttgagcctggtctgcacgtgcccgtgcacaagttggttcgcatcttggacgtaacgaaaaccaagatcatggagtttgccctagatctggaagcgcgaggaattcttggagagggcatccgcttcagcaaggccgaggagcagctggcgcagtcgatcacccacaatacaatccatatcgagagaatggaaaactctcaattacagcaatccacagagagatcagggcagcacaaggccaggagatag

SEQ ID NO: 342432 - DNA, 345 bp, Pseudomonas aeruginosa
atgagcaagacgaacaacatctcgatcggctccatgcacaactcgcaggtccaacaagacgcccaacactccagccagcattttgaccagagtgttcagcaccttgatctgaacgcgtttctggaggccttctcccaagacatttcgaagattagcgatcaggttgtcgctcagggccttcgatcagacgttgaaaccatcaggctgcagaataactcgccaactccgaaaaaaggcatcatcaaggaatgcctggattcgatcaaaaccgtcttggagggtgctaccggcaacgtgctcgcctcatacttgcctgcagtgatcacgttcatgggagcgctctga

SEQ ID NO: 342433 - DNA, 1386 bp, Pseudomonas aeruginosa
atggatgttcgcagtcgggttgagcgcgcaaaaaccaaggctttctacaagctgttggtggataggcttggagctgacctctgggaggagcgcaaggctgcctatgtgaagcgcatacgagagaaggaggcgcagttcgacataaggttgccgatcgagccgcagctcttcacgccgatcgaaggagatatcgattggtacatcatggccgcgtacctgtcccatgattttccattcagcgacgtcgcctatagcaccagacgcatctttccctacgctatggccatcggcgcggttgccgagcaacttcgcgaggtacctcacgtcaacgcggtcctggacaagatgctggcgaacaactctaagcctgagacgcagattttcgaactgctgacggcctcgttctacctgaaaaatggctaccaggtttccttcatcccggagaacagcattacctggccggatgggaaaacgaagaagtcacccgacatgctcgtcaagttggctgagcgggagttttacgtcgagtgcaagcgggcggataagcaaaccaaatacgcgcaggccgaagagcaggtctgggccgatatttgggctcaactgagccaccatatgctcaaggtggcaccctggagcaccgttgacttggtcttccacgaccagctcgcggacgtgacggcagagcaggtgatcaaggcagtggatctggccatcaaggcggggacgggaaagctgagacaaggggcgatcagcgcccagatgcgcgccgtcgacaaggtggggctaaagcagcactaccgcaagtttagggtcagagccgacagccctcagcaggagctgttggtgttcggcaacatcgacagcaacgagaagcgcagcatcgctaccgtcgctgagcgggtcatccggcccggcaccaacaacaacatgctcaacattttcgtgaaggacgtcgccaagtgtgtgggggctcagtggcgctgcgaccatgaagcttcgcttgggctgcgttccagacacttcaaaggtctggtcaacgatggcgtctcgcagatacctccggataaaaacggtgtggtgcacatctggtatgaaacccgcgaaggtatcgaaatcgaggagctgcgcagggacaagaacatcgagaacatcacgacctacaacgcctccgagacttcagtctggggcgtgctgatgcacggggtgaattactacccgtttgaggacaattacgagtgggcggaaacggtacaagattttggccgggtgcccgatttgatggagctatacccgcggcagtccttgatgctcggatctgaagccacagaagaagtcgagggggctacccattgggggcaggataaggccgcaaaaataacgcggtga

SEQ ID NO: 342434 - DNA, 1995 bp, Pseudomonas aeruginosa
atgaattgctacgttagctatatcggtgtcgttgacaaagataagaaactgcactttgtcccgctcacccctggcctgaacatcatcaccggtagatcgtccaccggcaaaagcgccattctggagatcttcgactactgcttgggtagcagcgaagacaccatcccggatggcaagctgaccgagcgcggcgagacgttcttcaccgtcctgcagtttccctcgctgaccctcgtgacgggccgtgcagcggcatcgaagcgttgcttcctgcgtgaagtcaccgagccggaggctgaggacattgtggcgctgatgacccatgtggattacttcttcgacgaccgcttcttcatccacaaagatcagtacctcaagagccttggtaagtatttcggtgtgacgctggaaaacatcgacgttgaccccatgtaccaggagatcacaggaaagaaaggggcaacgccatcggtgcgcagcttcccgtcactaatgctccaacaccagaacctggtggcgaacaagcacgcaatcttctaccgcttcgacgagaaggttaagcgggatcaggccatcgaccacttcaaaatcctcatggggatcgtgggggaggagtatttcgatctggccaaggagcataccgaggccagctacgagcttcgccggattaagctcaagattcccaaggacgataaactcaagcaagaagtcgtcagcacattcgatcagtttctctcggaatacaaggcgctcgccggtaagcctctgttcgacatgacagctgatgagatctacctcaagccccaggctgcattaaatctgatgatgggcaccccggtcacggttgatggcctggcagatgattacgaaaagaccctcaaggcgcttcgggagaagaaggccaagctggtctcggagttgcgctcggcccttggcaggagcgatctgctggagcgctctgtcgagcaggcgagagggatcggtaacaactttgcctcgttgaccgtgccacgctcgaccaacctcgatcacaccttctgccctgtgtgcgaatctcactccgacatcccggaagaccaggcgaacaagctcaccgaggccatcgaatggctgaacggccagttgaagctatcgtcctatgcgcgggagagtctggggcaagaaagccgcgacctgaaggacgagatcaaggccatccgcctgcagctcaaggaagtccaaacggcgctcaagcctttcgaagaacagcaggccctgcgcgcagaggtgaacgctctggaggatgctccgagaaagacgaagttgcgtctcgaaatcgagatcgacaagttcatcgagaaccctccgtccgatctgaagaaaatggaggaatactggcagggccaggtcgataaactccagaagttgatgaatcaatacgacgttgatatcgagctcgataggcttgcgcgagatatcaataagaaaatgaaagagcttggtaagaacttccattttgaacaaacttacagaacaggttcgctgaagtttgacgtgaacagcttcgacctgtggcatgagaaggatgctttcaagaaggtcttcctgaggtcgatgggcagcggcgcaaactgggtttactcacaccttaccctattcatggcgctgcactatcaattcgcggcacgggcaaagaaatgcaagattcctccgatccttttcctcgatcaacctacgcaggtctacttccccaccgctgatgaaggaaatgagttcattgctgccaatctaaggtcggatgagcttaaagacaccaacttgcatgatgacctcgatgcggttgccaatatgttcacccagctggcgaagttctgcgatgacaccaagcgtgatactggtgtaatgccgcagattatcgtctgtgatcacgctgacggactcacgcttggggaaaattacatcttcaacgatttcgtcagggcgaggtggcggcaacgcggactcatcgcggactga

SEQ ID NO: 342435 - DNA, 462 bp, Pseudomonas aeruginosa
atgagtaagagtgccgcagatcatatttacacattgcggcggacacccttcgccctcgctcccgtgattcattctttctacgatcactgggatcctacgaagaacgatgtactgctcagttacctgatccttccgctgatcacctacaagccgatccataaatttctgcaaaactccaacaggaaaagttcaattcgtaccttactgcaggatccgagccgagtcttgggtctggaactacgggtagaggaattcaagccgattactcatgcagcgctgcttatccttaattccgaaaatagtgtactgattaacgatgatatgtcggtgacgcctcagggcaagatccgagaagaaaacgccgacgaagcgctcatgaaatacgcacgcaagctggcggtggttttcaccggcgagaacgttgtttctatttacagggcgttggggctcaaatcgctatga

SEQ ID NO: 342436 - DNA, 1179 bp, Pseudomonas aeruginosa
atgtttatggataaattgccagataagttgccttttgatgctacgaagctgttcgaagcgctgcaataccagctcgttgtagcgcttgagtattgctacaagctggaaaaggggaagcgcctgtgggtcgaggtgtatggggacgtgaccctggagggcgcggctcaggtcgaggtcaagctgtatgcggacaccttgcgggacggccaccagaacatctggaacaccttgaacaactggctcaacaaggcgtttgaccatcgggcgtacgagagcctggtgctggtgacaaatcaggggttctcgccaaagtcgacgctgacggattggaacacaagcaccgctgccgagaagtttgccctcctgaccgccatctacgatggcgccgagcaacggttcactgcgtccaaggccaaagagccgtcggagaccctggagctgcagcgttcagtgatggtgcccgcgctgaagggcgatctgctggaggtgctggaaagggctgtgttcatcacctgctcgccttcgcttcaacagcggctccacgacttcaaggttctgcacctgagagctatccgtgcatcgaagcatcagagcttcattgacgacatcttgggcttcatcggcagcaccaagttcatcgataccggctgggaaatcacctgcgaggagttcacggacaaggttgccgaactgacaaagcgctacatgacgcatacaagcatcttcccagaagtggatgtcgacgcgctgaagcagaaaatcgacctggacgagatagccgatcgccccttcgtgaggaagatacgggagatcgatggtgagatgcggatcaaacaggctgccttgcagttgctgatcgccggcgaggtcatcgatgagctgtatagggacagcctggtctcagaattcgatatccagcgctatcagaaaaaccatctggatcgccatctggatgggcggctgagcgcgatgatcgactgcatggatgaaagctgctccattcagctcaggcgcaagtcgctgaaattcttcttccagcagcacgctgccgaagtggtgcagctgaaaaccttcgaagataccacggcggattttcgcaatggcatctaccacatgttggctgatgtgaaagccgacgacgaggaaagggagttctactggaggctttggaatgagtaa

SEQ ID NO: 342437 - DNA, 981 bp, Pseudomonas aeruginosa
atggcattagtgggtaggcgcgatggccgcaatttcggctacggcaggcaaatgagctacgcaggaccgcaggcactgaaagatatgttcggcggtggccactacggcacggtcaaggcgcactgtgatcggtggttggcattcgtgaaatggtgccgctccgaagagggccccggcatcaatgatgcacggcagattgatcgggagatgttggcggattacgcagcatacctgcgcgacctggtgaagcgcggagaaattgctgtcagcaccgcgcaaaaccggctgtccagcgttaacaggaccatggcagcgcttcgcggtgatcagtacgtgaaattgccaagtccgagcaaggcgttgggtatgcagcgcaccggagttcgtcactcggtgccgcagggtcaagaccgcgaacaagttgaacagatcgtcgacgcgctttgcagccatcatcagctgcggaccgccgcgattgttctattggcgcgagccaccggcatgcgcttgcgtgaggccatcttggctgatctgccacggttaactcgtgaggcaaaaaacttcggcaagatcaacatccaggacggcaccaaaggtggccgtgccggtgcctctgctccgcgttggattgtggtggatgaccatatccgtgatgcgctggggtttgcggagcgggtttccccggcgggtagccgcaacttgattgctccaagcgagagttatctgaacgttctgcaggaagtcgttgggcccgcgcgggaagtcctgcatgcacacgacctaaaaggttttcatgagctgcgggcagcgtttgcgtgtgagcgctatgagcagatcacccagcaccgtgcgcctattaacagtggtagatgctacgagatagatcgacgcctcgatcgtgaggctcgcactcaaatcagctatgagctggggcacggtcggattgaagtggtcgccgcctacattggagggcgggcatga

SEQ ID NO: 342438 - DNA, 567 bp, Pseudomonas aeruginosa
atggctcgtactactgccccgctgaccgacagcgcctgccgcacgtcgaaacccgcagatcgcccctacaagcttttcgacggcgacggcctgtatctcctcatctaccccaacggccgcaaaggctggcgcctcaggtacgtcaagccggatggccgggaggggctaacttcctttggcagctaccccgtcattggcctcgcagaggcgcgccagaagcggctggaggtcaagcgaatgctggccgagggcatcgatccgattgaaaccaagcaccaggccaagagagaggccattatcaaaggccgcacctttgaaagcgtcgccatggactggcacaaggaaatgtccgccaagtgggcgcccggccactccaaaacagtgatgagccgcctgaggactcacgtcttcccgttgatcggcgcacgtgccatcgtcgatctggataccttcgatctcatgcagccgctggaggcgatcaagaaacgcggcacgatcgacgtggccttaagggtacaaaactacctgcagagagcatcatgcgcgaggccaaacggctgcgtctga

SEQ ID NO: 342439 - DNA, 444 bp, Pseudomonas aeruginosa
atgcgttcgtttacgcgaatcctgagttcctgcctgctgctcggaagcatgctgggccaggcaatggccgccgatatcgacgatattttccgctcgcaggataccgaccatgatggcgcgctctccgtcgaggaagcgcgcgccgctgctccggcggcctttcgcgccatcgatcgtgacggcaatggaatcgtcgacgccgatgaagtctcagcgaacatcgttgccgaggccgggccgagtatcgtcattccggcggtgacgctgacctcggtgacgaaggggactctggggctgtgggatggcaaccacgacggcaaggtaaccgagcaggagtattcgaacgcggcggtggcgatgttattgctagccgattcggatggtgatcgccgggtgacccgtgaagagctgcggcgttttcgtggcgagcctgtaacgccctga

SEQ ID NO: 342440 - DNA, 807 bp, Pseudomonas aeruginosa
gtggatatcgcattgcacggcggcgcctggcacgagtcactgggaaagttgctcgaagcgctggaccggccgttcttctggcggttcctggcgcagaccctcggccagttcgcccccgtcgacaactgggcggccctgatattcagcgactccagccccttgattctttccttcatggaggaggagatagaagaaatcgagccggacccgctgatcagtcgatatataaccggactctatctgcaagatcctttctaccaggtatccagaaactgtcggcgcggcgggctttttcatcttgcggatatcgtctccgaagatttcgaaacgaccgaatattacaatacgtactttgcgcattatgtggtgacggacgaagttcaatataacgtcccgctggatggtgaaagaaccctgtgcctgtcgttgggcagcgagagccgcttcggcgccgagcagatcgcgctgttcgagttgcttcgcccgtgggtcatcgcgctgatgaaaaaacgcatccacttcgaggatgtggtcagggaggaggcgaaaccgatcgcagcggcggaggtggaagtccagccctggagagggttgatatcgccgctgaccgcgcgggagtcggatgtcatccgcctgatgctggatggatactcgaacaaggaaatagcggatcggctgacgctgtcgatcgccaccatcaaggtgcatcgccggcacatctacgcgaagctgaacgtgaagtcccactctgagatattcgcgctattgatcaacccgcccgcgccgcggctcgccgacgcacgctag

SEQ ID NO: 342441 - DNA, 354 bp, Pseudomonas aeruginosa
ttggtagagccggccaagccgatcggtggacaccggcgttacgatgccgccgtggtgactcggttgcgttttatcaagcgcgcgcaggtgctgggttttaccctggccgaagtcgccgggctgttaagccttgaccaagcccaagcctgtgccgacacccgtgaatttgcagcccataaggtggccgtacttgaccagaagatgcaggatcttgcggccatgcgcagcaccctggtggccctgatccaacaatgtgacgagggaagcaacgagaactgttgccccattattcaatccttggaggcacccaactccggggtaggccaaacatataaaagtcccctgatcccctag

SEQ ID NO: 342442 - DNA, 1239 bp, Pseudomonas aeruginosa
atgaaaaggaccgatatcaagcgtcgcccgctgagcgataccaccctctccactctcgagcccgaagagaaagcctaccgcgagcacgatggccaagggctgtacttccgcgtgaagccgaccggccagaaattgtgggagttccgctacaagaagccggcgaccggggcctggtcctggcttggcctcggtccctaccccagcgtgtctggcgccttggcgcgcgagaaggcgcaagaggctcgcgccctggtcgcccgcggtgtcgatccgtccactcataagaaagccgaggcggcggccgagaaagccaaggcagagaacactttcgagctgctggcccgggaatggtatgaggccagaaagggcaattggggcgatagctactccaagcgtgtgatcggcgccctcgagctgcacgtcttcccgaggatgggcgccagatcctacgtcgacatcacgccgatggagtggatggagttcttccgggccatggagaagaagggaattatcgaccagaccggcaacgtccgccgctactgcaaggaaatctacgacctggcccgggtgaccggccgggcgacgcacaaccccgtcgacggcctgcacaaattcctgcaaacgaagccggccgagaactatgcgcacatctccgccgaggagctgccgaagctcctgcaggcaatcaccgcctactcagggcatcgccaggtcaagatcggcctgttgctactcatcctcaacggcctacgtccgagcgaagtgcgcgaggcgcgctggagcgaattcgacctggagaaggcgctgtgggagatcccggccgggcgcatgaagaagcgccgtgcccatatcgtgccactctccacccagtcgctcgcactactccaagagctgaagcacctgtccggcgcctatgaactactattccccggcaggcacgatcgcaccaagcccctaagcaacatggtgttcaacatggcgctgcgcagaatgggatatcagggccagcagaccgggcacggcttccgccacattgccagcaccattttgcgcgagaacgactggccacgagagcacgtcgaggcccaactatcgcacgccgaaaccggcgtcgcaggcgtctataacaaggcccagtacctggagcagcgccgaaagatgatgcaatggtacgcagatcaccttgccgccctagaaaaaggtaacgtcatcaaagccactttcccccaatcggcttga

SEQ ID NO: 342443 - DNA, 1368 bp, Pseudomonas aeruginosa
atgcacgaaatatcgcttcttcgattcaacgcattggcggcttattgcagaacacccgaaattgtcctcatatccgaagaactgagatggtacgaagcggcggacggacagatacttgcaactctcattcgagactatacggatagcgactactcagggatgattctggcacgcgatgaacgcgaatgttttaggtgggtgtcagacggtggttggcacgacacagaagctgaagcaattgaagcccttgaacgaaaaatagaagaaataattccgaaccttgagcggattcgaaaacagggatcaaagggaaagcctgtagatttcttcactccacgaccaaaacttaaacaacccttagacaatgcctttcaggccgttactagtttagaaggttacacgccagccaagaacataattgaaccgatgatgcgctggcatgaggatgctgatggaaactttatagaacagttccagacaacaggattcgatgctcgcatttgggagctgtatttatttgccgtactcaccgaggcaaggtttgcctttgaccgctctgttgcgattccagactttgtgtgcaaaggaattctaggggagctctgcgtagaggcaacgacagttaaccctactcgtgacaagagcaataatattgtcccgccaccgcaatgcaaaaccgaggaagagttcttcgcactgcaagacaactactttcccataaaatatgcaggcccacttaccgcaaagctagacaaacgatactgggaaaaggaaagcgcgcaaggaaagcccttcgtcatcgcaatccaggacttccattctccgatggcaatgaatctgagcagaggagcactcccgacatatctgtatggctacaagcacaatgtcaagagaagcgaaagcggcgaactaataattgaaccagtaaaggtcgacaaccatatttggggctccaagaatatcgagtccggttttttcaatttcgaaggcgcagagaatatcagcgcggttattttcaatagcagcgccaccatctccaagttcaaccgactaggcttactcgcaggttttggttctcctcgagtaaagctgctacgtgaaggacttgtggtcgaccaagatccgaatgcttcctcgccgaaagaattttctatgttggtcaactctcatgactaccacgagtcatggattgagggtatggacgtttaccacaaccccagggctctacatccgctaccgccggaaatgctcatgggggctgcccatcatcggctgctaccggatggccaggtcgaaagcattggccccggttggcaaccattggcctctgtcacaaagatatttattgacgaagagacagcagcctag

SEQ ID NO: 342444 - DNA, 219 bp, Pseudomonas aeruginosa
atgctccaagtcgcaatcggtgcactgctgctggtcgccggcatggtcgcgctcttcccgctcccgatccttggcgtcccagccatcgccgccggctacctcctgattcgcaaagcgccgcctggcgccggccaaacgctacagggagcgttcttcggcctggccctccttggcctggccgccacactcctcgttggcctgttcggcatcctcttctag

SEQ ID NO: 342445 - DNA, 465 bp, Pseudomonas aeruginosa
gtgcagggctacaccggcaccatgggcgcttacgccttggccatgggggatctggtggccagtgccatgactgagggcgagacgccgacggctcgtgtgggggacctgccggttgcaaaggtgatctaccgtggaagcgatccgcgcagtacccgctaccaggccgagttctacgacatgatgcaggaggcggaccagctctaccgcacggcgcgttactaccggcaggaaggtagggtggacgctgctgaacagctgctggcggcgagccaggagaagctgcggcatcgtccggcactcggcctggctcggcagcaactcggggcaattcgcaagcagatggacgcggtgtatcgcgacacccgcatgaccggcgaccagaagcgagcgcggctcaacgagctgcaggagcgcagcaaccaggtggcggagcggattgtgaaggtggcgcaggccgacttctag

SEQ ID NO: 342446 - DNA, 270 bp, Pseudomonas aeruginosa
atgacccgcgaagaagcctacgccgccgtcgccaagatggccgaggagcatgccctgatctaccaggctgccggcggcgtgatcgtaatcgtccacccggacacccagcgcgagaaaagtatcgaggagatgtgcctgtacatggccggccagggcccgcacccggcaaccatcgagcaacggaagcagcagggcgagcaggacaccgcgcggcgcgccaccgccgagcaacagctcgacatcttcaacgactccaaggaatcagcatga

SEQ ID NO: 342447 - DNA, 768 bp, Pseudomonas aeruginosa
atgacccaagcaagaacccagctctggagcagcggcggcggcgtgcagtctgctgccattgccgctctaatcgtgcaggggcgcatcgcaccgccggacttggccatcatcgtcgacaccgaacgcgagcagtccaccacctgggactacatggaccaggtgattcagcctgcgctggcagctgtgggcgtaactctgcaccgcgttcggaagagtgaattcgagcaccgcgatctatacggcggcgcctccggagataccctgcttatcccggtcttcacgacatacggcggtgacgtgggcaagctctccaactactgtagcgcctactggaagagagaggtggtgaagcgttgggccaacgcccaaggcgtcaaggccgtggacaactggttaggcatcagcatcgacgagttggggcgcgtggccaaggacaaaggcggaaagtggcagaaccgctatccgctgatagagcagcgcatgaaccgcggcgattgtgtcgccctagtgcatcgcatgggctggccggctccgccccgctcgtcctgctggaactgcccgaatcacacccaggaagagtggcgcgacattcgtgataacaaacctgccgactggcggcaggccatcgccctggaccgtgatattcgcgagcgcgatccgcacgccttcctgcaccccgactgcgttccgctcgaccaagccgacctcgacgacagcaacggcgtgctatttggtcacggctgcgtcagcggccactgcttcacctga

SEQ ID NO: 342448 - DNA, 540 bp, Pseudomonas aeruginosa
atgcccggccgccatatcagcgacttgggttgcattgtggtgtacttcgatacaggcatctcccagctcgccatagacctcggtgggctgaagcttgcaacgctcgcagaagagctcgccatgatcctcacggaacttggctttcttggcgttagccaggccggtggcgcgctcccggcggagatgggttgccagcttgggattaccctctgtccagagctgatcctcaagaaggatatgcgcttctggagcagccaccttctccccaagcgggacgattggaaagccagcgtccataagaatctggaagcaagggctaccgacacctgcagtgaaatgcttcggtttgatggcaaatcccagagcccgcgtcgcggccagtccgaaaactgcttttggcggcaacctctcgccgctctcggtcaccaactcgaacttgatgggggagccgaaatctggggcctcgacaccctcaagcagatccgaaacggcctcccatacatgcaatgcggtgaccttgcgcagctgcgccacgggtag

SEQ ID NO: 342449 - DNA, 687 bp, Pseudomonas aeruginosa
atgtgcatcggaccctgcaattgcgtcgtcgctccagcattgatggcgtttccaaaggcgcgcagacgaaaacctatcctgaatttcaccaggcgacgccgtggctggcactttgccttgtgtcgcggtaggtttggtgccctacaaaggagagggcgcaaatgcagacgtttaaggaccaggaggcggagtacctgcaatggcttacggagaatccgtccagctacgtggcgaatctcgataagcgccattccttccgagactacccactcgttcatcttgcctcgtgcggccatctcacccgcgggggcaacttcactacaggcgactactacaaagtctgcgccgaaaccctcgaggagctcgaggagtggtgtttgcaagagcaccacaaacctttgcgtgtctgtgtcgtgtgtactccaacgagatggactggcttctggtgggtcaaccataagcaaactgctagggtcgagctggaaggcggctatatctggtcgccgaaggagaagaaagacggcgctcgcaaccaggcgtacattaatctcacattggttcggcctggcgatttcgttgtctcctatgccggaggcgtcatcaaggccatcggtgttgcaaccgcgcgatacgcagagtcgcagaagccagagggctatggccccgcaggcgagaattggaatctga

SEQ ID NO: 342450 - DNA, 654 bp, Pseudomonas aeruginosa
atgtcggcgcggatcgatggctgcgccttcaccactcgccgcgtgactgtcttccggccttccaggatggcgcggaacatggggccgccgaacagattggcgtttgtggaagacgagctggttatctgtgggcatgatgatgcgtctccggatatagtgtcgcggggccagattgagggagtttgtatgaatgggatttcgttgccgccagttgttggcgacgtagcggatattctttcgctgattggtttttttgtgactttatttgttgcctatcagactcggtatatcaagaatcattttttctctaaagttagattgaatgaaatgctccccgagcttcagcgggaggtggagttgtatatttcaagtttgagtgaatggcaaagtaccggtaagaaagaacttgttattcagagatttcatgttgtaagagggcttcttaaaaatgctcagggcaaggtccgggacaaggagctgcgcgaggtgaagtccctgcttgatatgatgcggataaaaagatatctagtattcgaacggagcgttgcggaactttcgattgacgaatgctgggaagtggcgggtaggatgaatacggttgttgtaatgttgagtcagagggtgaaggatttgaattgggtgggcacggtatga

SEQ ID NO: 342451 - DNA, 234 bp, Pseudomonas aeruginosa
atggaaaccggcactggagcactgatcaccgtcatcgacatggcgacagagggaactcgagcactcaggcagattgaagacctggtgcttcgagcgaacaacatccgcggcgcctctgaggaggtgctggtgctgtgtcgcgaggtggtgcagatcagtgtggacacgcgggcctttttcgccgcggagcgccaagaagcggagaaacacctgaatgaaatcgggcctcaataa

SEQ ID NO: 342452 - DNA, 303 bp, Pseudomonas aeruginosa
atgaaatcgggcctcaataaactggtcgccaagtatcggcatagccgccatcagaaccgcgggttaccggcgatcatcggtccccggacgctgaccaaccatcccaggcgctggagagtgcaggtgcgtctgtacctacccgccacgcccggggcggatgaacgacctgttgtcgacctggccatgcagccagatgcaccgatcgcctactcggcagcggcagtgatcgcccgcgacctactggcggaactgatgggcgaaaacccggaatgggaagatttcgaatgggaggtctgggcctga

SEQ ID NO: 342453 - DNA, 1257 bp, Pseudomonas aeruginosa
gtgaagcgcagccagatcaagcggcgcccgctggccgataccgtacttgccagcctggagcctgaaccaaaggaataccgggaactggacggtgacggcctgtactttcgcgttaagccggacggctcgaagtcttggcagctgcgctacaaaaaggcggatggcaagtggtcatggctgggtcttggcggttacggcactggcgaccaccaactgaccggcgaacaggctcgccgcaaagttcgcgaactacgcgacaacacggcgaaaggcgggagtgttctggcaaccaaacaagcccagaaagcagccgagctagaggcagcaaacaacaccttcgagcgcctggcgcgcgagtggtacagcgccaaatgcaagacctggacagaaggaactgctgtccgaaccatcggagcactggaaaagcacgttttccccgtgttcggtaaacggccgttcaccagcattctgccgatggaatggatgaacttcctgcgagccatggaagagacaggcatagtcgagcagacgagtcgcgttcgcggcatgtgcagagaaatctacgatctcgccagggttaccggacgcgccacccacaacccgctcgaaggcttgcataagttccttctgaccaagcctgtcgaaaatttcgcccatgtatcccttgatgaactacccgcactgctgagggccatccgctcctaccctcacgcaacagatgtgcgacttggcctgcagctgctcacgatgcttgcctgccgtccatctgagctacgcgaagcacgctggcaggagttagatctcgatgctgggttatggctgattcctgctgaacgcatgaagcgtcgccgcgagcacctcatacctttgcccagtcaagctattgccctgcttcgagaactgcacaacattacgggcaactaccagctgcttttccccggccgcagcgacacgactaagccacgtagcaacaccgtatttctgatggctctgcgccgccttggctatgaagcccgccagaccgggcatggcttccgccacctagccagcaccatcctcaacgaaaacggcttcgactcacagcacgttgaagctcagctctcgcatgtaaaagaaggcgtccggggcgtctatgacaaaagcacttacctagagcaacgcaaaatcatgatgcagtggtatgccgaccatcttgacagactggctgctggtaatgtagtacacatgaaacaaaaaaccaagattaataccaattaa

SEQ ID NO: 342454 - DNA, 783 bp, Pseudomonas aeruginosa
ttgcctgaaatagctatagacgaacattacaaccccgacctcgaccttagctatgcctttgcgcacatgctatttccacgcagagaggatgagaagcgtcgcaagctctatcttgcccacgaaatactgaacgagagattaaatccatacaaatacagctcgaaccatacaacaatccccaaagaactaatcaaaatagtcaccggctacggaaaactgcaaaacaatttagtcaatgcaacaaactgtgcgcacggcgcctcagtgggtcgaattttcttatcctttctcaggatacacgcaagcgatatcccgccctgcataactggttccagagcactggctgcttcacagatagcagtcgcgaccaactctttcggaaaaaaagcgcactcatcttcattagacacactccaagatgctgtacgacagtataagaaatccgcccacctatgggcgagtctagtctttatactagacgaggaagcggaagccacggataacgaagatcatgaaagggcagaaaaaattgcctcaaacttcccaaaactattcataggcacatcagaaacattagccaaactatatcaagacatacctaaagagcaaaaatactccaccccttttaacgaagaagaattttggcgatacccgctagtagatccggcatttctaggaatcttcctaccagacaacttgtcacccaaagaggcagctatcgttcataaggcccgagctagaaacccaagcaactcaaagacaacgctgaagacaacttcctaa

SEQ ID NO: 342455 - DNA, 318 bp, Pseudomonas aeruginosa
atgaaaacagatgcccgcaaactcagcccccaagaacagcgtggaaagcgcgccacggccctgcgcatgcgtgagcagggttacacctacatccgcccgttcgtcatcggccgcaaaaactggctgttcagcgacacacccaaaggcgccacagccagcgcacagatctatagtctgatcgaaaccgccaaagccaatggccaggagccctacgcctacctgcgccacatccttgagcgcctgcctcaggtcaacagcgtcgaaggctacgaagcgctgttgccgtggaactgctcgccagcgccagctgcttcctga

SEQ ID NO: 342456 - DNA, 216 bp, Pseudomonas aeruginosa
atgcatctagacacgcagaaaacattgatccgccaatccagcctgattgagcatctcgatctgtcgagatctggactggacaaactgcgcaaaaaggatgcaactttccccaaaccgatcaaggatggggcacatcggcaagcaacgtgttactacatcgtcgccgaaattgaagcatggctccgggctcagatcgagaaacgggatcagggttga

SEQ ID NO: 342457 - DNA, 714 bp, Pseudomonas aeruginosa
atggatggaaccacgatcaactcgcaggctggtattgcactgacctacagcggagaacagctcgatcagagcgacctagatctttgggctgcgcagctacacctgctgcgcaatcaccccctggatcaggagctccacacaagcatatacgccctgttaaaaggcttgggcatcacggacacgggccctagcagagccagcctgaaacacagactgctgcgcctcagcagctgcgagctgtcgatccgtactgcctcatgtgtatatgagggcaacctcactaagactgatggcctcgacggcaataaaccgcctgccctgagtctcaaccccagcatcatccggctattcgccagtgaccagtacaccctgattcactggggggtcagatgcatgctgagcgggagccccctggcgcagtggctgcacggatattattcgacccatgcagccccctacccggtacgcatcgacacactgcacaaactttcgggcagcaaaacccttagcccgggcaaatttctccagttactccgccgagctctggacaagctaaccctagccagcgccgagcacggccaaaaatttacgtatcagatcgatggcgagttggtcagggttgataagcgcccgagcccctcgcagcagcgccacctctcaaaacgccaaaaccgtaccgttacagcgggtaaaccttaccgtcatagcgggtaa

SEQ ID NO: 342458 - DNA, 870 bp, Pseudomonas aeruginosa
atgccacctctcaaacaccagacactcactcgttatcgtgccatcgagctgattgccctctgggaaggccgcctgattaccgctcaactcatggaatggttcggcatcactcggcagcaagcctcgaccgatatcaaccgctacaacaacgaactcaatccccaggccctgctgcatagcccgtccctcaagggctacatcccagccaacggattccaaccagtgctttgttcggggcatatcaacgagtacctggatctgctgagcagtaacggttctcagccaatgaatctggtgttggaatcccaaccaggggtagtggcagtccaactgcctgagcgagccgtcagacccgatgttgtacgtgaattggtaaaggcctgtcgcaacaaagccagtctgaaaatcgcctacagctcgatgcgcaatcccgaaccgcatgagcgaatcatttcgcctcacacccttatttacagcggctttcgctggcatgtcagggcctggtgtcacaagaaccagagcttccgggacttcctgctctcgcgcattagcggcacacctcagcctagcgatgaacatgctccgcctagcgagcctgaccacgcctggaatgagcagaccacgctgcacatcatccccaaccagcgcctaagcgaagctcagcaagccatgatcgctcgcgacttcgccatgacagatgggcaactccccattaccgtcagaaaagctctggcccactacacgctgcagcgttaccaggccgcaatcactgacgagcagtgctctcggggcgcagaacatccaatacagctgtcccccgaagatcgtgagcagcttttaccttacttgttcggcagtgaagtcgcttga

SEQ ID NO: 342459 - DNA, 609 bp, Pseudomonas aeruginosa
atgcagacgttcagctacgactccgacctcatcggcggttctctgcaagtacgcgaatgccgagtcatcgcggatctactgctgcaacaggcttccccagaacagtgggcggaagaaatacagcagcacaatcgcctgcagaaacgctcaccggcctcagccaaacgagttgctcaagcgctgcgtaaacgcctggaacgcctggatcagcctttctggcgagccctacgtgatggtgatgacgaacttgctactcaggtcgccttctgcgcggcgctggagcgcaacctgctgctggtggaattcatcgaaaccgtcctgcgtgatgcctatctgaccaaggcagaacatctcgaaccctggcattggcatgatttcctcgaagagcgcagccatcgcgaccctgccatcgagacctggacggaatccagccgcaagaaaatgggccaagtcatctatcgcatgctggccgaggtcaagctactcaaaagtacgcgcagcatgcagttgcagtccttactggtccgccctgaggttcgcaccttgctggatgagagctaccgccaccgcatcaaagcctgcctggaagtgtccagcagcaccctctga

SEQ ID NO: 342460 - DNA, 576 bp, Pseudomonas aeruginosa
atgaaccagcagctacaggatcggctgaaccagatcccagaaaaaatcctcaccgaggagtttctcaaaagccaagggctgggcaacgaaatcggcttctggatcttcgactatgaccccgaggatgagctgcaggtgcgccaatacctcgactttctcaaaagctttctggacaaaaaacacagtcagctgaaggttgtgaacatcaacctgctgcaagccatgaaggactatctggatcagcgcaacttcactgataaggccatccagatgcagaccaccaagggcgactcggcactgctcaaagcgcttgccggcccgctgcacatggacaagttcgcgccctacctgatggagcattaccgcgccacggaacacgatgttgtgctcattacaggcgtgggctctgtatggccggtgctccgcgcccacaacctgctcaacaaactgcatgccctgctcggccataagccgctggtactgttttacccggggcactactcaggccaatcgttggctctgttcaaccgcattaccagcaacaactactaccgcgcattcaagctggtgccctga

SEQ ID NO: 342461 - DNA, 3672 bp, Pseudomonas aeruginosa
gtgagcattaaagaaatcttcttcaaggaactcgaccgcccgattaacggtgtggtcaaggcggaccaggcagacgacgccaccgtgcaccaggaactcgacgaatacgtcgtgaccaacgagctggaaaaacatttccgcagcttcttcgagtcctacagcaccgatctcggcgatccctccatcgccaaccgagtgggcgtatggatcagcggcttctttggctcaggtaagtcgcacttcctgaaaacgctgtcttacctgctggccaacatcgaagcccatgacgcccagggcaacagcaagcgcgccgtagccttcttcgaccagaataaagtgcgcgacgccatgatccgtgctgacatcgacaaggccgtcgcaaatagcgccgacgttattctgttcaacattgacagcaaggccagctccaacgacgcaggcaacccgatcctcaacgtcttcctgcgcgttttcaacgaacaccagggtttcagcggcgaccacccgcacatcgcccacatggagcgccacctcactcagcgcggcgtgtatgagcagttcaagcaagccttcaacacagctacaggcctggagtgggtcgatgagcgtgacggttaccagttctaccaggacgacatcgaaaaggccctcgccagcgctttagggctctctgccgaagccgcgcacaaatggtttgaagcctcagagcaaaccttcagcgtgtcggttgagaacttctgcaattgggtgaaggaatatctcgacactcagccggccaagcaccgtgtgctgttcctggtcgacgaagtgggccagttcatcggcagcgatacccgcctgatgcttaccctgcagaccattaccgaaaatctcggcaccatctgcaagggccgcgcctggatcattgtcacctcacaggccgacatggatgccgtactcggcgagctgtccgccaccaaagccaatgacttctccaagattgccgggcgcttcaaaactcgcctgtcactttccagctccaacaccgacgaagtcatccagaagcgcctgctacgaaagacagaagctgccgaggcggaactgcgcgcgctctgggagcaaaagggcgacatcctgcgcaatcagatcaccttcgaccgctctggcccaacgctgaagaattacgacggtccagacagcttcgtcgccaactacccgttcgcgccttaccacttccaactggtgcaaaaagtcttcgaggaaattcgcaaggtcggtgcaaccggtgcgcacctggcctatggcgaacgttccatgctcgatgccttccagatggccgccctgtcactcaaggacaaacccctgggcgcattggtgcccatgtacagtttttaccgggcggtagaaggcttcctcgatacagccgtcaagcgcaccatcgaccaggccagtgaaagtgaagtgctcgatgacttcgacgtacagatcctgcgcaccctgttcatgattcgctatgtcgacttgatcaaaggcacgctcgataacctggtcaccctgtccatcgaagaggtcgacacagacaagcttgccctgcgtcgccgtcttgaaggcaccctgcagcgcctggaaaaggaaaacctggtcatccgcaacggtgatgagttcgtctttctcaccaacgaagagcgcgacatcacccgtaagatcaaagcgaccgaaatcgcctcctcggacgagaacaaggcactggccgagctgatctacaaggacctgctcaaggacaagaacaagttccgctacaacctgaccaagaccgactacagcatcggccgcttcctcgacggccacagcttggaaggccgctacgagcaggatcttcgcgtcgaggttatctctccgctagatccggactacgcgctgtatggtgaagccggttgcctcaacaagagcaacgaagccccagcgggcctcgcactgttcaaactccccgacagcagcgagctgttcggcgagctgcgcatttggctcaaaaccaacaaatttattcgtctcaacaacgatgataaccagcctgatctcagccgcatcctgtccgaccgtggccgtgaaaaccaggagcgtaaaaaacgcctgcgtctgatgctcgaagcgctgctggagcgcgctgaaatttatgccctcggccagcacctcaaactcaacggcagcaatatccagacccgcttcgacgaagcctgccaatacctgctggagaacacttacaacaagcttggctacctgcgcgtattgcaacaggagcccgagcgcgagctacatgccgtattgcacagtgatgacatcacccaactgggcctcaccctggatggggaagacggcaacgcccaagccatcaaagaggtcgagcaattcatcaccctgcgtgcctccggtaatgaccgcctgctcgtgtcagatatcgtcgagcgcttcaacaagcgtccgttcggctggcctgatggcgaaatcctcctgttgatcggccggctcgctgccgccgggcggatttccttccatgttgccggcccaagcctcgcattgccggatgctttcgaatacctgaccaacagccgcaagcggcgggaaatctcggtgcagaaaaagcgccagaccgatgaggtattgctcaagaaagtccgcaatctcagtcaggatctgttcaacgccctaggcccggccggtgagaaagagctctatgccttctaccgcagccgcctggaaacctggctctccgaactcaagagctacaagagcaaggttgatgtcgggcgcttcccaggcaaaagcacaatcgagaagtctctgctgaccctgcagcgtctgctgggcaacagcgatagcgtcgacttcttcaaggaggtggtcgacaaccagaacgactacctcgacctcgaagaggattaccgcgacctcaacgaatttttcaccaaccagttgcacagctggcagcagctgcaacaggccctgcgtcgcttcgaaaaaaaccgcaacgccctggagaaaaacgacagtgctcgtaaggcaatggtcgaactgcaggccatcgaaagccatgccagcccatacaaccagctgcacaaagtctctggcctggtagaaaccgttgaggcagtcaacgtcagcatcctcaccgaacagcgcgagcaggcgctggctgcaatagaccagaagatcgccctgctgcaggccgaaatcgccaagagcggcatcgaaagcgctgagctaagcaatcgtctgctgcgcccactgcagctgcttaaagccgaagccgagactgaaaccagcctggcccacatttaccaactggaaagccaaaccgccgaagaacgtctgcaagacggcatcttcgagctggagcgcgccattcaagccgaagtggatcgccagcaaaagctgcagcagcaagctgaaaaagccgcgcagcaaactgcccaaggtagcaatcaggtcaaggaagagcgcacgccgcctcccgttccggtcaagcctgttgcgccgcccaagccagtggtcgaaatcgctgccaccagcgttttcaacaagctgggtaatggcgtctaccttgaggcccaggccgacgtggatcgtttcctcagcgccttgaaagcagagctagatgcacagatccagcaaggcaaacgtattcggctgcgctag

SEQ ID NO: 342462 - DNA, 699 bp, Pseudomonas aeruginosa
atggacagactggaaaagatagaagcccgccgactgattctgagttggaaggatcgctggacgcagacaacacagcagcgcctcgaagtcgagtcgcggcagctgcagggcgagctgcacgccaaaatcgaccaaatcagtttttgggatgcacttttttccggccggtatctgcgcaacaccattcagccgctctttaccgagtggtgccaaaccaaagccacggaattgagaatggcggcagagcaagacctgcaatcagtcgtagcgcgagccatccccgaagaggatttcaccccctctctggacggacatagcagcaagggcacactgctggatgtaggcactgcagccatttcgacaggtcttgctgctgcgactattccagcggttgtcgccttttctacagccactgtatcggtaggtggtctgcttgggtttctgggcgtcaccacgacggtactcgtgacacgtaacttaatcgccggcctggtagtcctggggttcctatttctgatagccctgctgcgcttcaaaagcatcaagcgcaatgcccgcagccgcctgaaggccagggtcgacaaacagatcatcaagaaaatccacttcagcaaaaaagaacgatcactggcgatgggcatgaccaaaatgctcgaaaacactgcggacacgttgatcaaggagctgcgccatggttga

SEQ ID NO: 342463 - DNA, 987 bp, Pseudomonas aeruginosa
atggttgagcagatcctgtttgaggtgcccacaaagtttgccagcggtattgccgatggcagcatcgtgcgcatcggtacgctgatcaaggacagtatgtccggtcagattctcagccacgtacaggaaaccggcttggcccagaagcttctcagcaacgccagcctcttgccgttctcccctttgagtgccctggatctggcgtcctctggttacgccaacgtccagttgcatcaactcaaaaccatggtggaagggctgcagatgctgcagtacgccaacatcggccttgccgccaccgggcttggggtaagcgtgttgggctttatgctgatcaaccaaaagctcaaagggctcgaaagcgccatcgctcagctatccactcagatggacaagcacttccaagagctggcagaaaaacacctgcggcataagttcgccaatatctacgtgctgtttgagcgggccgaacaggcctcgtttttgcgcagcccggcgcaagaatggctgaccatcgaaggccagctcgccatggaaagcggcttcctaagaagcgagatcggccatcacctgacccagaacagcttccactacgactggttcaataaaatgaccagcgcgctggcaatgtgtaatgccgctcgcattcagtgcctgctgcaagccaacgagataagcgccgctcagcatgcctccacggttattgccgataactacagcgacctgtttgacccgctcagcgccacacaacttgcggcaagaatgaccgaagcggaacaagactcgcgagaggatgacctgcacctgttcaagtccaaccaagccaaagcagcgcaggtaatgttgggcctacgcgagatgaccgatgccgcgatgacgcaaccgttgctgctcgaacatctcggaagcagagaaatcagtggccaggcttacctgaacgcaatcaacactcaggatcaacaccccatcattctgctgaccccataa

SEQ ID NO: 342464 - DNA, 1479 bp, Pseudomonas aeruginosa
atgcaaccggccgggtacaaccgcctgcttcaggagtcgacagtcaaggcgctgccacctgcgcgcctggcggaagtccgtgcagtcacccgcaaggaggttatcggccaaaccctggcagtgcccgccagtatggcaccggctgcgggcgatctgctcggccatatcctgttcgccctcaagcacgaaggcgttgagctggccatcctggcccagtgcctgccgctgattactgaacccgagctccgcaccgcgattgaggccagccccaccagccagtacctgcgtaaagccgcgtacttgtgggagcacttcaccggtcagtgcctccagcatcaggcaagcaacctgcgcaccgcctacgtgccgctgtttgatcccgctcagtacatcacagttgcagggacgaagaacaaccgctggcgtgtgctgtttaacggcatcggcagcctcgactactgcgtcaccctgcgccgcaccgatgcgctgcaggcgctgctggagcgcaacctgctgcaacaggctatagatttcagtgagtcgctgccgcgcgacatcctcaaccgcgccctggcgtgggcctacctgcacgaaacccgcgactcctacgccatcgaaaacgaaacccccagcgaagacaaagccgcccgcttcgttgacttgctcaagcaggcccaccagccccgccagctggatgaagactatttcgtcgagctgcaaaacgccgtcatcagtaacccctacgcccaggctgctgcatttcgtcatcagcagaactacctcagcaacggcctgcgcggcgcactcggcgttacctatctaccgccaccgcccaagctcggccgcgagctgatggagcagctcatccagctggccaaccagccgcccgaagacctcgacccactgttgctggccagcactgtctcctttgcttttgtctttattcacccctttatggatggtaacggccgcctgtcacgcttcctctttcatcaggtgctctgccagcgcggcgcactcaagcacggcctgctgctgccggtatccgtggccctgcgccagaacgaggccgactacctggccaccctgcaggggttctccgaacccgcgcggcgcttctgggacgtgacctttatcgacgagggccagttcgctttcgacttcaccggccacgaagcgctttaccgttactgggacggcaccgcctgcgccgaatttatgctgcgcgccaccgagcaggcgctcgaacgccacctcaaggaagaaacccagttcctcaatcgttacgacgccatctaccgccgtatcgatcagcaattcgacatccccaacagcaccctcgcgcggctggtgatgttctgcctcgaccaaaacggcacgctctcgcaaaaccgccgcaagcaataccagcatcaagtgccggcagccgtcttcgatgccctggaatccgcctggcgcgaggtcatcaaccatggctaa

SEQ ID NO: 342465 - DNA, 3570 bp, Pseudomonas aeruginosa
atgaacaccagccacatcaaaagctacgcccccaaggcccgtaccgcctttattgccgccatgaccaaacgcgcggcgctgtttggcattcgcgagtccagcatcccagccatgggcattgcgcctgtggagcaaaagggtgatctggtactgatcggtgagcgcgcctttccggccagcatcattcgcccgcgcgccgcgctggttaaaaaggtcgaacaactgggctttgcccaagccatggagcaggctgcctacagctggttcaaccgcctgtgcgccatccgctatatggagctgcaggactacctcgaccacggccgccgcgtgctcagcgccgctgacggcagcgcggacaccccgcaaattctggaggactgtttagaggtcgacctgccgggcctcgataaacagctgattaccgagctcaagctcgatggcaacaaggatgaagaactctaccgcgagctgctccttgctcagtgtcacgccctgcatcaggccatgccgtttctctttgaagcagtggatgacgccaccgagctgctgctgcccgacaacctgaccaaaaccgactcgctgatccgcgagctggtcagcgccattcccgaagaggactgggccaacatcgagatcatcggctggctctaccagttctacatctccgagaaaaaggatcaggtcatcggcaaggtagtgaagagcgaggacattcccgccgccacccagctgtttacgcccaattggatcgtcaagtacatggtccagaactccctcggcgcgcagtggctggcgacctacccggactcaccgctcaaggcgcagatggagtactacatcgagccggctgagcagactgatgaggtcaacgcgcaactcgccgccatcaccccggaaagcctcaatcccgaagagttgaccctgatcgacccggccagtggctccggccatatcctggtcgaggcctatgacctgttcaaggccatctacctggagcgcggctaccgccagcgcgacgtggcgcagctgattcttgagaagaatctctttggcctcgacatcgacgaacgagcagcgcagctatccggctttgccttgatgatgaagggccgcgccgatgaccgccggttgttcgaacgcggggtcaagctcaatgtcatggcactggtggacagcgcgggcttcgatgccgaggtagtggctaatggcgtaaagctggcggacttcgggttgcagctagatgatctcactgagttgaagaggttgtttgagcatgccactacctttggctcgttgattcaggtgccagtggggctggcggaaaagctacctgtgttgaaacatctgagcgagacagccagccaggatctttttataacagatgaaataaagcgattggggctgctggtacagcaggctgagttgctgactgaacactacgacgcggtggtggcgaaccctccttatatgagttcgagtgggatgaacgccctcatgaagcggctagccaaggattacttccctgacgccaggaacgatctgttcgcctgcttcattgagcgcggttacacgctcgccacgattgcgggtcgctgttcgatggtcacgatgcagagttggatgttcctgtcatcgttcgagcgaatgcgcgagcgaatgctgcgggcaaagaccatcacgacgatggcccatatcggctacaacagctttccgtcgatgaactcgaaggtcgcacaggcgacggtgttctcgatcacgaacaagcgttgcggcaactacatcggcaccttcatcgacctgaatagcgcgccccaatccgcggacaagagagctgtgtttctagcgcgagatcccgcgaataggttcgaaatcgcggcggacgagttcgcgaagatccaaggaagtccgctcgcctattggttgagcgatcaaatgcgacagctgttcgtcgctcacaaggagcggttgaagaccaactccggattgaccactggggacaacgagcgctttgttcgtttctggtgggatgtctcggcggagctgctcgggctcggtattcaatcccgagccgagagtctttcggcagcggcaaagtggtacccatacaacaaaggtggagactataggcgttggtatggcaatgacgagcttgtcgtcaactggtacaaggatggacgcgaaattcagtcaactggacgttgtgtcctgcgaagcaaggatgagtacttcaagcccggagtcacttggggcgggttgacctcgtcggcggtttcgtttcgtctctccgaggtcggacatttgttcgactcaaacaagggaccgatgatcttcgggcctgatgatcatctgctgtaccgccttggccttttgaacagtacgttctcgcacgaagtgctgcagagtctgaacccgacgatctcaacgcagaccggcgatatcgaacggatcccggcaccgtactttccatccattcgggaacgtgtgcaggggctcgtgcaggacctcgtcgatatcgcttgcaaagactggaacgcttacgaacgttcctggggcttccaattcctcccgatcttaacggcatcttctgagccggcgcccaccctcgaatccagttacaacgcctggatcacactgaatcgcgaaaccatcgccgagatgcagcgcctcgaagaagagaacaaccgcctctttatcgacgcctatggcctgacggacgagctcacccccgatgtgcgtatcgagcagatcacccttacggtcaacccggcctatcgctatggcggcaagctcagcgaggctgaattgtggacgcgcttccgtgaagacagcatgcaagagctggtgtcctacgccgtcggctgcatgatgggccgctacagcctcgatgagcccggcctgatctacgcccacagcggcaaccagggcttcgaccctagccgctacactcgcttcccagccgatgccgacggcattctgccgctcactgataaagagtggtttgccgacgatgcggccaaccgcctgatcgagtttatttcagtggcctgggacaaaacccacctcgaagccaacctgcgctttctcgccgacaacctcgcgccgaaaaagaccgagtccagccgcgacaccctgcgtcgttacctctgcgacaacttcttcaaagatcacctgcaaacctacaaaaagcgcccgatctactggctattcagcagcggcaaacaaaaagccttccagtgcctggtctacctgcaccgctacaacgaaggcaccctggcgcgcatgcgcaccgaatacgtcatccccctcagcgccaaactgagcagctacgccgccaaactggaaaaagacatcgaagccagtaacagcaccgccgaaaagaaagccctggaaaagcagctttcaaccctgcacaaccaacaagccgaactcgccaccttcgacgaaaaactccgccactacgccgaccaacgcatcagcctggatctggatgacggggtgaaggtgaactacggaaagttcggtgatttgttggctgaggtgaaggcagtgactggggataaggctgattaa

SEQ ID NO: 342466 - DNA, 714 bp, Pseudomonas aeruginosa
atggatagagagatttcaatacccacaggcgcaggcaagtcaatccgcatatccagcgatatgcgaataaatcaatcttttttacctatcagcgactcagtactcattatgaaagcagctgaagtactgggggtgaatgatgcagggcaaagccctaaggaaggaaccgcattattctatcctgcagccggtagagaccttataacacccattttattgggcgttccattttgcactgaattttatttttacgagtgcagcgcagggccgttccgttcagcaaaggctatcgagaaagcgttagcaaaaatatttggcaatgttgattttgagtcgggaaactcatgcaggtatatttatacatttatatatgaagaccagcagcgccgagtaaactggttaagagggaaaaattcagacttccttgagctagatgtaaacctagcgatgtattttcatcggggcgatagttatggcgaaggtggttcaggtgaatgctgggatagtactctcttcaattttttgaaaagtaaagctcggagcggcttgcttcgcgttgttacacaaggcgagccaggaggattaggggaggatctagttaatacattacaaacgattcaagtaaactcagaatcaacgatgcatcgtgacgggaagtattatatcggagtgtatagtgcttccaaagaacaacctacgattttaaaattttaa

SEQ ID NO: 342467 - DNA, 294 bp, Pseudomonas aeruginosa
atgaaacgcgcgcccgtcctgttcgccttcgcgtgcctgctggccggctgcaaccaaccgcaggcgcagtcggtcgatgcgctggccgccgacccggtgcggctgcatgcgctgcgtgcgcagtgccagggtggcgagcatgacggcgcgttctgcgcgcgggtcgcccaggccgacctgcgccgtttcctctccgggcaggttggcccggacgaataccaggcgctcgacgatctgccgccgattccggcgagcttcgacgaacccatcgccgcagtggagggtgggccatga

SEQ ID NO: 342468 - DNA, 729 bp, Pseudomonas aeruginosa
atgaagattcgccttctcaccctcgctgttgccgcgttgatcggcgtcatgcccgttgcgcaggcgcaatgggtcgtcgtcgatccgaccaatctcgtgcagaacacgctgaccgcgattcgcacgctggagcaaatcaacaaccagatccagcagctccagaacgaagcacagatgttgaccaaccaggcacgcaatctcgccagcctgccgttcaacgtggccaaccggctgcgctcgacgctcgccaccaccgagcgattgattgcacaggcgcaagggctggcgttcgaggtgcagagcatgaacgccgagttcgcgcgtctatacccggaacagtacgccgctaccgtgagcggtgaccagatgtaccaggacgcgcgccagcgttggcagcacacgctcaacggtttgcagaccgcgatgcagatgcaggcgcaggtgtcgcagaacctgtccgaagacgagggcgtgctgaccgatctggtgagccagagccagtccgcgaccggcgcgctgcaagcgatgcaggcgaccaaccagctcttggccttgcaggcgaagcagtccatccaggcacagcagcttcagctcacgcaggaccgtgcgacggcgctggaactggcacgtcaggccgccgccgtcgaacggggccgcgaggtgacgcggcgtttcctcggcacgggcacggcgtacacgccgcagtccgtcaccttctacggcaactga

SEQ ID NO: 342469 - DNA, 384 bp, Pseudomonas aeruginosa
atgacgcagacgcacgtccatgctttccgctttttcgtaaatccagcttcgtgttcggcgcgcctgcgccgcctggccgggcctgcgcatcacggcctgctgctggccaccgtgatgctgatgacggccggcacggcgcaggccgccggctcctcgatgccctgggaagggccgctgcaatccatcctcgaatccatccaagggccggtcgcgcgcatcgtcgcggtcatcatcatcatcgccacgggcctcgcgctggccttcggcgacacgtcgggcggcttccgcaagctgatccagatcgtgttcgggttgagcatcgccttcgcggcgtcctcgttcttcctgtcgttcttcagcttctccggcggggccgtcgtatga

SEQ ID NO: 342470 - DNA, 279 bp, Pseudomonas aeruginosa
gtgaagaagatcgttccattcttgctggtggttgcgttgactgcctgtggccagtcggaggcgccacgtaaggccgccgattcggaggtaaacgccccgacggttgaggtgctggcggccaaccccgaacgactcaaggaactgcgccagcaatgcaagacagaccggctcaagctgggcgacgaactctgcaaccgcgtggccgaggcgacgaatctgcgcttcatgggtgatgggaaaacgccgtacacgccgccgaaagagcagccgaaattctga

SEQ ID NO: 342471 - DNA, 339 bp, Pseudomonas aeruginosa
atgtcccactatctcgtcgaactctatacgccaaacgccgactggaaggcactggctgccgaacagcgccagcagttcttgggggccatcggcaccgctatgagtggcttgtccaacatgggcgttgaagttctcacgctcacagaaatcgaacccggcatagaccggggcagcgaacaccgcttcctgggcatttggcgctttcccgacgctcagtcgcgcgatgcgctactggctggcattaaggccagtggctggtatggatacttcgaccacctgaatgcggctggcgcggatggtgacttcgccagacacctcagcgctttggagaacgtataa

SEQ ID NO: 342472 - DNA, 771 bp, Pseudomonas aeruginosa
atgactgatgctcgcaaaggtgcaatccgcgctgccgatatcccttcggacgtgctgcaggccctggcacgcggcgaaatgcaaagcgcgaccttggccgaatgcatggccgtcgatcaggctcagctaatgcgcgcggtctttcctgacctgctgcccgaggttttgaaagaagtcgattctgcttgcgaactaggcattctcaaacgtatgggccgcattggcgccctgttgctggatgccatgggggctgacggtatcgaggcgtgccgaatgcacggcgccgacactgtacgcggctgggcctgcttcatgatcggcgcccagcccgggctacttctgcgtgcgcggctgaccgccatccgtccactggccgacgacgaccatttcggcgtgcgtgaatgggcctggatggcgatgcgcccgcacttgacggtggacctggatgtttccattgcacttctggcggaatggacgacatcttcctccgaacgcttgcgccgattcgccagtgaagccctacgcccgcgcggcgtgtggtgcacccacattgctgcgctcaagcgcgagcctgagcgggccatccccatcctgacgccacttcgcgccgacccttccatctacgttcaggactcggtagccaactggctcaacgatgccgccaaggatcaacccgattgggtacgtggtctatgcactcaatggctgcaagcgacgcccgccgatgccacccgccgtatctgccaacgcgctttgcgcaacctcaagtaa

SEQ ID NO: 342473 - DNA, 495 bp, Pseudomonas aeruginosa
atgaatcttgagcagaagtaccaagcgctgatacaggaggcacggcaacggaagatgcccgacgttgagggtattcgcctgtgctttcagacgctttcgcttgccgctggaatcgaccgcgactgcgccgccctgctggcaccgcatggtctgtccgaggggcgcttcgtcctgctgtttctgcttgatgccgcttccgatgggctggcacccaacacgctggccgaacaggcaggcgtcactcgcgccaccgtcacaggattgctggatggcctggagcgcgaaggattgatcgagcggcacgcggacgccaacgaccgccgtgcgctgtgcatacggctcacgcgcaaaggaaaacgtgtggccaagaccgtgttcgagcagcatggccggtggattgccagcctatacggcaacctctctgcgccggagcgcgaacaactggcgaccctactggagaaggtggccggcaatctcgtaggcacggctccatga

SEQ ID NO: 342474 - DNA, 1956 bp, Pseudomonas aeruginosa
atgagccagcgcgacgacgatcgtttccgcgtccgccctggtgcaccgaagcagcgcggcgatgccttcatcaaccaggtgctgcgccagaccagcaaggccggcgcgaaggccggcaaggcgatggcgaaagccggccggcagcccggtgcccggctggggcgcgggcacgtcgccgcgcgctttgctggccggggacttggggcgaacgcccggcgtgtgaccatcaaggcgcggctggtgaatctagctcaggccggagcgcgcacaaccgccgcgcacctgcgctacatcgagcgcgaaggcgtcgatcgccagggtggaccagaccgtgcctacgggccgatgaccgatgccgctaacctcgaagctttcaaggcgcgcagcgccgacgaccgccaccagttccgcttcatcgtctcgccggaagacgccgagcaactcgacaacctgcgcacctacacccgtcatctgatggcgcgcatggaggccgacctgggcacgcgcctggaatgggtggccgtcgatcactggaacaccgacaacccacacacgcacgtcgtcctgcgcggcaaggacgatactggcaaagacctcatcatcgcccgcgactacatcgccgggggaatgcgccaccgggcatcggaactggcgacgcagtggctggggccacgcaccgaactggagatccagcgcgccatgcagcgcgaggtggaacaggagcggtggacagggctggaccgcagcttgcagcgcgaggccgtggacggtttggtacggccggagacgttggccgaaccccggctgcagcgccagcggcaaatgctgatcggccgcctgcaacgcttgcagcaaatgggcctggcgaccgagcagcagcctggcacgtggactatccatgccgacgccgaatccacgctgcgggcaatgggcgagcgcggggacatcatccgcacgatgcagcggaccatgagcggccggcagcgcgagctggcggtgtttcagcccagcgagtatggccgcacaatcgtgggcagtgtcgtcggcaagggactggccgatgaactgtacgacaagggctatttggtcctcgatggcatcgacggcaaggcgcactacgtcgcgctgccgccgcggtcggaactggagcagtacccgactggcgccgtggtggaagtgaaaggctcggccgacgtgcgcgtggccgaccggaacatcgccgcgctggcggtcgatggcgtgtaccgcaccgatcaccatctggccgtcgcacagggacaagccacccctagccgcgatccgcacgaggtggtggccgcccatgtgcgtcggcttgaagccctgcgccgggctggcatcgtggagcgtgtcgccgaaggcgtttggcgcgtgcctgacgatctggccgagcgaggccgccagtacgacgcacatcgcctcagcggcggcgtggcggcggaactgaaatcgcacctgccggtcgagcggcaagcccgcgtcatcggcgccacctggctcgaccagcagttgatcggtggcggcaaggggctgggcgacctgggctttggcggagaggtcaaagatgccctacgccaacgcgccgacttcctgatcgaacaggggctggccgagcggcgagggcagcgcgtcatcctggcgcgcaacctgctggcgacgttgcgcgggcgtgagctggcgaagaccgcgcaggacattgccacggaaaccggtctggagcatcggcaggtggtcgacggacagcgcgtgaccggcacctatcggcgcagcgtcatgctcgccagtgggcgtttcgccatgctcgatgacggcgtgggcttctcgttagtgccgtggaagcccgtgatcgagcaacgtctggggcggcaacttgccgctacggtgcgcagtggcggggtctcctggcaaatcggacggcaacgtggccttgctgtatag

SEQ ID NO: 342475 - DNA, 588 bp, Pseudomonas aeruginosa
  misc_feature (469)..(469): n is a, c, g, or t
atgacgaccgtttccatggtcgataacccgccgcgtccttgctcgcgcctacgcgctcgcatcgcgctgacgggcttgtccgcctgcggcctcgctgcgctggcctgggcgtccttcacgtcgccactgccgcgcctgacctacaacccgtccgacagcgtggcggtcggctggtatcgcatcgaaccgttcgaccctcgcgccgcctcgctgccacgtccgttgtccgtaggcagcatcgtgctggtgccgctaccggccgaggccgccacgttggcggcgcagcgcggctacctgccgacgcgcgtgccgctgctcaagcgcgtgggcgcggtcgcaccgcagcaggtgtgcatcgccagcggcatcgtccgcatcgatggcgtgcctacggccgccgcgctgcgtgccgaccggctgggccggccgctgccagcgtggcaacagtgccgtcgcctcgaacccgacnagctgttcctgttgagcgtgaccaatccggcgtcgttcgacagccgctacttcggcccggtcagcgcgtccgccgtgattggcgtcgcgcatccgctctggctggagacgcgcccatga

SEQ ID NO: 342476 - DNA, 534 bp, Pseudomonas aeruginosa
atgaacgcacagccttcggcgaccatggcaacgccgccgccatcgctcgcggtgctcgccggccaagccagcatcgcgccactgacgcgcgtatcgctcgcctacgtcgagcaacgcatcgtcctctacctgcgcttcggagaaccggcgcgcaccgtccggctcgaccgctggcggcgcgtcgctgtgttcctgccgggcgcgctgttctgccgcattcgctggcaagccaacgactacggcacgacccgttggcagctcatagtgatgcaggcttgcacaccgctggacgcggcgcagcgcatccctggagtgctgccgggcgcgcgcttgctgctgcaggccgagggcgagccgtccgtgcgcgccgtgctggcgcagatcgacgccagcgaggcacagggcatcgcgccggccgccacgtcgcccgcgtactggcggacgctcggcaaccggctcgccgcgcgtctgccgctgccgacgtacaccgccgagcgacacgccgcctggctggccgggagggcgctgccatga

SEQ ID NO: 342477 - DNA, 639 bp, Pseudomonas aeruginosa
atgatcatcgcgctgctcaaccagaaaggcggcgtgggcaagaccacgctggccacgcacatcgcgggcgagctggcgatgcgtggccagcacgtcgtcctgctcgatgccgacccgcaaggctcggcgctggactggacgcaacggcgcgcgcagcaaggcttgccgcgcttgttcagcgccgtgggcctggcaagggagacgctgcaccaggaagcgccggagctggcccgtcgcgccgatcacgtcgtcatcgacggcccgccacgcattgccgcgctggcgcgctcggcgctgctggcggccgagcgcgtgctgattcccgtgcaacccagcccctacgacgtctgggccagcgccgagatggtcacgctgatacgtgaggcgcaagtgttccggcctgcgctgcgcgcggccttcgccatcaaccggcgcgtcagcaccaccatcatcggccgcgaggcgcgccaggcgctttccgaccagccactgccggcgctgcgctcggaagtgcatcagcgcatcgtcttcgccgacagcgtggccgccggtcggctcgcccgcgagacggcgcccgacagtgccgccgcgcgtgagattgcggcgctcaccgacgatctgctgcggtggccgacatga

SEQ ID NO: 342478 - DNA, 756 bp, Pseudomonas aeruginosa
atggctgatcgaagcaccgattcctggtatccgaccgccgcgtatctttacgtgctgcatctggacggtcccgcgctggcctgggagtacctgcgccgccatcccgactaccggcgcgactggctgcgccgtcgtcgccagccggaggcggcacatgcctggggactgcgcctgctggaagacccgaccctggatgcgcgcgacgcgcacccggcctggtttcctgaccacgacggcgtgctccagctctacccggacgccgacccgccgtccgatgccgacgccttcgcgttctggagcatccccggccgcaagcacctgatccatgacggcaagcgcctggtgctggcggcgcactggcccggctgctgcgtgcggctcgcactcgcaccgggcctggaagatggcatggcctacctctatgccgtccgcgcctgcgctgcgccctgcgggcgctaccgcacgctcgccgccgaactggacaagctggcgacgatcgccggggccgcgcctgcggcggccgcccgtccccggcccacgcctgccgtactgctggaactgcacaccttgcaagcgctcgacgcgaccctggcgggcgcgtccgtgcgcgaggccgccgaaggattgttcggtgccgaggccgtggccgacggctggtacaccgacggcggcctgcgctcgcgcgtgcgccgcctggtgcggcgtggccaatcgctgatgcgcggcggctaccgccgccttgcacagctcgaatga

SEQ ID NO: 342479 - DNA, 351 bp, Pseudomonas aeruginosa
atgacgcatccgctcaccacggccgaggagcgcgcgcaactgcttgccaacggcgcggcgcgtgcggccggccagagcatcgacccgctgccggtggtgcggctgttcacgccggatgcgcacgcgacctggctgctggccgcgctcgacccagccgatggcgataccgcctatggcttgatcgacctcggccttgggatgccggcgctggggacggtcaaactgtccgacctggcggccatcgtcgggccgcagcagcggcccgtcctgcgtgacctgtacttccaggcggctcggccgctatcggagtacgtccggctggcgcagcgcgatggctcgatccccgactaa

SEQ ID NO: 342480 - DNA, 3270 bp, Pseudomonas aeruginosa
atggagtcagagaacatcatccgctattggcatgcagtcgaattgctgcagccgcaatcggcccccaagatcaaaaagcgcagcagcgcctatggagcgttccttcacgatacgcccagcacgcgccccatccctccctgggcacccgggagcattgtcagcaagcaggcgcttcctgataagcgcgaatggagccacacgctctatgctcacctgtacgacagccggctcgtcgccgccgcgctcaaagaactgtacggcgctgaccagggctaccgtgagccgcagcatcgcgagtcggcgctgttcgccgcgaagttcacgatggccgggcaactggtggaaaacagtttcgtgctctccagcgaggcctggttcctcgggcgggcactggcgggacaggactggacgcgcggattcgaggacgatcaacgggccgccgccgagcaggcgcaaacgcaactccagggccatgtgtccggcgatgcactgcgggacttcaccctgtgggtgctgcagttcctcggcgtggcggacttctttgcagccgtgggtcgcccgccgctgcgattccgctcccaacctgtcaaacccgacaaacccacgtcggaagacgatccgctcaacagcttcctgctcgaagacttggccaccgtcgccgatagcctcggcaagggtgtgacgagcgaagcgttgaaccagtacctgcgccgacacgatccgcgacagcgcctgcacatcgacgccgacgtcgcttcgctgtcgctgatcgagcgactgatgccgcaggcctatgccgacagttgctggccttccgaacggcatcttgggcttgtgcattcccagcagctagccgtgaacaccgtcctgtccacgcttggcgacggacaggggctgctgggggtcaatggtccgccgggcacgggcaagacgaccctgttgcgcgacttgattgccgccatcatcaccggccgggccgacgtgcttgccacgctacgccgggcatccgacggcttcgccggcaatgcgcgcgaagccagcaacgatggcggcaaggagcaggtagcctacaagctcaatccttcgctgtacggcttcgagatcgtggtcgcttcgtccaacaacggcgccgtggagaacgtcaccctcgaactgccccagcgcgacaaaatcgacgagagctggttgcccgaagccgagcacttcgccgacctgggcgagctgatcaccgacaagccggcctggggattgatctccggtgcgctgggcagcaaggctcggcgcaccaagttcgtggagcggtacttctacgggcagcgcccgtttggcggaccggaccgtgcggacggtaacggggaagtcagcgacgaggccgagactgacgatgagaatgtcgccaaggccctgtttgccggtccgaccactgtggccaacaccgatggcgagcaagcgcttccgcagcagcagaagaaagcgccggaaggcctgatgacatggctcggcaggcacagccaactcaacaaggagcgcacgtcggaacaacgccaagccctgtggcagcaggccgttgccgagtaccaggaagccaaggcgcaggttcgcacggcttgcgccgatgcctatcgcatccgcgcactgatccaaaccctgctaacggtcaggaagaagttagccgaggcgaccgccgccgtgcaggcgctcgaacagcacctggcgcacacggcggaacagcaggcgcgcctggacaccgaggaaggccgccccgccaacgcggcattcaaacatgcgctggaggcgctcacacagcaccaggcgagcaggccggggttctgggcgaacctgcgcagcctgtggggagcgtcacgcgcatggaagacagtgctgaagctgctgcaagaccagcgcgaccacgcgaaggccgagttcgatcgcgtcgcacggctcgccaagcagttcgaggcctccagccagcagctagagcggcagatcaccggtgcgcggcagacgttgcagcaatggcatgcggaagatcaatccctgacgcaacaagccagcgacttggccagcgcctgccgggccgaccacctgttggcttggctgcgcggcggcgtcatcggtcacggcgatgccatcgaactggccgagccctggcacatcgagggctggcgacaggcccgtgcgcgcgtcttcatccaggcactgaagctgcatcggacgttctttgagctggaggccgcacggatgcgctccaacctgttcctgatcaacgcactgttgaccggcccgcgcttgcaggggctctcacgcgatgcgatccgctcggcttgggcctcgctgttcatggtcgtgccggtactcagcagcaccttcgcctcgttcgcacgttcgttcagctcattgggtgcgggggagatcggctggctgctggtggacgaagccggacaggcgtccccgcaagcggcggtgggcgcgctgtggcgcgcccggcgcgcgctgcttgtgggcgaccccctgcaactcaagcccattgtcaccgtgtccgacgcggtgctggaacacatgcgcacgcgctaccgcgtcgatgcgcattggctccccaatagacagtccgcccagaccttggcggaccaagcaacgaagtggggtcgcctggcgggaccgagcgacagcaaaacgtgggtggggttgcccttggtcgtgcatcggcgctgcgacaagccgatgcacgggctggccaaccgcatcgcctacgacggcgccatggtgtacggcaccatcgcaccgtgcgccgacaaggaaacacgcgcccgcctgccgacgggatggatccacgccagtggaacatccgacgggaactgggtgccggccgaaggagaggccctgcaggcactgctcgccttgctgcgcgaggacggcgtggatgcggcggacatctcggtcatcacgcccttcaaggcggtccaggaaaacctcaaacgcctgctcggcgacacgatggtttccggaaccatccacaccatgcagggcaaggaggcgccggttgtcatcatggtgctgggcggcaataccgaaggttccggcgcacgcgattgggcggtctcggagcccaacctgctgaacgtggcggcaacacgggccaagcggcgcttctacgtaatcggcgaccggaacgactggcagaaccgagctctgttttgcgatgtcatggatctcttgccgctccagcgccttcccgagtgcgaagcggtattgacggcacaatctcagtaa

SEQ ID NO: 342481 - DNA, 2037 bp, Pseudomonas aeruginosa
atgaacgccattacccaaaccgaagcccacgccaccgccgcgctggaagtggccgacccggccaagaacctgattctggttccgctctcgcggctgctggcgcgccgctccaagcgcaacgtgcgcacgaccccgcgcctgtccatccccgaactggccgcgagcatttcccgtgttggcctgctacaaaacctcatcgtcatcctcgccgccgatggcgagcagtacgaagtcgtcgcgggcgaccgccgcctgaccgccttgaagctgctggcgaagaagaagcgcatccctgccgacttcgaggtgccgtgcctgctggtggccgacgcttccgcccgcaccgtgagcctagccgagaacgtccagcgcgagaacatgcaccccgccgaccagttcgccgccttcgccgcgctggtcaaggaaggccgccccatcgaggacattgccgccgacttcggcgtgtccccgctggtggtacagcggcgcttgaagctggccaacgtctcgccgcgtctgctggccgactatcgggccgggaccgtgacgctggaacagttgatggccttggccgtcaccgacgaccacgccgcacaggaagccgcgttctacgaggcgccgcagtggcagcgcagcccgtccacgctgcgcgaacgcctgaccgaacgcgaaaccgacgccacgcacccgctggcgcgcttcgtcgggctggacgcctacacggcggcaggcggcggcatccgccgcgacctgttcgccgaaggcgacgccggaacctacctgaccgacgccgcgctgctggaatcgctggggcgcggcaagctggacgcgctggccgagggcgcgcgcgccgagggctgggcgtgggtagaagccgtgccgcacttgagccatgccgagcggcaggcgttccagaacgccccgcgccagcgccgcgaaccgaccgcccgcgaagcccgccgtatagcctcgctgcaaacccgcctcgacaaaatcgacgccgaattggaagacgcctacgacgccgagaacgaggacaaggccgaggcgctggagtcgcgccgcgaacaggtggccgaggaactgcaagacgcggaagccgccttgcaggactacaccccggacgtgcgcgccgtggccggcgccatcgtcaccctcgaccgcagcggcgaggccgtgattcatcgcgggttgctgcgcgaagcggaagcgaaggcactgcgcacgctggaaaagctacggcagggtttcacagcaggcgaaggcgcgaacgacgaggaaggcgacgacgccgacgaagcacccaaggccgcttgcctgtccgaccggctggcgcagcggttgagcgcgcaccgcacggcagcgctgcaagtcgaagtcgctcggcatccgcacgtcgcactggccgcgctggtgcatgggatggtgcaaaccgtcctgcaggacggcttcggccacgacttgccactgggcgtacgcctgaccgtgcaagaccggccggaaggcttggccccggactggccggaatcacctgccgccgtggcgttgcgtgacttgcagcaggtcgcgggcgaggcattgccgcaggacagcaccgaactgttcgccgcgctgctggcgaagccgcaggacgagctggtgcggctgctggccgtatgcatcgcggccacggtggacgtggtgacgccccgcgctgcgcaacgccagcccggcgcggaactggcgcaggccgtggggctggacatggcggcatggtggaaaccgaccgccgagagctatttccggcacatctcgaaggcggcgattctggaagccgcgggacagttcgcaccggagcacgtcacccggctggcgaaattgaagaaggccgacatcgccagcgaggccgaacggctggcggacgggacggactggatgcctgccgtgttccaggccgacctcgacacgaaaccggaaggcgttccggaggcagcggacgaaccggatgcgctggaagatgccgccggcgaggtggaagcccacacgctggccgcgtga

SEQ ID NO: 342482 - DNA, 810 bp, Pseudomonas aeruginosa
atgagttcaccccagccaacgaacgcgcagcaaatctgcgagaacatcctcatcgagggaaagcgctacaacatcgagcacgacatactgcccagcgagaatgccgtcgccgaccgtctgctcacccgtggcgtcgagctgaaggacgcctatggcgagctgtacgagaagctgcaccggcatcctcccgcactcaaggtcttcttggacctcctgctgagcacggcggcgttctggagtccggagaagatcgccgaggcgcgcgtcgaacgggacgaactggccggcgtcaaccggcagatcgcgcggaaggccgaagaattggcggagctgctggagcgccgcaccgatctgaacaacacctccggcttcagcagcgaaacgcagtaccacgtctgcgacgtgatcgaagcggcatccgagcgcaactacctgttcaactcctgggtcaaggatcgcctggatgcccttcgcggccagttcgacctgaaatactggccctcgctggatcagttcgttcgagagctggccgccgacgcggagagcgccagcatggagcccacggatcctttgaccgcagcggccaccgtggcagcccgcccgtctcgggccgacttcttcaaggcactgtttgccgccatcgaagagaacggcgcatgcaactacgggcagctacccaaggacttcaaactcaccgacggcgcgctggcgtcgttggcgaactgcgcattggacttggagcccgatgacttggccgacagtacctacgtgaaacggcttcgccagcgcgaacgcaacagcggcaggtga

SEQ ID NO: 342483 - DNA, 507 bp, Pseudomonas aeruginosa
atgtcgcagctttccctctcttccgatgcctcgctgctggtgcgtgacggccatggccgctatctgccggcgtcggccgaccagattctggaggccgcgcgtcgggtcatcgaccagaagatgcagcgtggtaccgagttcagttcgccggcagtggtcaaggagtatctgcgcaccaaactcgccggcttcgagcatgaggtcttcgcaatcctgttcctcgacacgcgccatcggctgatcgagtacgtcgagatgttccgcggcaccatcgaccaggcatcggtgtatccgcgcgaggtggtcaaggaggcgctgcagcacaatgcggcggcggtgatcttcgcgcacaaccatccgagcgggaatctcgagccgagcgccgccgacaggacgctgacccagcggctcaaggaggcgctggcgctggtcgaggtgcgcacgctggatcatgtcattgtcgctggcgaccggacgacggcatttgccgaactcggttggctgtga

SEQ ID NO: 342484 - DNA, 213 bp, Pseudomonas aeruginosa
atgcgtgtgaaaaagtcgcgcaaagtccacatcaccaagatccgcgtcggcgaaataaccttgatcttttgccaagttcaaggccgccccaccgggcgacggcacgggcagaactttggcgaccggatgaaattgcctgaagagttcatgctcggcttccactccttccatgccgccgatgaaaacagcggcaacgagatcatcgcgcgatag

SEQ ID NO: 342485 - DNA, 1203 bp, Pseudomonas aeruginosa
atggcaaagatcaagctaacaaagtccgccgtcgatgcggcaaagccccaggcgcatgccgttgagctgcgggataccgtggtcccgggcttcctgtgcaagatcaccccggcgggccgcaaggtgttcatgctccagtaccgcacgaacgcgggcgaacgccgcaaacccgccttggggctgtacggtgaactgacggtcgaacaggcccgcgtcatggcgcaggactggctggccgaggtgcgccggggcggcgaccccagcgcggccaaggccgccgcccgcaaggcccagaccatgaaggagtattgccacgccttcatggaggactactccaagcagcgcaacaaggcgaccactcagcgcggctactggggcgtcatcaaccgcaacatcatcccgatcatgggccggatgaaggtacaggacgtgaagcgtccggatgtggccgcgctgatgaagaagctggcctacaagccggccgaggcgaaccgcaccttcggcgtgctgcgcaagatgttcaacttggccgaagtgtggggccttcggccggatggcaccaatccctgccggcacgtcccaatgttcccggccggcgaggcgacccgcctcatcaacgacgaggaaatggtgcgcatcttccgccaccttgagcatctggaggccgagggtctggaaaactacgtcatcccgctggcgatccgcctgcaattcgagttcgccgcccgccgctccgagatcgtctcgctggagtgggattgggtcgatttggagaagcgcagggtcgtctggcccgacagcaagaccggcggcatctccaagcccatgagcgaggaagcctatcggttgttctcgacggcgccccggcgggaaggctgcccctacgtcctgccatcgccgaacgatccgaccaggcacatgacctatggtgagcactacggcggctggaagcgcgtgctcaaggccgccggagtgccgcacgtcggcacgcacggcatccggcaccgctccgcgaccgacattgccaattcgggcgtgcccatcaaggtcggcatggcgctgaccgcgcacaagaccgtggcgatgttcatgcgctacgtccacaccgaggatgacccagtgcgcaaggccgccgaactggtggcgaaccgacgcaagacgattgtcggcgttcgcccgcagcaagaacaggtggccatatga

SEQ ID NO: 342486 - DNA, 264 bp, Pseudomonas aeruginosa
atgctggtcattcgattcaagggctggtcggtgaaactcgaccaccaggtgggtggagcagggaagttcggcatctggtcattccacggctcggagagcagctacgtcccagacatgcagacgattctccggcatgcagcgatccggccggcggagccgaaggaaagcggcgaagtcgaggtattcatctgcgacgcgcgcatgccgcagaatgagtggcgtgccatagggacgggcgttgctgcctatgaggcggagcgctga

SEQ ID NO: 342487 - DNA, 261 bp, Pseudomonas aeruginosa
atgaagtggcttctagtggttttgggcgcgctggcgggatgcgccggccggcaggacgccgagccgcgcacggtgcgcgtagaagtgccggtggcggtgccgtgccgagtgccggcgattgaggttccggtctgggctacagcggggctgaggaagggcgacgacttgcaggccaaggtccgcgcgctgctggcagagcgtcggcagcggatcgggtatgaagcccaactgctggctgccaacagggcctgtcagaattag

SEQ ID NO: 342488 - DNA, 369 bp, Pseudomonas aeruginosa
gtgatctcggcccgtgttgtctcgatcgcgctggcctgcctgctgctggtcggtctcggcgccgctggcggtgtctggatcggcgcgcggcactaccggccgcagttggatgccgcgagcgcggatctggctgcctgccgttccgctcgtgggagcctggaggccgcagtagtggagcagggcgggcaggtcgccgcgctgcgtcaggctggtgaacagcgggcgagggacgcagtccaggcggtggagcaagcgcggaggcgcgccgacggcgactatgtcgctgcacagcgcctactgctggagcgcacggtcggcgagcagtgtgtggccaccgaggtggtcattgatcaagagttggggctataa

SEQ ID NO: 342489 - DNA, 2052 bp, Pseudomonas aeruginosa
atgggcgcagaaaaccagcacctggccggccgcaagggcggcagtagcaagccgaaacagccggtcgaggcacccgacagtctgcgctcggtcgcgatggccaagatcctgctcgccgtgggcgaaggcgagttcgtcggcgttccgagcgagcgcgatatctacctcgacaacaccccactgatggacccgagcggtaacctgaacttccccaacgttaagtgggagtggcgcgcgggggcggtggaccaggactacatcccggggatccctgccgttgagaatgaaaccagcgtcaacgtcgagttgcgcagcgatacgccctgggtgcgctcgctgagcaatacccaactttccgcagtgcgcctgcgcttcgcctggccagcgctccagcagcaggacaccaacggcaacatcggcgggtaccggatcgaatacgccgtagatctggccaccgacggcggcgcctaccaggaggtgctgcgcgaggccgtcgatggcaagaccaccacccgttacgagcgctcccgccggatcgacctgccggcggccaccagtggctggcagttacgcgtgcggcgcttgacgccgaaccagaacaacaaccgtatcgccgacaccatgctgatcgccggctacaccgaggtgatcgacgcgaagctgcgctacccgaacacggccctgctgtacgtcgagttcagcgcagagcagttcagcaacattccggctgtcacagtcgactgccgcgggcggaaggtccaagtgccgagcaattacgatccggagacccgggcctacctcggcatctgggacggcacgatgaaacaggcctggaccgacaacccggtctggcacacctacgacatcgtgaccaacgatcgtttcggtgtgggtaaacgcatcaaggcctggatggtagaccgctgggagatgtaccggatttcccagtattgcgaccaattggtgccggacgggaagggcggccaggagccgcgacacacctgcaacctgaacctgcaaagccgcgccggggcctgggagctgctgcgcgacctcaccgctatctaccgcggcatggcgtactgggcccagggccaactgaagatccaggcggatattccgcgcgccaccgacgtcgatttcgcctacacccgggccaatgtcatcgacggccgcttcagctacggctcggccagtgagcgcactcgctacagccgtgccttggtcagctacgacaattcggcgaacaactacgacaccgacgtggctgtggccaccgataagcgcctgcagcggcgttacggcgacaacccggtcgaggtggcagccattggctgcacccgcgagagtgaggcccagcggcgcggaaaatgggcgatcctgaccaacagccaggatcgcacggtaacgttccgtaccggtatggacggggcgattccgctgccgggatgggtgattccggtggctgacgcgctgttggctggacgggagatcggcgggaggatctctgcggtcgctggccgagtgatcaccttggatcgcgacacccaggtgcaagctggcgaccggctgttcctgaacctgcccagcggtaaggctgaggcgcgatccgtgcagtcggtcgccgggcgcgcggtgaccgtgacgacagcctacagcgagaccccgctaccggaattggtctggaccctagatgccgacgacctggcggtgccgctctaccgtgtgatgaaagtcagccagccggagcggggtgtcttcgagatcaccgctctgcagtacgagcccgggaagttctcagcgatcgacactggtgccaagttggagagccggccgatcagcgttatcccgatcaccaccgtggcgccgccggcgagcgtcacgctgacctcgcactaccagttcgatcaggggttggcggtcagcacgatgaccatcgcctggcctgctgtagaaggggcggtggcatacgacgtcgagtggtcgagtggaagaaggacagcggcaactggatccgcctgccgcgtgccggcaccaccagcgtcgatgtga

SEQ ID NO: 342490 - DNA, 2394 bp, Pseudomonas aeruginosa
atggcatcacgcagcctagggacgcttacgcttgatctcatcgccaaggttggcggcttcgtggccggcatggatgccgccgagcgccggtctgccaagtggcgcgcccaggtcgagaaggacatgaaggcggccggaaaaacgattggaatcgcgctcggggctggggccactgctgcggccactgcccttgtccttgtcgtaaacaagcagcgtgacctgattgaccagcaggcaaaagccgcgcagatgctggatacgacctataccagcctggcaaacctaggccgggccggcgaactcggcggcgtcggcatggagaagatcgaggcggccagtcggcagctgaacctaaatatcggcagagcgattggcggaacaaaagcccaggctgaggcattcgaacgtctaggtttgagcgcccaggatgtttatgaactgccgcttgatcagcgcattgcaaccatcaaccaggcgctgcgagataatgttcaggcatccgagcgggcgtctgttgctgctgatatctacggcgccaagaacgcaaaggcaattcagcagcttgaccccgggacaattgccgaagcggcgcggcaagtcgaactgttcggtctgaacctttcggatgttgacgctgcaaaggccgagatggccaacgatgcgctgtcgactttcgggctgctgggcgatggcattgccaagcagttgactgttgagctggcgccgattctgaaggctgtaggagacctgtttctggagtctgctgaagaggcaggaggcctgggcaatgtagtgcaggactccgtgcagacagctgtcaatgccctggcatttctggcggacgctgcagatggggtgaagcgcgttttcgaactcgctgcggacgcaataatcaccggtttcagcaaggcatcctctatcgttgcgaacaatgctgcctcgattctgaatgtggtcagttaccttcccggagttgactactcggataccgtttccagccttcgccagttcgccactgaggcaaatggcgtcgccagggaagcgatggcgaatattgatcagaccttgagtcgcccgctagcagggcaagcgttcaagcagttttatgcggatgcacagaaggctgcagaagattctgcgcaagccaccattgatgctcgagaggaggtaaagaagaccggcgatgcgtttgtcgaagagtcgtcgaaaagccagaaggcgataaagcaaacagttgacgctatcgactcgcagatccgcgcgctgcaattgcaggcggaaatggttggtatgagcacgcgcgagcaaaccttgttcaagctggcgctcgatggcgcaacgcaatcccagcttgatcaggctgaagcggcactgaatgcagtggatgcattcgacaaggtgaaaaagcagcaagaggactacaagagtcttgttgccgacctgcgcaccgaagaagagcagctcaccgaccagatgcgcgagcgccttgctgttcttgacgcaatgcagggcctgagcgatgaggaaagaaatcgtgtcgcttcgcggatcgtgtctgactcgttctctgctccgccttctttcggtggcgcagacgctgtagtcgctgggcctcaaggtgaactcgacaagatcgacaaggcagaggaagaacttgagaagtggtatcaaacccaactcgatgttctgaatgccaatcgagaggcaaaagctgaattgactgctcaatgggatgagcaggaattgaagctaaagcaagagcacgaagatgccttggccgccattgagcgttcccgtcagcaagtgacgatgagcgccaatgagcagttcttcggaaacctgagcggcttggccaggactttcttcggagagcagtcggggctctacaaggcggcgtttgtcgccgagaaatcctacgcgattgcgaaaacactgctgaatgcgccaaagaccgcatctgacgcctatgcagctatggcgggaatccctgtcattgggcctgcgcttggtattgcggccgctgccgcggcggttacggctcagcttgcccaggtggcagccgtgaagaacgtcaatctctctggtcaggcccatgacggcattatgtccgtccctgaggatgggacctggaacctcaagaagggcgagagggtaacgacggcagagacaagtgcaaagttagaccggacgcttgatgacgtacggcgtaatcaggcaagcgcaggggctccaaccataaacctgatcgaggaccgaagccgcgcggggcaggtcaatactcgtcgccaggatgaccagtacatcatcgatgttgtggtggccgacctattcggcgatggccgtacatctaaggctatcggtagttcgttcggcatacgcaggagcgggacatga

SEQ ID NO: 342491 - DNA, 651 bp, Pseudomonas aeruginosa
atgccggagatcagcaccggccactccaataattcagagcccagcctagcgctgggcttttcatttcagcggctagggtcattcccgaaaagcagactgctccactgcctgccgcacctaccctggagcatttcggagcaagacatgagcgacaaggttgaagaggccgtgaaggccgttatcaatggcgttatcggtggtgatgcggttgctttcgcgcgcggcttgcggaagctgtcggaggcaagcccacgccggttcctcgaggtcggctctaaggttctcaatccgtcacggaatgagtacgttcacttcccggaagttgaccccctgttcgcattcgacgatacgaaggtatacggagcagtgctcactcccgtgccggatgactcatttattttattttcaatgaaggttcatctctctggctcaggccttgacctggacgtggcccaagagatggttcgcaaagagcgggccgaactcgacgcgcgaggcgctgccgtgatcgagaatacgaaggtggcgatcgactcggcactggaagtgctatcgggtcattccaatgttgatcgcaaagcgcttgcatatgcgcgagacgaactcgaacgaggtattgtcatgctgaggggcgcagtcgccgcgaagtaa

SEQ ID NO: 342492 - DNA, 585 bp, Pseudomonas aeruginosa
atgagcaagttcaaggcggggggtatcgataagcgctccacggctttcattgacaccatgcgaaagcgttacttcctagatgaagctagcggccgagtctgctcgtatttttcgaacagagttcttggaggctggattcttgagccaaaggatggccaggctcgttatcgctgccacaaggtctacttcgatggtaagcaactaagcattcgcgagcaccatctggtttgggtgatcacgcacggcgaatggcccgagagcgagattgaccataaggaccgcgacggactcaacaatcgccctgagaaccttagattggtcactcacgcgattaatggcaggaatctcccgctactgcgcaacaacaagtccggaatcgcgggcgttcaatggcgtcctgatttctcgcgctgggtggctcaggtcaaggtcaggactggagaaaaacaaaagagcatttacctcggttcgttcgagacgatcttcgatgcagcctgcgctaggaaatcctacgaagcagctaacggattccggtgcggcgacttccagcccgagcagcagaaggcgaagggggtggaggcatga

SEQ ID NO: 342493 - DNA, 366 bp, Pseudomonas aeruginosa
atgaagcaatccgaattccgggacgagctggtcaagatcatgcccggctatgcatggaccgttaactccagccgctgcagcgaaaccatgctggtggccacaggcatccaaacaagcggcttcaaccgtctctcgacgctacgggtggagcgccgcgacaactacgccagttcggggaagcctcgctatgaggtgaaaagcgcaggatttggcacacgggcgccttggctgcacgccacggcagatcagacgcttgcccgagcgcttcgcagtttgcaggaccactacgagcgcgaagcgagaaaatacctgggccacctaaatgatctgatccgaggtcgtgaactttcgaggatcaagccatga

SEQ ID NO: 342494 - DNA, 381 bp, Pseudomonas aeruginosa
atgacaacccctatcgtgcaatcgatcagtgatgagcaattggcggagttggaagagtactgccacaagagggcattcgtctgttgtggcaatttcaaatccggggccgaatacatgagcgcgcgcgaggaagtctgctgtaacgagccagtgttgacggatgtaaatatcaacactccagcagaggagatacttggcctgatcgctcgcctgcgcgctgctgaggctgatgtagagcgactgaacaagctcgacgctctttgcgaggcctatggatttgaaggcatccacgaaggaaatcgctggttgatcgacggcccataccgcgacatacgcgcagcgattgactgcatcaagccagccatggagcgcacgccatga

SEQ ID NO: 342495 - DNA, 165 bp, Pseudomonas aeruginosa
atggctaagcagttcgtcgtaatgcgcggcggtaattcgccaatcctcatggtgatcccgacgccggtattcatcgccaagacgcgcaagtcggcgaacgccttcattcgcgggaagaaataccctgatgagtactacgttcgaagcgtggaggcagagccatga

SEQ ID NO: 342496 - DNA, 894 bp, Pseudomonas aeruginosa
atgcataccatattcgccatagagccggatgccatcaataactggtacgacctccgctatgccgttgagaaatttggctatagcaaggggttactaattgcgcgctatccggggaaatgggaacgaatggtgatggaggcctgcaagcttaacggtgtcagtgatctcgacttgactcgagttgtggagcgattaagagaaattaagggcgaccgtcttgtgcgtatggggctgccatatggcgatggtggttggctggaaaatgttggcgttgaggatgttttaaataagctgtcagcggtcctggtgcgaaaccaagtcacctcagataagtttcatcgcatcgatgatgcatacgagaatttgtttgaaaatcgccgagacttccgtgttaagcgaaacgcgaatgcgctagcagaggctgctaagtatgtattaaccgcctcggaccaaatcgttctggttgatccgtattttcagtccagatgcaaatgcacaaaagtgcttgactcaatgctccgtgtttgtcaagaaaatgattccctgataaaacaggttattgtattcacaaactacaataccgatccgcgcgacctgactgtggttagtcaacagtatgaaaccttgcttggagtttggggtgagcgcaatgtcagaattactgtatgccgtgtggaaggcaatcagcttaatcatgattttcatgcgcgctacctatttaatcaaaaggcaggtcttcggtttgaccggggctttgttgaacccgaagctcataatgagcgagaacatgagactgacgtcatctgtatggatacagagctcgtcaataggttgtatgcgcggtttatagaggcgcgtgctacgatcaatgtcgtagatgaagttttgttgtag

SEQ ID NO: 342497 - DNA, 1722 bp, Pseudomonas aeruginosa
atgcgcattacggaaatatccctgaccaactttcgctcctttcaggccacccagtctatcgcgctggctcctgtgaccctccttttcggaccgaacagcgtaggcaaaagctcggtactgatggcgctgttctacatccagcagattctggagaaggggcaatgcgacccccaactcattgatgcgctgggcgaaaagcacgttggcggtttcaagagacttgttaacggccgggatattagcaagcggatggtcataaagttgagtctcgataagtccggctcaattggtgccagttacaaccaggtagtggatctggtggatgacgattttgcgctgcccgtcgacagttccacggccgatgccaatcggctggccgtggaatttcatatcgcttggtcaaaagccgaggatacggcctatgtggcctgttacaaggtgtggctggatgacagcctgattgccgagcttgctagcgatgctggcctaaaacagcccgtaattacctggctcaactatcgtcatccggctttgttagcggaggcggatcaggataactatgaggactctgcctttgtcagtcgcttccatgagttgctcaatggcaaacgcaagacggaaacagtttccagaatagactcagggcgaagcactgaggtttcctttgagcatgccgtcatcggcttcgcggggctcgctggagccttgccggtaccaggtaagcggcttgagacggtcatcaatacggatgatccaatactgactgtgcgtttgaacgaaatcctctcagatgtggtggtcgcccccctcgacaacttgttggcgctgcttaacgagagtctgtgcatcggaccgttgcgccttatcccggacgccttgcatcagcctgatccctaccctcaacagaagggctggtattccggtgccgccgcctgggatgtcaccggacgattgaccgcggccaacatggcacagctcaatcaatggttgaacaccccagaaaccttgaatctcggctattccctgcgctcgaagagcgtgatgagccaagccgcctacacgggaggcggcgataccttaagcgagatacaggcattgtttgaggcctttggggattcgctgagtgtgagccactctgaggcagatgcagatggcaatccgctgcccgaagaggattcggtatcgctggatgcactgaggaaactgcctgaagcaggtaaaaatacggttgatgccaaagctcggcagctggtgacgaaggagttccacaataagtgggtgctgtgggacgacctaaacaatatcgaggtggccttttccgaagtgggcgtcgggatttctcaactcttcccgctggtggtcgcagcggtacaagacaggcaaggcatcatcgcttgcgagcagccggagctgcatgtccatccgagaattcaggtcggcatcggcgatttgctgacgcaggccaacaagaaaaccaccttcctgatcgaaacccacagcgagcacctcatcctgcggatcttgcgccgaatccgtgaaacgtctgaaggtgagttaccggagggactgcagcccgtttctccagccgatgtttcaattgtctatatggaaccaggagaagccggcgtcagaacccggcatatagaaattgatagctctggcgagttcactacccgctggcctcatggcttcttcgctgagcgtggcgaggagttgttctga

SEQ ID NO: 342498 - DNA, 1095 bp, Pseudomonas aeruginosa
gtgagctttttccaaaaccactcagggtggcctttggttccgctcaagaatattgcgactctaaagcgtggatacgacctgccggttggggcgagaaatgaaggtgcagtgcctatttatgccgccaatggaaagaatggcgctcacgatgaagtaaaaattaaaggtcctggcgtaataactggaaggtcaggaacgattggaaaggttcactattgcgaagagggtttttggccgctgaacaccgctttgtatgtgatggattttcatggcaaccatccgcgatgggtctattacatgctttcagccttcaagctagagcggttttctgagggggccggtgtgccaactctcaatagaaacctggttcatgatgagctgatccctcttccccccctgtcagaacaaaaacgcatcgccgccatcctcgacaaggtcgacgccatccgccgcaaacgccagcaagcaatccagctcgccgacgacttcctccgcgccgtttttctggacatgttcggcgacccggtgagcaacccgaaggggtgggaggtcaagcctctgggtagtttggtcgtcaacaaggatggaaaaaggatacctataaaagcttcagatcgtgctgatatggcaggagagtatccttattacggcgcgagtggcgtaattgactatgtgaatgattttatctttgaggggcggcaccttcttatcggtgaagatggtgcaaatcttctagcaaggtcaacacctattgcgtttattgctgatggccggtactgggttaataatcatgcgcatgtcttgggtgagaagaatgggctctcgttagactaccttgcattttcgataaatatgcgggggctcgagtcttttgtgagtggtagtgctcagccaaagctgaatcaagagaatttgaataagattccaattcaagtaccgcctctgattttggttgataagttttcagccattctgaatgagtgccaggaatatatgggcaaaatgattatctcagagccagaatttctgtttggttcgctcagccaaaaagccttttcaggacagttagttgcaaggaaatctccatgcgtctag

SEQ ID NO: 342499 - DNA, 1224 bp, Pseudomonas aeruginosa
atgtacagcaatgagcatgcgacccgactggactccttgacctaccaggccggtcagatcaatcgggacatccagaagtggcaaactgaactcaactggttttccggttttgattgcgagcgggccagcagcagtcttgctcaggtcaggagagacctgcttgagtccaggcaacggctcgatgagatcgattcggcgatcgagtcgaaccaaaagcgccaggatgagtgccaggctagtagctcgaccagttggctgtcccggttatggccctccagtgaggaagctgtggcgcggcgcctggttgtcgaacttgagatgcgtctgaagagtctccagcaacacaggagtgccgcccaggagaaactggccagcgacgaaccaaatgaacgcaagttggcggctgacctcggccgctaccgcagctttgacccgctggaggctgaggcgaccattacccgtttgggtgaggagcttgctggtctgcagagaatgatggaccacgtccgcattgccagtgatcggtgggagagcatggtgggcaatgtgtggcgtgaatggcggaaagcacagcttcaactgaaccagatcaatgaggacatcgcgaaagccgaaagcttcgatcaggccctctcgactgccttcgacggaaaggaacgagccaaaattcacggatggtgtgaaagctatttcgaggatggtagccccaaagctgtgaagagcagacttgccaggaagcgacgcgaactgacacacgaagtcgacaagaaggaagggcgcttacgcgacgtcatccgcttgcttgaaaagcagatcgagacgctcatcatcgacggcaacaacctttgctatgcgccctcagaaaacggtaaaggaaagttcatcggtcttgaggccttggcagctctcgtaccgcatctgtgccagacgtataaggtgacgctattttttgacccgggcatccgccagcgtctgtcaatgactgacgccagcctaaaggcggtgttcccgggagccaccgtgatggtgatgcgcagcaaggccacggccgacgaaggcatcctcgccgctgccgaattcgaccagaccgcttacatcgtcagcaatgaccgattcgctgactatccggagcagcctgctgtgaaagagcgtcggatactgccccacctcattcaccctcactcggtgcagatcccgcaattgcaggtcaacgtcccgtactga

SEQ ID NO: 342500 - DNA, 144 bp, Pseudomonas aeruginosa
atgaaccctacgatctccccgttggagttcctgctgaccaacgttatctgtttcgccgctggtgccgtcgtggttgtcgcgctgcaggtggcgggcaaagcagcctatggcgccgggaagcgcagcgaacgtgctgaggtgtga

SEQ ID NO: 342501 - DNA, 258 bp, Pseudomonas aeruginosa
atgccgagcaaaaagctcctctccgaacaggagattcggaaccttgaagacgagattcctgctgtcgctgcagatgcgactcgcacggcatatctgcgagcgctcgcagccggacataccgtcatgaagctacagggcacttacctcgttgaatcgaaagccgacggctccgagattatcgtcggcaacgccaagcctcgccgcaaggtgagcgtcggccatgccatccaggttcgtcggataagtgccagcgcctag

SEQ ID NO: 342502 - DNA, 483 bp, Pseudomonas aeruginosa
atgcccgaggacccgttcgcgcagggtccggaacagcccgcgcccgcgcgcttccgcgcgcaggtaggcatcgcgcaggcgaaccacgtcggggtgctgctccaggctgacgaagcccagtacccgcgtgtctccctggcgacggagcacgaaccagcggtggtagggaccgtcgctcagcgggtagccgccgcattcgcggcgcacccgggcgctggcgaagaagcggcccatgcaggcgaagaaggcggcctcgtcgtcgagcgaacgccattgcaggatctcgcagtcctgcgggcggatcacgagggcttctcccggccggggaccagtctgtcgatatcggtctgggcgaagccgaaggacagcgagcgggccatgtcctgcttcagcagggacagcgcgatacgccgccaggacggttgcttgcgacggttctccagggccgggatccccgcgtccggccagatggcaaggggatag

SEQ ID NO: 342503 - DNA, 1083 bp, Pseudomonas aeruginosa
gtggcgcgggagttggggcgcggtccggtggacgtgctgttcatcgacctggaggggcagtaccaggccaccatcgatcacgtcagcgagatgctcgggcgtcccgacgtacgcccctggtgggtctgcctgccgctcaacctgcgcaacgcctccagcctggaggagccctactggtgctgctgggagcccggcgccgaggccgactgggtacgcccgctgccgaagcacccaggggtgatcagcgacccggggttctttcccttctaccgctaccgcatggaattcgaggagttcgtcgccggcttcaacgcctggctggccagggaagagcctaccgcgttcctggtcggcatccgttcggacgaatcgctcaaccgctacctggcggtcaagcgcaggagccgggcgaaacagtgcgcctggacgccgccgggcggctccgcgccgctggcctggagcgcacgcgatcgggccaacccgcaggcggtgagcttcttcccgatctacgactggcgtttcgaggacctctggcgctgcgtcgccgaccacggctacgcctacaaccgcctctacgaccagatgtaccgcgccggcgtgccgttctcgcagatgcgcatctgccagccctacggcgacgaccagcgcaagggcctcgacctgttccaccggatcgagccgcgcacctggttccgcgtggtccgacgcgtcgccggcgccaactacggggcacgctattgtcgccagcgcttcctcggctaccgcggcggccttggcctgccgccctccttcggcacctggcgcgagtacagccagttcctcctgcgcagcatgccgccgcccctgcgcggcatctaccagcggcgcatcgagcgtttcatcctctggtggaagcagcacgactatccccttgccatctggccggacgcggggatcccggccctggagaaccgtcgcaagcaaccgtcctggcggcgtatcgcgctgtccctgctgaagcaggacatggcccgctcgctgtccttcggcttcgcccagaccgatatcgacagactggtccccggccgggagaagccctcgtga

SEQ ID NO: 342504 - DNA, 756 bp, Pseudomonas aeruginosa
gtgggacgcaaaagaacgcctggcctggaatggcttgaccctgagaatgtgagccaacacctgtgggctcgggaatacctattagccagaggctacgaggagcatttccattacagagataaggttctgccagatacccctccctcacaccaggaaatgctccagataggcggaaaaatcgagcaggaagacggcgcgcatgagcttttccaaggaatgaaggctgcttggcgtcaggagagaaacaggcacaagaaaaaagagaccggccatctggcgtgcctgtttatcctcaagggcggcactaaagacaaccttaaggaaatggccaaagagctagatacagacgcaacggcgctgctggaaaaactgatcgcaaaggcctacaaggcccaccagcgtaaaaaagacaaaacgtcgagcaagcaggtaaagcaaaccctgcaaggtgatcgcagtcacggtcttgaggacattaaagaaatcctgagcggggacacacctcagcccaatacttctatcacgcagggcactcccttaacggagcgctcgactgactcaggcagcccatcggagcaaccagtcaccatggaggcaaacgacatagcggaatatgacccggctcgtgacctcgcacagattcgtagcgccatgaaaaaaaggaaaagatacaccgtccctgatatgaggcaggtgcagccccctcccttcgatcaagtcgaggccctcggcacagcctccgagcctatggcttaa

SEQ ID NO: 342505 - DNA, 1287 bp, Pseudomonas aeruginosa
atgttgcggcacaagatgaagggagctgggcctgaggaaaggcttgtattggccttgtacttgagacgttttgatggcgtaggagccgttcgattgagggtggctgacctagcagcctgtctcggcgtttctcctggggtgatcatgcgttcgatgtccaagctgtcggcgaatgacgcatgtctctctgtgaagacggtgccagttagtagggggcgtccgtcgcggagctatgaggtttcgcccttgttccgggcacgcttgagcgaagtcaccaaggtcagtttgccgccggtgtgcatgcaggtggtcgagcatctgctttctgtcccgaagaggggggctgaactgggaagtgggggctctacgggtaagtcggttggctaccggcagccccccgttaggaaagaaagcgatcagctgaccatcgctaatcggtggttgcttgcagtcttagtcagtcatgcgagcgagcttggtgtcgttcaggggcttgggctgtctgctcttcggcaactgaccggaatgagcgagctcaggctgaaggctcagctgcagcgactcgtcgagttgggggtcatccgaagctatgtccgagggatttcaagtgcgctatttacggagaccaaggtcagtacgacctactttctcaatctgaaccattcatgccttgggcagaggggtgatggttgcgcggtcgtggtgattcaggaaaaaggtgaaggtcgtcggttggctgtgaatatgactgctctgcctgtcgtagagcagtattttcggcagctcaaggatgaagcctttgatgtgtttctctggcggctggacggctacgcatcgtttcttctatccactcgctggagggagcttgggcgtctggggagcgcagagctgacccaagccctgcaggatatgatttctgctgactttaggcggcctgttggtaggtctgcagatgcgctagacatagatgagcgcaactggtcgaggattattgagcatttctgttggctggcgcttgagcgggctaaagacatcagaaagctgctagaacgcatgcctgcgggcgatctcgatggtgtgcgcattcagctcatcccagcaccctgcaaagggagtggcactcaggtaacgatggttacgacgcttttgatggagcgctctcctgtgccgcggtacggttgcttggttatcaaataccatccttggaaagtttgcaggctgtatagggacgaggctgagttgtcagttccagctcgttgccgttttggtcttcaggcgcggccctag

SEQ ID NO: 342506 - DNA, 1326 bp, Pseudomonas aeruginosa
atgagttctgagtggcgcctgatgacgctcaaagaggcgggcgtgtctctaattgattgtgatcatcggacaccggctgcccttgacgaaggctacccatacatcgccattccgcagcttaagaatgggcatatcactctagatggtgtccgaaggatatcccgagaggattacatcgagtggacaaaaaagctcaagccccaagctaacgatgtcattgttgtacgtcgctgcaattctggccaaagtgcccatattcccgcaggtctggactgcgcaataggtcagaacttggtggtgctcagagcgaatggtgagtacgtattgccagagtttctacgttggctagtgcaagggcctgagtggtggggccaagtctctaagttcatcaacgtgggtgcagtgttcgatagcttgcgctgccgagatattcctagctttgagatggttatacctccacgggtagaccaagcagaaatagctagtctccttggtgctctcgacgaccgcatcaccctgctacgcgaaaccaacgccaccctggaagccattgcccaggcgctgttcaagtcctggttcgtcgatttcgaccccgtgcgcgccaaggccgaaggccgccagccggaaggcatggacgctaccaccgccgctctgttccccgacagcttcgaagagtccgaactgggcttggtgccgaaggggtggtcggtaatgcccatcggtgaggctgttgagtgtgtcggcggtggtacgccagatacgaaaaacgaagcttactggcaaccagaagagttttcgtggtcatcgccgaaagacctttcaggcttgcaatcaccggtactgctatcgaccgagcgcaaattatccgctcagggtttggcaaaggtgagttccggcttgcttccgtgcggaacactactgatgtcttctagggccccaatcggctatctggctatcgcgaaaaccccgctggcagtgaatcaggggtatatcgccatgttgccagggggcaggttgccaccgctgtacttgctgttctggtgcagggagaaaatggaagtcatcaaagggcgagccaacggttcaaccttcatggagatcagcaaaaaagcctttcggccaattcctgctttggtgccatccgctgcggtgttggaggcattcgcagatattgctgatccactgtttgagcgtttggccaaaaatgaacgccaggcccaaactctcacccaactccgcgacaccctcctaccccgcttgatctctggccagctgcgcctgccggaagcgcaggctctgctgaacgatagggatattgcccaatga

SEQ ID NO: 342507 - DNA, 2577 bp, Pseudomonas aeruginosa
atgaacgagcccattgccgagcgcgaagcgctgtggtcgcagtttctcgaacgctggccgctggaaagcctgcatcagatgacccttgagcagtacaaccttgccggctcggacgaccacttttgccgctggctggagaaacatactgagtctttgggctcgatttggggtgggtcatccttcaagttcggcgtgttttcccggctggacaagaaggaaaagagcaatccccatcgtgtgttcaccgacgagcacgcctggctgaagaagtacggcagcagcgcagagcaggccttttccgcagtgcgccagcacatcgttactgtggctgaggcggcacatgcgggtgatctggagacaatcgagcaggtcgatctcgggccggtggtgaaatggaagatcgccttcctttatcaaaaccggcaagaccctagcatcctctgtgttttcgcagcccgtgacctgtgcgcggcggtgggccgtaaggccagccacaatgagcagctggcgcctttgcagcgtcagttgatggcccagcggcaggggcagaatctttttgcctactccgaccaagtgtgggcgcaggcgcaagaatggcatcgcaagcacagcctgaccgagcaggcgctggattttttcagtgccgaccctgagcgattcacggagatcaatctcaccaagaaaatggctggctttcgcctgagcaatgaccgcgaactggccttgctgcgcgaaaacggcaagctgagcctgttcgttgcgcctggtaactggcagcaggccattgcggggctggactgcgaaccctactcaccccaagacacacgccacagcggtcttgcttcctgtgcgccggcactggctgtgggcaacccggctctgtcgatcaagctcgccgatatggcggcgctggaagctttctgtttggcctatgagactgactccatggatgaggtaactgcagtgcaatcgctaactccaggtggtgagcggcaggtagcactgctcaatcagatcctctacggcccgccgggcaccggcaagacctacgaaacaatcgacgcggcgctggaagtcctcgcgccgcaactcctttcgctgccgcgtgagcagcgcaagcggcatttcgatgagttcgttgcccagaagcgcattcgcttcgtcaccttccaccagagcttcagctacgaggatttcgtcgaggggctgagggctttgcctccgaacagcgagggtaaccctggtggagcgctggcttacgatgtggccaagggggtgtttgtccagctgtgtttggatgccagcggcgacccggtgctggagcagaaactggggctgaagaaagacccgaccatctggaagatttccatcgaggaggccagcagtgacgggcgaacccggcgctactgcttccagcacggcgaagctcgtatcggctggcacaaggtgggcgatattcgccaggccgatctggccgatcctgcgctcaagcttggcagcaatgacaaaagttctctggccagcttcgggagtgagatcgaagaaggcgatgtgctggtctgcctgggtacccgcaagagtatctgtgcggtgggggtggttaccggcgagtatgagtacaaccctgaggtgccggagggggtacgcaaggactatgtgcatcgtctgccggtcaactggctgctgaccgatattgatctcgacatcaccgaactcaatggcggtcgtggcctgacgctgaaaaccgtgtaccccatgagccgcatcagttggcctgaattgcagcagggattacagcaggccggcctcagtctggtgggagaggcccagcggcccgtggctgggcctaaattgccgcatgtactgatcatcgacgagatcaaccggggcaacatttcgcgtattttcggtgagctaatcacgctgatcgaaccgtccaagcgcgccggtgcctcagaggcgcttgaagccgttctgccctactcgaagcggcatttcagtgtgccggacaacgtctacctgatcggcaccatgaacaccgccgaccgctcgctggcggggctggatattgccctgcgtcggcgcttcgtgttccgcgagatgccgcctcggcctcagctgctggatgacatcgaggttgctggggtgaatatcggccaactactgcgggtgatgaaccagcgcatcgaggtgttgctggatcgcgatcactgcctggggcatgcctactttatgccgttgaaagaagaagggcttaaagagggcggcttgctggcgcgcctggaggtgatcttccgcaatcaaattctgccgctgctgcaggagtacttcttcgaggactggcagcgtattcagtgggtgttcaacgaccaccgcaagccggcgctcgaccgcttcgtggaacaggacaaacaggatgtggcggctctgttcggcaacatcagcgtgcccgcgctgggtggggtatggcgaatcaatgacgaggcgttcaagagggtttctgcgtatgcgggtgtaatcgcggtgaatgccaaggccggggtgccagaagaagaaccagagggggcggatgtgtga

SEQ ID NO: 342508 - DNA, 1323 bp, Pseudomonas aeruginosa
gtgagcgcattcgtcacggtgcgtgaatacgctcgcctaacaacgacggcggttgcgcccggcaatctcgactgtgtgcaaatttccgaaagcgcgttcgactggctttgtgagctaagcgccagtttcaaccgtaacggcgccacgctgttacaagttgaggggcgacgtgcgctgaagtgggattcctatgtgggcgtggtggaaacgccctgcggcacgcggctggagattctgcccaagcaccatgagcagggtgattgcgtggcgcagagccggcggttgctgcgcaagctgattgagcgcgctctgcagctcaagccgcgtgaggcttcggtggctagcctggagctgttcgacacgccgctcagtgagtgggtgatggggcagtttctggcggagctggatcttctggtgaaacgtggtgtgcgcttcgactatcagcgtgtcgaggaagagcagcgctttctgcgcggccagctcaacgtggtggcgcagatgcgccagccaccggggcggcagcatcacttccagattcgtcacgatgtgttcataccggaccgtgccgagaatcgcttgctcaagctggcgctggagcaggtggcgaggagtacgcaggacgccgtcaactggcgcttggccaatgagctacgcgccatgctggccgaggtgccggctagccgccaggtgaaccaggatttgcgcgcctggagccgcgaccggctgatggtgcattaccaggcgatcaagccttggtgcgaactgatcctcaaccagcagatgccgatagccgtgagtggcgagtggcgggggatgagtctgctgtttccgatggaaaagctgtttgagaaatacgttgaggcttggttgcggcaaaatctacgagtaggcgcgaaactgacgccacaagccagccggcaacacctgtgcggacatgacagtgggccgatgttctgcctgaaaccggattttctgatcgatatgcccggtcagcgctggattcttgatgcaaagtggaagcgcatcgatgccggtaaacctgagaagaactacgacctgagtcagagcgatttctatcagttgtttgcctatgggcataaataccaaagaggcgacgaggtgccgaggctggtgctgatttatccgtattggtctggtcttcagaaagcgctgccggtgttcgattacggcaagggcatgaacttatgggtgttgcccttcgagctggatagcgaccatttgctggacgctgagtccgctgggattcctttgcggcaggaaagtgggttcgttgcggagcgcagtgagttagtggcggtttga

SEQ ID NO: 342509 - DNA, 1071 bp, Pseudomonas aeruginosa
atgaagcgaatggtcttaatatctgcacttgtaataacccaaggctgcaactcatcagatgatactgcaccctacattgacgccgactcaacattcagctgcaaagatgtaaatcttagccaattccacaacgatataggcaaagcgctgaggatgattgacaccgaaacattacaactaaaatctgcatacaaagaagatacatcgatacagacattctttagagaagctgcgaccaaaaataccgcgtactatctactcctcaggcaaaaaaccatcgaagcatgtgccgccaaccctggactaagcttgagtcacgccctaacagatggactcaatgctttatacaaagaaagccttaaagacatgcgcctagcgacatgtcgctcgtttgacgaggaatttgacaacgcacaaattctgcaggagatgcagcatccgagcaaacagccaccattgggcgacacaattgctctcggcgtaattcctgtcctagaagacaagcgttatggcgttgcttattttgagaaaagagttaaaaatcattgcaaggaaaagcctagcgaacgtatctgggacgcctattcgttagtcgctgaaagcgccatgaaagttattagtagcgaacgactcgccgcacaaaatcttgaagaagcgaaagaggcggcagaaaaagcgcgcgcaaaagatgaactcaataaagacaacctcagaaagtatggccacaacctctatcaatcaggcgaacctgattgcaaaggccttcgcgagcaatatgaactcagcatctatggagaagaaaatttagatatatttccccaagcgttctacgatacagttcattcaattccaaggcttagcaagccataccagcaagaagcattcgaggaacaacttgagtctagatacaaaaatacggctcgcttacttgcatataactgctcaaccactattgaagatgccatattgtcaataccggaagtcatggactccgtgagccccataataagcgagctgaaaagtctcgcactgggaccaagggggggggcaagctgccgaacttgcccttaa

SEQ ID NO: 342510 - DNA, 567 bp, Pseudomonas aeruginosa
atgcaggaaatatccccgactacagacaagtggttctatgaagagaagggccaacgactcggaggcatcgacgagtcggcgatgatcgccctgatccagtccggcaagctgagacatggcagcagtgtctggaagcagggcttcgcggactgggtcaaactggaagacacgcctctgcgccgccacctcgaccaactctccccgccaccgctgacgggacagcaggtcagcaatacgctggtgtgggtgctggccttcgcaccgattctgggtctgttcctggaaagcttcgttgccatgctggtgtatgacaatgaaaaccgcgcgatgaatgccgtctccgatggcaagttcttctacatcaccgtagccctgaacatcctgctctccgtgctggacgagaaacgtctgcagaaagctgggcacgacaccggcgcattcaaaggctgggtgtggctcgttccggtttacctctaccagcgtgccaagcaactgaaacagaaccttgcttacttcgccgtctggattgcctgctccgtgctggtactgctgggggtagcggcctga

SEQ ID NO: 342511 - DNA, 354 bp, Pseudomonas aeruginosa
atgtacgtcatcaccggactgaacgaagcgcagatcgacagcctcgtgcgaaacagagcgtccttcgagatcaatggtctcaggggcaatttcatggccggcatcaagctggtcgaaaccaagattgaaagccaggggctgaagtgccgagtcagaagcgacgtgaaaagctctgtagtacaaggcggcgcacttggagttgcattcagcgtcctgtcaacgccggcaacgttgaccgcggtaacgctcgggatggtcgcaagcgtggggcacggcctggttacctacaaccctgactacgaaatcctgaaggactacgtaaatcagcgactcaaggttatctacaaaaagtag

SEQ ID NO: 342512 - DNA, 1074 bp, Pseudomonas aeruginosa
atgcctgacactgggctgccggcccaagccaagacacgccggtggtccggtggtattacccgctttttctcccacttccccggtgaagctccggcgggatacgccggggaggaaagccctctgcacgctgcaatgaagctgactatttatcagcggctggttgccgccggctttcctgtcgaactcgaatcgggtcgtgatgactggagggctgatgtcctggtcggggaatcggccttcggaccagagctcgcaattgaggtccagcttacaaggcaatcagcccagagaacctatgaacgcacacaccagcgaacatcctcgggcatgccaacgctctggatcttcggtaccggtgccagcaccggccaccttggtatagatctgcttgcccgcaatcccgtgttcgagacaagcatcccagatcgagcagcggatatcgcacatgcagtctgcacaggcacggcctacttcgatgacctcagcgcactcgccaaggttccggccaggccaatcgcggtaaaggttgactgcaaatgtggcgttccgtggctgcgccccataggcgtcattctgctgccgaaccggatacggggcgatctgatccctcaatttgtctcatgctgcgcaacctccgccaggaacaagggtaagtcgctagggtacgagcattgcgatcgccaccttcgccgctacctgggtgtcctttccaaaactgcagagatatatggactaccgcttggcgaggaacgtgtatccgaaaagatgcgggcaaagtacggacctatctacttcaaggactacgcttgcccaacctgccgaatgcgggcctgcacgtatggctcacatggggtaggcctccccttcaaggggaatgacctttatcgctgcccactccccatcatgggctatgtggacgcacgaccaatactcgaccttgcgcctgcatggttcgaatcgcagccctcgccggtcgaggaatcggtgatgagtgccaccgcctggaagactaaattcattgaccgcttgcaaggcatgctgctgctcgttgccccgccagagggacactactga

SEQ ID NO: 342513 - DNA, 942 bp, Pseudomonas aeruginosa
atggcagctaaaaatttcgggctgggctcaagagaaccaagtaaagcagggaagttttcgctggttgataaaaacctatcattcagctccacagcaactattacgcatcgctggaataagttcatccctttcatggaagaaaagggtatacgcgacatgcaggaaataaataagtcaacagtcatagagtacggtaaagagcttgcctcacaagttctagaagatgaaatgtcagcatcatatgcgcaaaatctcgttagcgccgtcaacacagtgatgtttatgtcaaaaatgggcgactgggtatcagtaagcccaacccaagactgcggaataccagagcgaacatatgtaagaacaacaccgccagggggcgtttgtcgcgaagacttctatagcgtgcttgataagttaaaagataatcaaacaccggaggccatagcggtagcaatgcttgccagggagtttggcctgcgaacgaaagaagcatctctgattgatgctaaaaaagctctcgccgaagcaaaaagaattgagcaaataaatataacgcgcggcaccaagggaggacgaaagcggaagatcccaatcacctctgaaagtcagctccaagcactgacttatgcaagtaacgctcagggagaaaaaaactgcctgatagcagctgaaattacatgggcaaaatttcgtagcactcaagtccgtaaaattcgtgaagtgcttcaagagtacggcatcagtcgtctccatgaactgagaagcgcttatgcctgtgaacgatacgagcagctatgtggacatcccgcgcctgtgtttggagtaaccaatgaagggcctctgggccatatggcacgcatcaaaatagcttgcgaacttgggcatgggcgtatcgacgtaactaactcatatctgggaggacgaaatgctaagtcgagagcttaa

SEQ ID NO: 342514 - DNA, 2040 bp, Pseudomonas aeruginosa
atggacatcgaactcaataaagacctcgatcatctgctgaacgagcactttgccgggcgtgtggtacgcaaggatctgaccaagctcatcaaggaaggggcaaacgttcccgtctatgtgcttgagtacctgctaggcatgtactgcgcctccgacgacgccgaagtcatcgagcagggcctgaagaacgtcaaaacagtactggctgaaaactatgtccgaccggacgaagctgagaaggttaaatccctggtacgcgagcgcggtacctacaaggtcattgaccgcgttaccgtgcgcctgaacgaaaggaaagaccgctacgaggcatctttcagcaacctgggcattaaggatgcggaaatctccgctggcatcgtcaaagagtacgaaaaacttctggtcgggggcatctgggttatcgcgaccctgagttattaccacgaggagggtcagtcaggatcgcccttcggtgtaactctgctcaaacccattcagatgcccaacatgaacatgcaggagctgttcaccggtcgctcggcgctgaccaccctgcagtggcgcgagactctgatccgttcaatcggcatggaaccttcgaccctggacgagtcagttcagtggcacctccttgcgcgcatggttccctttgtcgagaacaactacaacgtctgcgagctggggccacgaggtaccggcaagagtcatatctacaaggaatgctcccccaacagcatgctggtatctggtggccagaccacagtagccaacctgttctacaacatgagcagccggcgtattggcctggttggcctgtgggatgtcgtcgcgttcgacgaagtcgccgggatcaacttcaaggacaaagacggcgtgcagatcatgaaggactacatggcctccggatccttcggtcgcggtcgagagcagatggaagcctcggcctctatggtttttgtcggcaacatcaaccagagcgttgaatcgctggtgaagaccagccacctgctggctcctttcccagagcaaatgatcgattcagccttcttcgaccgtttccacgcctatatccctggctgggaaatcccgaagatgcgcccggagttcttcaccaacaaatacggcctgatcgtcgactacctggccgagtttttccgcgagatgcgcaagcgcagctttgccgatgccatcgacaagcacttcaagctgggcaacaacctcaaccagcgtgatgtaatcgcggtgcgcaagaccgtgtccggtctgctcaagctgctctacccgcacgatcaattcaccaaagaagacgtgcgccagtgcttggaatacgccctacaggttcgccgccgggtgaaagaacagctgaagaagatcggcggcatggagttctatgatgtgcacttcagctacatcgataacgagaccctggaggaatgcttcatcgccgtgaaagaacaaggcggtggcgggctgattgccgaagggccgggtaagccaggtttcattcacaccatcggcctgagcggtaaaggtatgccggggctttaccgcatcgaactgcaggtcaccaagggcagcgggaagctggccacctcaggcctttggaactccaccatggccaaggagcaggtgaagatcgccttcgacttcttcaaggccaacgcctcgcgaatcagcgcctcgaccaaggtgctggaacacgacttccacctgcatgtggtcgagttgcaaaacaccggcccgctaacccatatggcacttcccagcctggttgctttcgcctctggtcttctgggtcgtcctacacagtcacagatggtggtgcttggcgatatgagcctgggtggcaacatcacgcccgtggaaagcatcgcagaatgcctgcaggtggcgtttgatgcaggtggtaaacgtgtttgcttaccgatgagcagcgccattgatataccgacgattcctgccgaattattcaccaagtttcagacgagcttctatagcgagccagtggatgcggtctttaaggcgctgggggtggactaa

SEQ ID NO: 342515 - DNA, 2628 bp, Pseudomonas aeruginosa
atggactcaaagcagctgacccaaggcctgcaccaggctttttttgctgaaaaccatcgaatcgtcttctggtatgaccccgagcaaaactttgccgatgcactgaacgagctcgacttgcctgatgtgcaggtgctgaacatgcagggcaagtcgacctttggcactaagttgcagctggaacttgaagatacccagggtaaatacctgctgtatttcccctgtgccgagcctgacgcggaagatgactggctgcttgatatcaagctgttctcacgaagcttttatgcagaccgggtgtcgatgatttttaacgagttgggtttgcagcaggtgagcctgcgcgagcatctatctcgtagagagagcttcctcaaaaataccgcgcgggtttctgcgctcaagcgccttatccaatcgaatgcgactgccgaagagttggaccaggcaatgattgcggtgcttctggggtctgcggcgtgcgatatcaccaccttgctttgcacattggcggatcagatcgttcgggatgatctcggtcttgagagcaacccaggcgttatcgacgagttgtatcagcatgaactgatgccagcgttgctgcaggctctgcgtgacgaagtgggttacccggccagtgctgaagaaatgagtggcgagaagccattcagctttgggcattttctgattcgccttttggcaaccggcttctgtgaaagcatttctgagatccctgactgggcttctgcaatcgcaatcccgtcagccagcgcccgtgctacatctcgagctctgctatcgcgctggcgagacagctctcggttttacaaaagctatgacgttgtttcgtcctgggtgggagaggcattgcgcatctccgacaagcttggcgagctgtcgctggaaacactggccaatatcgccaccttcgaagcggtggagcggcagatcattatcgatctgaaccaagccatccctagcgccgctccaagcgacctgcaggtattctcacgcatcatcggcgagcgcctcgacaactactgggcatcgcgccacaaggacgacgagatccgtcgcaagtatcgactgctctatagcgccctggccgcagccatcgagctgttcggcctacgcctgcagtttggtgccggcttccactattcaggcacggaggcgctgtacaaggcctacgagggcgagctgtaccgcttcgacagcgcctatcgacgctatgtggctgcgtcgcagcgtgctcatgtggaactgctgaagaagctcgatgaagaagttgagcagtgctatgcctactggtacctcgaccaactgggccgcaactggggcgactgcgtagaagccgaacagcgcctgacacattggaagatcgccggtgtgcccaaccagcagaacttcttcgaacgctgggtacagccgcagttcgagaaacaccgtagcaagcgtgtggccgtgatcatcagtgatgctttccgctacgaggccgcagtcgagctgcgcgagcgcatcaatgaaaaacgctacagcgaggcaaccctgtccagccaattgggcgttctacccagctatacgaccctgggcatggcctccctcctcccacaccagacgcttgaataccgagagagtgccgccgatacagtttttgtcgatggccagtccaccgccggcaccatacagcgagacaagatcctcgctcagtaccaaggtatcgccgtaacagctgatgaggtaaaggcctggtcgcgcgacgaaggtcgtgaaaggctcaaagataaacaactggtttacgtctaccacaatgtgatcgacgaccgcagtgacagcggtggtccgtcagagtcagacactttccagcatgtggaagtggccatcgaagagctgaccgagctgacccgcaagattctcatgcacttcaacaccagcaccgtcatagtcacagctgaccacggcttcctcttccagcaaagcaagttggaggcggctgaccgcactgcgctggtcgacaagccaggtagcgccttcaagagtaaaaagcgttatgtccttggccatacgctgccagatgccaaggaggtctggcagggctcgactcggcagactgccggcactgaatcggatacgcgcttctggattccgaagggcgctaatcgcttccacttcgtcggtggcgcacgcttcgtgcacggaggggccatgcctcaggaaatcgtcgtgccggtgctgaccgtcaatcagctgcgcggtgagaaagccgagaaacgcacccgccgcaaggtcggcgtgatttcgcccaagtccgttctgaagatggttaacagcattcagcgcttcgacctgatgcagactgaagcggtcagtgagcaggtactcccggtaacggtagcggttgctattttcgaaggcggacagattatttccagtgaagaagtggtcactttcgactgcaccactgattcgatgagcgaccggctgaaacaggtacggctatcgctggctggcagtgactttgatcgcaagaaagattatttcctggtcatccgagacaaggatctgaataccgagttggagcgctaccgggtcacgatagacttggccttcactgatgatttcttttaa

SEQ ID NO: 342516 - DNA, 1239 bp, Pseudomonas aeruginosa
atgcacggcaccatgatgaaaaagctgctttgcgccggggccattgccctcgccgccctcgccccgctggcccaggcggaggagaaaaagaccttcaacctggcctggaccatttacgtcggctggatgccctggaagtacgccgacgagtcgggaatcatgaagaaatgggccgacaagtacgggatcgaggtgaacatcagccagatcaacgactacgtcgagtccatcaaccagtacagcgccggccagttcgacggcgtggtcgccaccagcatggatgcgctgtcgattccggcggccggcggcgtcgacaccaccgcgctgatcgtcggcagctactccaacggcaacgacggcctggtgatgaagggcaccgacgatctcaaacagatcaagggccagcaggtgcacctggtggaactgtcggtgtcgcactacatcctggccaaggcgctggacagcgtaggcctgtcggagaaggacgtgcaggtggtcaacacctcggacgccgacatcgtcgcagccttcagcacggccgatgtacgcaacgtggcgacctggagtccgctgctgcaggaagtcgccgccacaccggatgcacatcaggtcttcgactcggccagcgtgccgggccacgtcaaggacctgctgatcgtcaacagcgagacgctggccgacaaccccgccttcggcaaagccgtggttggcgcctggtatgaggtgatggcaatcatggccagcgacacgccgcaaggcgccgagttgcgcgcccagctgggcgcagcttccggcaccgaccaggccggctacgaggcgcaactcaagggcacccacatgttctatcagccagccgaagcggtcgccttcatctccggcgaaccggcccacgaagcgatggacagcgtgcgcaagttctccttcgaccacggcctgctgggcgacggtgccgactcggcggacttcgtcggtatcgccatgtcggccggcgcgctcggtgatcagggcaatctcaagctgcgcttcgacaccacctacatgcagatggccgccgcgcatttcgaggagcctcatgcgccgtaccaaagaagacgccgaacagacccgcctcaagatcatcgccgcggcgctggagctgttcagccgcaacggctattcgaacaccaccctggcgatgatcgccgaggccgccggcttcagccgtggcccgatctactggcacttcaagagcaaggatga

SEQ ID NO: 342517 - DNA, 1365 bp, Pseudomonas aeruginosa
atgaccagctttcccctctcctccgtcgaggagttgaaacagcagttgcaggacaagggtgtgaagtacgcgatggccagctacgtcgacatccacggcgtgatcaagggcaagttcgtcccaatcgcccatctcggccagatgctccgcggctccgagctctacaccggtgcggcgctggacggcgtcccgcaggagatcagcgacaacgaggtggccgcgatgccagacccggcgaccgccacccagtgcagctggaaccgcgatctcgcctggttcgccagcgacctctacctggacggcaagcccttcgacgcctgctcgcgcggcatcctcaagcgccagaccgaagccgctgcagcgctgggctacaccttcaacctgggcatcgagaccgagttcttcctgttcaaggacaccccggatggcggcttcgcgcccatttccgagcgcgacgacatggccaagccctgctacgacccgcgcctgctgatggacaacctgcccatcgtcgacgaactggtacaggcgatgaacgagatgggctggggcgtctactccttcgaccacgaggacgccaacggccagttcgaaaccgatttcaagtacaccgacgccctcggcatggccgaccgcttcgtgttcttccgcatgatggccaacgagatcgcccgcaagcacggcgccttcgccaccttcatgcccaagccctcggccaaccgcaccggcagcggcgcgcactacaacatgtcgctagccgacatcgagaccggcaagaatctgttcgaagtggatggcgaagacccctacggctgcggcgtgaccccgctggcctatcacttcatcgctggggtactgaaacatgccaaggccatctgcgcggtcatcgcgcctacggtcaacagctacaagcggctgatccgcaagggcgccatgtccggctcgacctgggcgccggtgttctgctgctacggcaacaacaaccgcaccaacatgctgcgcattccatcccagggcgcgcgggtcgaatgccgcgccgccgacatcggctgcaacccctacctcggtgccgcgatgatcctcgccgccggcctggagggcatccgcgacaagctcgatcccggccagccgcaccgcgagaacatgtatcactacagcgaacgggaggtcgcgcagatgggtatcgagaccctgccgcgcaccctcagcgaagccatcgacgccttcgaggccgacccgctgtcgcgccaggtgttcggcgatgccatgtaccaggcctttgtcgagttcaagcgcgacgaatggaatgcctaccacacccatgtttccgactgggaaatccagcgctatctgaagttcttctga

SEQ ID NO: 342518 - DNA, 1023 bp, Pseudomonas aeruginosa
atgattgaaataaaaagggaaaagaaattttttgcgctgggcgaaatgcgcctcgaaaacggcgaacgcctgcgcaatgcgcggctctgctatcaggtagtgggcacgccgaaccgcgcgcgggacaacctcgtgctgattccgagctactacggcggcacacattggggcagcctgcccctgcttggtgcggatggcccgctggcaggtggcgattactgcgtagtgctgaccaacctgttcggtgcaggctggtcgacttcgccgagcaacgctgcgcccggtcagggcgcagcggacttcccgcgggtcggcctgctggacaacgtgagggcgcagaaggcgttgctcgatcggttgtatggcgacgactggcagctcgccctggtcagcggctggtccatgggcggcatgcagacgctgttctgggcaatggcctatccggaacggatgcgtgccatcctgccgttctgctgtacggcacgctgctggccacataaccgggtgtttctcgaaggggtgaaggcggcgctgtgcgccgacgccgcctggctgggagggcgctacagcatgccgccggaacgcgggctgcgggctttcggccgtgcctatgccggctgggcctattcgcaggcgttctatcgtcatgagctgtggcgcgagatgggtttcgagagcctcgaggcgctgctcgactactgggaacaggatcatctggagcaggacgccaacgacctgctctgcgtgctgcatacctggcaatcggccgacccggcccgcagtttcgctgcgggctcgctggccgaagcgctgggtcgcatccgtgcgcggtccatcctgatgcccggcagcagcgatctgtatttcaccgtcgaggatgcccgccacgaggccgcgctgattccgggtgccgagctgcgggtgctcgaatcggactggggccattgtgccggtgggccgggccgcagcgcggcggccatgcgccaggtgttcgcggcaatggccgaactgcttggccgctag

SEQ ID NO: 342519 - DNA, 840 bp, Pseudomonas aeruginosa
atgtccgatgccaagattcgtgtccgtcaggtcggcaagacctttgttagcgagcgccgcgaggtgcaggcgctgcagtcgatcgacctggatatccagcccaacgagttcgtcactttcgtcggtgcctcgggctgcggcaagtccacgctgctgcgcatcatcgccgggctggaaacgctgagccgcggcgagatcctgctcgacggcaagcccatcgatggtcctggcgtcgaccgcgccatggtcttccagcattacagcctctacccctggctgacggtgatgcagaacatcaagttctgccgccagctcaaggtgatcggcgataccgtgcgccacgatggagacgtggagtccgccgccggccgcgccgatgccctgctcaacctgatgggtctgacgcgcttcgccgatgcctaccccagccagctctccggcggcatgcagcaacgcgttgccattgcccgcgccctgctgcccaaacccgcgacactgctgatggacgagccgttcggcgcgctggatgcgcaaacccgcgaagtcatgcacgacctgatccgtcacgtgcaccggctggagaagagcaccatcctgttcgtcacccacgatgtcgaagaagccatctatctgggcagccgcatcgtgctgatggcgccacgccccgggcgcatcgattccatctacgaggtgccgctgccggcccagcgccaccaggacatgaagctcgcgccggaattcaccgagctcaagcgcgagatcctcgcccggatccgcgaaacctccggcatgcagaccgacctcgagcaactggccaaactcagcgccgtggccggctga

SEQ ID NO: 342520 - DNA, 879 bp, Pseudomonas aeruginosa
atgacagcgcagatcagcatcccctccgctgccactaccgcgcagcagcgacatacggcaacaccggccacaccggccaaacaggtggtgcgcaagagcagtttctggcgcattcgcggcgagatatcccggcgcagcgcctggctgctgaccggcgccgggctgagcctgcccttcgtcatctggtggctgtggacggcgctcggcctcgccgacccaatgttcatgcccagccccggcgcggtgctcgaacgcatcggccgctggtggacaagcgaagggctgctgggggacatcggcatcagcgtctggcgggtcatggcgggcttcggcgcctcggcgctgatcgccctgccgctggggctgtacatcggcacctaccggccggtgcaggcctttctcgaaccgctcaccgacttcatccgctacatgcccgcagtggcgttcattccgctggtgatgctctgggtcggcatcgacgaaggctccaaggtgctgatcatcttcatcggcacctttttccagatggtgctgatggtcgccgaggatgtgcgccgcgtgcccatggcgcagatcgaggcggcgcagaccatgggggccaaccgcagcgagatcgtcaagctggtgatcctgccgtcggccaaaccggcgctgctcgacaccctgcgcatcacctgcggctgggcctggacctacctggtggtggccgaactggtcgcggccaactccggcctcggctacgccatcctcaaggcgcagcgctacatgcacaccgacaagatcttcgccggcatcctgctgatcggcctaatcggcctactcaccgatcaggccttccgctggttgcaccgccgcgcctttccctggatgaggaaatga

SEQ ID NO: 342521 - DNA, 810 bp, Pseudomonas aeruginosa
atgaagagcgttcccgatgcctatcttggcgtgtggcgccggcgcctgctgaccaccacggccggcttgcgtgacgaaaccagcgaggtgtactggctgcaaaccgccagcctgcacgccgacctgcgcctgccgcggccgcaagcgctgccgccagccgcctcgctagaaacctgcagccatgcccagcagctggccctgagcgagcaggctggcttcgccggcgtcaccgaggtcaacggcgatatctgccagtggcatcggctgatcgacttccagccgccgggcggacctgcggatatcggcctgatgcacttcgagaccccggagcggctgctggaggacgggctcgacggcagctaccacgaaatctggcagcgcctaccggagtcgcaggggcgcagctggggcatctggctgcgcgcagcggagcagccagcccgccaggcctgtctgctggtagcgggcgactacttcctgttcgctgccgagcggccgattctgctgccggccagcacaggatatctgcgtgaccaactggccgccgtcagccccgcgctgcggccacagttgctggcgtgcgagctgtccttcggccgccaccgcaatggcgcaacaccctggcaaatcacccactcgacgctccccggccgcgtcggcgacgccctgttgtcgagctactggaacttcgccgaccccgccagcctgcccgccgcagaccttgccgccctcggtcgctatccggcggccggcggctggcaacgcgtcgaactggatgtgcccaccgtttcacaggaggttcccgcatga

SEQ ID NO: 342522 - DNA, 783 bp, Pseudomonas aeruginosa
atgaccgatgtactgaagctctggccactgctgaccgccacgcatcgctatgacaagtcgatttccacccgcaatcgcggccagggcacgctgatcgacgcgccgatcctcgccttccttatcgaaacccgacagggtcgcgtgctgttcgacgtcggctgcgactacgccaagctcagcgatccgcagctgcgtgcgcgctggttcgatccggtggagtttcccatggggccgcccgagatgagcgaggagcagcgactacccgctcacctcgcccgacacgggctttcacccgctgatattgatctcgtgttcctcagtcatctgcatttcgatcacgccggtggcctgtgcgaactgtgcggctgcgacgtgcatgtgcacgaagcggaactcgccgccgcccgcgcccaggcggacgatgcctatttcgccgatgactttgccggcgaacatcgctggacgccgcagcgcgacgagtacgagctgctgcccggactgcgcgcgatcaatacccctgggcacaccgccggccacatgtcgctgcttatcgaattgccgcacggcaagccggtgattctcgccggggacgctgcggacctgagcgagaacctggtcgacgaagtcgcgcccggcctctgctggcaggaccgcgaagacctggcgttggccagcatccgcaagctcaaggccaccgctgccgaaaccgacgccgcaatctggccgaatcacgacatggccttctggcgcaccctcaaacgctttccggagtaccacgcatga

SEQ ID NO: 342523 - DNA, 660 bp, Pseudomonas aeruginosa
gtgagcctgacgacgcatccgctgctcctcgagcacacggcgctgctggtgatcgacatgcagcgcgacttctgcgcgctgggtggatacgccgaccaggccggcatggacgtcagccgcctgcgcgcaccgatcgcggcgatccaggcgctgctggattgcgcgcgcggcgtgggcatgctggtggtgcacacccgtgaaggccatcgaccggatctttccgacctgcccgagcccaaacgccgccgcgcccaggccaccggcgctgccatcggcagccctggccccctcggccgcctgctggtgcgcggcgaattcggccatgacctgatcgacgagctgcaaccgcgcgccggcgagccggtgatcgacaagccgggctacagcgctttcgcccataccgatctcgaactgatcctgcgccgccgcggcatcgagcggctgatcctgaccggcgtgactaccgaggtctgcgtgtcttcgacgctacgccaggccatcgaccttggcttcgactgcctgaccgtcagcgatgcctgcgcctcgtccgccccgcaactgcatgcagctgcgctggcgatgatcgaggtcgaaggtgggctgttcggcagcgtgaccgacagcgccagcctgctccggcgtctggagcgtgccgcatga

SEQ ID NO: 342524 - DNA, 762 bp, Pseudomonas aeruginosa
atgaccgtgcacatggatcaactgagctgggtcgattacgaacgccgcgtgcgcgaaggcgccgtggtctttttgccctgcggcgccaccgagcaacatggcccgcacctgccgctgggcaccgacgcgctactggccagtgccatcagcgcggacgtggcggcacgagtcggcggactggtggcaccggcgctgtcatacggctacaagtcgcaaccgaaatgcggcggcggccagcacttctgcggcaccaccagcctggatggcgcgaccttgagcgccctggtgcgcgacgcggtgcgtgagttccatcgccacggtgtgcgccgcctggtgctggtgctcggccattacgagaaccagtggttcgtcgccgagggcatccagctggcgctgcgcgaactcgggccggacgccgggctggaggtaatgcgcctggagcattgggatttctgccacgagcagaccctgaccgacatcttcccggaaggcttccccggtttcgcgctggagcatgccgcggtgatcgagacctcgctgatgctgcatttccatccgcaactggtcgcgctggagaagattcccgacgacgccccggccgactttccgccctacgacatgtaccccacccgtaccgaatgggtgccgccctccggggtgctgtcctcggccagaggctccagcgcggcgaaaggccagcggctggcccacgacatcgtcgaaggcatcgccgccgcggtgtgcaaggagtttgcgctgtga

SEQ ID NO: 342525 - DNA, 885 bp, Pseudomonas aeruginosa
atgaacagcctgatgccacagggcatgctgatcggcggcgccatcatgtgggggctgggctggctgccgctgcagttcttcgcggcccgcggcctggccggcatgccgctggtgctgctgacctattcactgctcagcctgctggcgttgctggtgctctggcagcagcgccgccagtgggggagccagtatcgccaggtgctcaccatgggcctgtgcggtggctgggccaccgccgccctggttaccgccctggccgagggcaacgtggtacgggtgatgctgctgttctacctggcgccagtctgggcgatggtcggcggctggctgctgctgggcgaacgcctcagcggcacgcggctgttcgccctggggctggcgatgctcggcatcggcctgaccctcggcgtcacgagcgaagcgctggacgcgcccggcgcgaacgactggctggcgctttccgccggcctcgccttcagcctcaacaacctcgccactcgcgccgccgaccgggtgccactggcgagcaaggcgctggtcagtttcatcggcagcgcgctgctcggagggctgttctgcctgctgctgcgccagccacttccgcccctggatctgaccctgagctggcagatcgccctgctcgccctcggctggctggtcagcatggccgccgtgcagtacggcctgactcatctggaagccggccgcgccgcggtgctggtggtgttcgagctgatcgccgcggtgctgtcgtccgcctggttcggcagccacgccatcggcccgaacgaatggctcggcgccgccctgatcaccaccgccgcgctgatcgccggctggccggaacgtcccctttcaatcgcgacaaggagcacctgcgcatga

SEQ ID NO: 342526 - DNA, 756 bp, Pseudomonas aeruginosa
atggctgccatctttaccgggctgaccgctctggtcaccggcgcagcgaccggcatcggccgtgccaccgcactcgcgctggccgccgaaggcgcgcgggtctggatcaatcatcgggatcaacacgacctggcggaacgagtggtcgagcagatcatcgccagcggcggctgcgcctgggccatcgaggccgatgtcagcgatccggttgcggtggcggcgatgttcgagaccatcgaggcacagggaccgctggatctgctggtcaataacgccggggtgatcctggaaaagccctttctcgaaaccagcgaggcggactgggcaagggtactgggcgtcgacctcgccggcgtctaccgctgctgccgccatgcactggcacagatgcagccgcggcgcagcggcgccatcgtcaatgtcgcctcggacctcggatttctcggccgcgaacagtacgtcgcctactgcacggccaaggccggggtgatcggcctgacccgctcactggcccgcgagttcgctgcagacggcatccgcatcaatggcgtcgcacccggccccatcgccacggcgatggtcagcccggagcacatgagcgacgagtggatggccaaggagctggcgatccccatggcgcgcctgggcacgccggaggaagtcgcggcggccatcgtcttcctgctttcgccgcaggcgagctatttcaccggacagctgctcgggcccaacggcggctcctggatgggcgcatga

SEQ ID NO: 342527 - DNA, 789 bp, Pseudomonas aeruginosa
atgcacaaggcactggattaccgaggccgttgcgtggtcatcactggcgccgccgggggcatcggccggggcctggcgcagagcttcgccgctgccggcgccaccctggagctgctggaccgtgacgccgacgccctcgcccggctcgccgacgaactcgctggcgagacgctgctgcactgcaccgcactggacctgggtgatcggcaggcggtgcagcagtacgccgatgacctcgcctgccgcggcctcaacgccgatgtgctgatcaacaacgccggcgtcgagtacgccacgccgctgggcgagtgcagcttcgaggccgatcagcgctggtcggccctgctggagaacaacgtcggttccatgcagcgcctgacccgcgcattgctgccacgcctgcgcgccggcgccagcgtgatcaaccaggcctccatctggggactgaaaggcgtgccgggcttttccgcctatgtcgccagcaagcacgcggtggtcggcctgacccgctcgctggcctgggagctgggcccgcgacgcattcgggtgaacgcggtgtgccccggctggatcggcaccgatgcggccatgcgctcgctgaaggtgatggcggacgccaacggccgcagcgacagcgccgagctcgcggcgatactcgccaaccaggccattccggagctgctgacaccggccgatctaagcggcaccttcctgttcctcggctcaccgctggccgccgccctgaccggccaggcgctgtcggtcagccacggcgaggtgatgcactga

SEQ ID NO: 342528 - DNA, 1023 bp, Pseudomonas aeruginosa
atgactgccaaacctctgtaccgttacgccgatggccgcctgcccaacacgctggcgatcctctataccgcgctcgcctacggcggcggcctggctctgctgttcgccggtaacggctggctgaacgcgctgggcacgctgctgctggcccacggcatgatcatcgccgcctacctgatccacgaattcgcccacggcgccatcttcagcgtgcccaagcacaacgaatgggccggcaatgtctgcagctggctgtgcggcagctgctacgccgagttccaggacctgcgcaagaagcacatgcgccaccacgtcgaccgcgccgacgtgatcaccttcgacagcaaggccttcctcaaggcacgcccgctgtggttccagaagctggtgctggcgctggaatgggcctatgtgccggcggtggagctgatcatgcatttctatgtgatcgcccttcccttcatcaccgacaacgacaagcaccgcgcccggcgcggcaaggtcgccgcggtgctggccattcgcacactgctctttgccgggctcgcggtgctctcgctgaaggccttgctgctctacgccgtggcctggatgatcatgctcagcgtgctgcgtttcgccgatgcctatcagcacacctacgaggccttcgccgtgctggaggacggtggcaagctgccggaggacaagcgccgcgaccgcagctacgagcagcagaacacctacagcaacgtggtttccgagcgctggccggcgctgaacctgctgctgctcaacttttccttccacaacgcccaccacgagaagccggtggcgccctggtatcgcctgcccaagctgcacgccgagctgtacggcagcacctacaaccaggtcatcccgatgcgcaagctgctcggcagcttccaccgctaccgcgtacgtcgcgtgctggacgatgactacggggtggtcagcgaagggccgaacaaggccgacaacttctacggcgccgtgggcgtctcgttcctgacggcggtgtga

SEQ ID NO: 342529 - DNA, 1002 bp, Pseudomonas aeruginosa
atgtccacactgcgctcgctgaacaagaccctcctcgccgccggcctggccgtcgcgacgttgttttcaccgctggccagccaggccgccgagaagctgaagatcggcaccgtggtctgggccggctatggccccttctacgtcgccgacaagctcgacctgttcaagccccacggcctggacgtggacctgcagttcttcaacgacccggcgctgatccccaccgccatggtgagccgcgcgctggacggtggcatgctcacctacgatcaggtagtggcctcggtcgccaagggcttgaagcaccgcgtggtgatgcccatcgacttctccaacggcggtgacgccatcgttgccgacgcgtcgatccagtccatcgccgacttcaagggcaagaaggtcggcttcaacccgctgtcgccctccgacttcctgctggcctacgcgctgcagcagaacggcatgagcgacaaggacatcaacgccgtcaacatgactccggaaggcatccccggcgccatggcctcgggcaacctgccggtcggcgtgacctacgagcccaacgtctcgcagatcctctccatgggcggcggcgacaaattcaaggtggtctattcgtccaaggacgcaccggggctgatcaccgatgtgctggtcttcgacgaggcggtgatcgccaagaagcctgccgccatcaaggcgatgatccagggctatctcgacggcctggcctacatgcaggcgcaccctgaggagtcggcgaagatcatcggcgacgtgctcggcgtcagcgccgaggaagccgtcgagcagatggccggcgcctacaacatcccccttgcggagatgggcaagagcttcaccccaggcgacgacacccattccttccatggcagcggcgcgatcatcgccaagctgctcaaggacaacgggcagatcccgaccatcccggatttcagccagacctacgacgcccagttcaccgaagcgctcgcccagtaa

SEQ ID NO: 342530 - DNA, 972 bp, Pseudomonas aeruginosa
atgcgtatcaccctgccacgcatcggtctcggcggcgcaccgctgggcaacatgttccatccgctcagcgaagaaaccgccgacgccaccctcaatgccgcctgggacgccggctttcgctattacgacgtgtcgccgcactacggcgcgggcctcgccgagcagcgcttcgggcgcctgctgagtggcaagccgcgtgacgagtacgtcctgagcaccaaggtcgggcgcctgctgcagccggccagccagccggaaaacgccaagcccttcgtcgacgagctgcccaacaagcgtgtgccggattattcggccgacggcgcacgccgctccatcgaggacagcctggagcgcatgggcgtcgatcgcctcgatgtggtgttcatccacgacgtttccgaagaccaatggggcccgcaatggcgcgagtacttccagcaggccatgaacggcgcggcgaaggcgctgacccagctgcgcgatgaaggcgtgattcgcggctggggcctgggggtcaacctggtggagccatgccgcctggctctggagcagagcgacccgaacgtgttcctgctggccggccgctactcgctgctggagcacgacgaggcgctggacaccctgttcccgacctgccaggcacgcgacgttggcgtcgtcgttggcgggccgttcaactccggcgtcctggccggtggcgatcactatgagtacgaccagatcccaccacaggtcgcccagcgcagggagcagctcaaggccgctgccgagcactgcggcgtcgatctgcgggccgccgccctgcatttctgcctggccaacccggtggtcgcctcggtcatcccgggcacggccaatcccgagcgtccccggcagtacatggaagacttcaacgcccaggtgccccgggagttctggcagaccctcaagcaagacggcctgctgcgcgaggatgcgccggtgccgatctga

SEQ ID NO: 342531 - DNA, 1803 bp, Pseudomonas aeruginosa
atgaccacgacttttgacctgcgcctcgccaccctgagcgccgcctacactgccggggacaccaccccgcgccagctgatcattgccctgcgcgacaaggctgcgggactcaaccctgagttcaacgcattcatccacctgatgacggccgcggagctcgagccgtatctggccgccctcgacggcaagacgcccgccgagctgccgctctacggcattcccttcgccatcaaggacaatatcgatctcgccggtgtacccacctccgccgcctgtccggcgttcgcctacacgcccgaaaccagcgcgacgatcgtcgagcagctgatcgccctgggcgcggtgccgctgggcaagaccaacctcgaccagttcgccaccggcctcaacggcacccgctcgccctatggcgaatgccgcaactcggtgcacccggactacccctccggcggctccagcgctggctcctcgctagccgttgcgctcgggctctgttccttcgcgctgggcaccgataccgccggttccggccgggtgccggcggcgctgaacaacctggtgggcctgaaagcgagcaaagggctgatctccaccgccggcgttgtcccggcctgccgtacgctggactgcgtgaccttcttcacggccacagcggccgaagccagtcagctgctggcgctcaccaccaggctcgatccgcgcgacgagtacagccgcagcaacccgctgtggaatgacggctcggccttcggccagatcaagaccttccgcttcggcataccccagcacctggaatttctcggctgcgcggaaagcgcggcgttgttcgccgccaccatcgaacagctgaaagccctcggcggcgagccggtggaagtggacttcgcccccttcctcgaagctgcacgcctgctctacgaaggcccctgggtggccgaacgctacagcgtggcgggcgcgctgatcgagcagcagcccgacgccgtgctgccggtaataaaagccgttctggagaaagcccccggtacaaccgccgtgcagctgttccaggcgcaataccgcctgcagcaactcaaggccgtctgcgaccgcaccatggccgaggtcgattgtgtgctgacgcccgcctacccgcgcccagtgacgctcgccgaacttcacgccgagccggtcaagcgcaattcggacctgggctactacaccaacttcatgaacatgctcgactacgccgctgtcgcggtgccggccgccaccatgcacaacggcctgccctggggcgtgacgctgttcggccgggtgttcaccgaccagtacctgctgagcctggccgatgcgctgcagcatcagacagggctgaagttgatcggcggtaacgcgctcattaccccgccgccccggaatccggcccgcaacgaccgcgcccgcctggtggtctgcggagcgcacctggacggcctgccgctgaactggcaactcaggcagcgtggcggacggctgctggaaaccacccgcagctcgccggactacaagctctacgccctggccggcgggccaccgctgcgcccgggcatggttcgcgtcgccgaaggcggagcggccgtcgaggttgaagtctgggagctgccgaaccaggagctcggctcctttctcaccggcattccggcaccgctcggcctgggcaaggtgcagctcgccgacggccgctgggaaacaggcttcatctgcgagccctacggcctggacggcgcccaggacatcaccgaacttggcggctggcgcacctatctgaagcgtcgcagctga

SEQ ID NO: 342532 - DNA, 3600 bp, Pseudomonas aeruginosa
atgttcgacaaactgctgatcgccaaccgcggcgccattgcctgccgcatcctgcgtacgctgcgcaacctgaatgtgaacggcgtggccgtctactccgaggccgacgccgccagcctgcatctgcagcaggccgacgaggcccacagcctgggcgaaggcccggccacgcagacctatctggacgtggagaagattctccgcatcgcccgtgaaaccggcgcgaaagccatccaccccggctacggattcctctccgagaacgcggcgtttgccgaagcctgcgaggccgccgggatcgccttcgtcggcccgacgccggaacagctgcgggtgtttggcctcaagcacaccgcccgcgccttggccaaacaacgcggcgtaccgatgctggagggcaccgagctgctcgacagcctcgccgatgccatcggcgcagccgagcaggtcggctacccggtgatgctgaaaagcaccgccggtggtggtggtatcggcatgcgcgtgtgccgctcggcggcggagctcactgatgccttcgacgcggtcaagcgtctggggcagaacaacttcagcgattcgggcgtgttcatcgagaaatacatcgagcgcgcccgccacctggaggtgcaggtgttcggcgacggcgccggcgaagtcatcgccttgggcgtgcgcgactgctcggtgcagcggcgcaaccagaaggtgctggaggaaaccccggcgccgaacctgccgaccggcatggccgaggccctgtgcgaggcggcaatcaccctggccaaggcggtcagctatcgcagcgccggcaccgtggagttcgtctacgacgccgaagccgagcgtttctacttcctcgaggtaaacacccgcctgcaggtcgagcacggcgtcaccgagcaggtctggggcgtggacctggtgcgctggatgatcgagctggccgccggcgacctgccgccgttggccgagctggtgaaggatctcaagccgagcggccactcgatccaggcgcgcgtctacgccgaagacccgggccgggatttccagccgagcccgggcctgttgaccgccgtggccttcccggccgccgacggcaagagcctgcgcatcgacacctgggtcgaggccggctgcgagatcccgccgtatttcgacccgatgatcgccaaggtcatcagctgggcgccgagccgtgaacaggcccgcgtcgcgctggacgccgccctcggcgacaccctgctctacggcgtggagaccaaccgcgactacctgcgccagatcctcggctttgcacccttcgcgctcggcacgccctggacccgctgcctggaaggtctgcgctattcggccaacaccttcgaggtcatcagcgccggcacccagaccaccgtgcaggacttccccggtcgcctcggctactgggcggtgggcgtgccgccgtccggcccgatggacagccgcgcgctgcgcctgggcaacgccctgctcggcaaccccgaggacgccgccgggctggaaatcaccatgagcgggccgatcctgcgcttcaacaccgacgcggtggtggcgctgaccggtgccgagatcccggtgaagctcgacgatgcgccgcaaccgatgaacaccgcgctgttcgtcccggccggcagcaccctggccatcggcacgatcgccggcgccggtgcccgctcctacctggccgtgcgcggcggggtgcaggtgccggagtatctgggcagcaagagcaccttcaccctcggccagttcggcggccacggtggccgtgccctgcgcgccggcgacgtgctgcacctggcaccgctgagcgactcgtctgccggtgccacgctcgccgccgagctgtgcagcgccctgccggcggtgcgcgagctgcgggtgatctacggtccgcacggcgcgccggaatacttcaccgagggctacatcgcgcgtttcttcgccaccgactgggaagtgcacttcaactccagccgcaccggggtgcgcctgatcggcccgaaacccgagtgggtgcgcgagagcggcggcgaggccggcctgcatccgtcgaacatccacgacaacccctacgccatcggcgcggtggatttcaccggcgacatgccggtgatcctcggcccggacggcccgagcctgggcggcttcgtctgcccggtgaccgtcatcgaggccgatctgtggcagctcggccagctcaaggccggcgacaaggtgcgcttcgtgccggtggacgtgctgaccgcacgccagctggccaaggccgccgatgccgagtgcgccagcctcgcgccggcggcagtggtcgccacgccggtggcgctgcagtcgcccatcgtgctcgatatcggtgaagcggacagccgcttggtcgcccgcctctccggcgacacccacctgttgctggaaatcggcgcgccggagctggacctggtgctgcgcttccgtggccatgcactgatgcaggccctcgaagccaagcggctcgatggggtgatcgacctgacccccggcatccgctccctgcaggtgcactaccagcccgagaccctggcgctggaggatctcttggagatcgtcgccggcctgtgggatgccgtgtgcgccgcgcaggatctgaaggtgccctcgcgcatcgtccacctgccgctgtcctgggacgacccggcctgccagttggccatcgagaagtacatgaccacggtgcgcaaggacgcgccctggtgcccgagcaacctggagttcatccgccgcatcaacgacctgcccaacctcgacgcggtgtaccgcacggtgttcgacgccagctacttggtgatgggcctcggcgacgtgtatctcggtgcgccggtggccactccgctggacccgcgccaccgcctggtcaccaccaagtacaacccggcgcgcacctggaccgcggagaactcggtgggcatcggcggcgcctacatgtgcatctacggcatggaaggcccgggcggctaccagttcgtcggccgcaccctgcagatgtggaaccgctaccgcgcggtcgaggcgttcggcggccagccgtggctgttgcgcttcttcgaccagatccgcttctacccggtctcggccgaggagctgtcgagaatccgccgcgattttccgctcggccgctacccgctgaagatcgagaacaccgagctgcgcctgtccgactaccaggactttcttgccgccgaggccgacagcatcgacgccttccgccgccagcagcgcggcgccttcgacgccgagcgccagcgctggatcgaatcgggccaggcgcacttcgagagcgaggaagtcgccgccgacctcggcgaggacgccccgctcggcgccggccagcacggcatcgaaagccacattgccggcaacctctggcaggtgtcggtggccgagggcgcgcgggtcgaagccggcgacgtgctggtgatcctcgagagcatgaagatggaaattccgctcaccgcgccggtcgccggcgtggtcaaggaagtccgcgcccagcccggctcgccggtgcgcgccggccagcgggtggtggtgatcgaggaggcgtga

SEQ ID NO: 342533 - DNA, 636 bp, Pseudomonas aeruginosa
atgagccttaccgaaagcagcctgcaccccgaaaccgccgcgttccgccatgtgatcccggccggcgaaccgtacctgttcgaagtaaaggccggacagaccctgcgcctgctcgatctcgaaggcaaccaggcggtggacacgctgttcttcagcgcgaaaaacccgcgcgagcgctacgacccgcagcgcaccctgcgccggcagaaccgcgtctacctcaccaccggcacggtgctctattcgaacctcggcaatccgcttctgaccatcaccgccgacacctgcggccgccatgacaccctcggcggggcctgcgcccaggagagcaacgtggtgcgctacgcgctggacaagcgctacatgcacagctgccgtgacaacttcctgcgcgcgagcctcaacgacggtcgcctgaccaaacgcgacattggcgccaacatcaacttcttcatgaacgtgccggtgacccccgaaggcggcctgaccttcgccgacggcatctccgcgccaggcaagtatgtggagctcaaggccgagcaggacgtgatcgtgctgatctccaactgcccgcagctgaacaacccctgcaacggctggaacccgacgccggccgaggtgctggtgtggaactga

SEQ ID NO: 342534 - DNA, 729 bp, Pseudomonas aeruginosa
atgagtgcttcactcgcgatccgccccacgctgtacgaggaaaacgttcccggcggcggccacacctccttcatcctcaagcgcggtcaactgctgcgtctgaccgatctcgaaggcggcgccaacgtcagcctgatgctgctcaacgcccaggagaagagcgagcggctgaacctgccggataccctcaagggccagcacaccgccaagctcaccgcggggcattgcctgtactcggacatggggcgcgtactcgccgccatcacggccgacacctgcggctggcacgacagcttcggcggtgtgctgaacgccgatgaagtcgccgagaagtacggccagggccgctatcaggaactgcgcaacggcttcttccgcaatggcaccgacaacctgctggtggaaatgggcaagtggaacctgaacctgcaggacctgctcatggtgctcaatctgttcagtcgcgtggacgtcaccgccgacggtgccttcgccttccaccagggccactccaaagccggcgattacatagaactgtacgcaccgatggacaccctggtgatcctcaccgccctgcagcatccgctggaccccaatccgctgtacgcacccaaaccggtgcagctgagctggcacaaggtcgagagcgatggcatcagcgtgctctgccgcacctcgcgcccggaaaacggccgtgcctttcacaacaccgaacgtctgtacatctga

SEQ ID NO: 342535 - DNA, 888 bp, Pseudomonas aeruginosa
atgagcgacagaaagagcgcagccgttgcgggcggatccgtcgcccacctggagcacgacgcacctataagccgcagcgcaggcgatgccagaccgttcatccaggtcaggaatgtctggcagcagtatggcgaccaggtggtgctggagcgcctgaacctgaagattgccgaaggtgagttctgcaccctggtcggtgcctccggttgcggcaagtcgaccttcctgcggctgctgctcggccaggaagcgcccagccgtggcgagatcctgctggatggccagccattggcagacgaaccggacgcaagtcgcggcgtggtttttcagcgctactcggtatttccgcacctgacggtgctggacaacgtcgccctcggcctggaactgccgcgcgccccgctgctgggtcgtctgctcggacgccgcaagcgcgatgcccgtgagcaggctgcgcagatgctgcacaaggtcggcctcggccatgcgctggacaagtacccggcacagctctccggcggcatgcagcagcgcctggccatcgcccaggcgctggtgatgaagccccgcgtactgttgctggacgagcccttcggcgccctcgaccccggcattcgcaaggacatgcatgagctgctgctggagctgtggcgggaaacccggctgacggtgttcatggtcacccatgacctctcggaaggcttcaccctcggcagccgcattctggtcttcgacaaaccgcgcatcgatccccacgccccgggtgcctatggcgcacgggtgacctacgacattccgctgcacgagggccgccatgctcccggcgcgtccgcaggcctgccgaccgccctcgccgactcttttcgcactgcctatcaaggagcctga

SEQ ID NO: 342536 - DNA, 816 bp, Pseudomonas aeruginosa
atgcgcctgatcaatcgaacgccgagccgcagcggctggcttgctctggccatactgcccttcgccctgatgctggcgctgtacctgaccagctctacccagcgcctggaaatcaatcccaacgacaagctcctgcccagcttcggccagatgagcgcggctgtcgaacgcctcgccttcaccccggacaagcgctcgggcgactacctgttctggcaggacaccgcctcgagtctcaagcgcctcggtagcgggctggccatcgccgccgtggccggcctctgcctgggcgtcgccgccggcaccctgccgctgttcggtgcgccgctgtcgcccctgctgaccgtgctgtcgatggtgccaccgctggcgatcctgccgatcctgttcatcgtgttcgggctgggcgagctgtccaaggtgatgctgatcgtcatcggcatcaccccgatcctcgcccgcgacctcgagcagcgtgctcgcgagataccccgcgaactgctgatcaaggcgcagaccctcggcgccaacacctggacgctgatcctgcgactggtgttgccgcaacttctgccacgcctgctcatcagcctgcgcctggtgctcggctcggcctggctgttcctcatcgccgccgaagccatcgcctccacggatgggctcggctaccgcatcttcctcgtacgccgctacatggccatggacgtgatcctgccctacgtcgcctggatcaccctgctggcgtgggccatggatttctcgctgcggcgcctgacccagctgctgttcccctggtatgaaggagccaaggcatga

SEQ ID NO: 342537 - DNA, 1332 bp, Pseudomonas aeruginosa
atgacaatgaggctgtcgcgctttcccatttcgactctgctggactcggcctcgggacatctcgaggcccacttgtttaagaagcggcttgatgccgagagcggcgaaccgctggctcaacaatattccggcatcattttcagcggcaacccgcatgaaaccgttcctcggcgcctgctgctggataaacgcctcaccccgctggagagaaactgctggcaagtgttccgcttgctcatcaacgacgacgggctgaccgcgttccctacatacgagcaactacgcccttatctcggcatgcagccgggtaagatcgcctcgcgcgaaaccatcgccaaggcactcaaggtccttcggttgacacgctggctcagtctcggccgtcgcctccgcaacgacctcaacgggcaagtacaaggcaacgtctacatcctccacgacgaaccggtatccccggcagaagccctggagctggaccccgactacatgcagttgctgagccagtccaccggcgacagcaaccgagccatacgcgaagtcggccagatcacatggcgggagttcagggatgacccggacgttggtcgccgcctcccaacccatctggagaagctcgagggacgcttgaaccaccagcaatgggctatcgatagtcagctcgaagcagatccagcggcagagttcggcatccgaactctgcccgatctacctcattcaaccccgagttcggatgccgaactcagtgaaatcagcggcaagcaatgcgctttaccgctgagttcggatgccgaacccagacagaatccgccgagtacgcccttggttcggatgccgaactcatatagtacgtatacatacaaacaagattctgtatttaaaaaaccagtacaaccgcgaacacgcgaggaagcacatccgaactggcaggatctcctgaacggactggagggcgagcaacggttccaggcggtaagcgcgctccgacgggtgtccgaggagcttcggctacccatcatcgagcagtggcggcaccgatgtgccggcggaaccgtcggtaatccgttcggctacctcatgacgctcatccagcgtgcagtccagggaaagttcaacgcttcttgggctccggaagaaccggctgaacgaaccatcccagcagcggaacgccccagtcgtgctccggcaccaccaagccccacaacgcctacacagcctcaggttcagccgaagggggatacccggacagggaacgaagtcctcagccggctcaaggacctcattcggcccaggcacggatcgagcgtgccatccgagcggggtgatgagccatga

SEQ ID NO: 342538 - DNA, 756 bp, Pseudomonas aeruginosa
atgtcgaagtcgttgatcaatgaagcggtcctgacgcaggtgatcaaccacctgcgcaacggccagctcaggcgttgtgccgagatgggactgcggccggagatcctggcccagctccaacagcccgccgtcatgagcatcctgaccaataccccggtttcttgggtagacgtcagagtgaacatcgacgtcatggagaaaatcctggccacagccgagcgcagcgcgcaggaagagctgcagatcgaacgcgcactgaagctgggagccaccacaacgatgattcagagctttttcggtctgtcgccggaggacaccgccaccaagcgcttgatcctggagatccacccgcgccgcggtcgctggcggcaacttgacgaacagaccgaacgccagatttggttccgctgggagcacctgatgcaggaaaaccaggtccgcctcgaggacagcatggagttgctggacatcgcgatgatcctcaccgaggaagtcaacgccggagtcgaacaagacagtccagagttcatcagcctcgccatcgtttggtctctcatccagagctggttgaaagacagcctctaccaaccaaacaggaaagaacaggccaagcccgccaccctttatctggccaacgtcagcgctcacctcccctcgcctacggctcacccgccacagagcccccgcttggagattgagtctgcgcagcagcaactcctcaacctggttcagtccgaaggcgatacgacaccatga

SEQ ID NO: 342539 - DNA, 1728 bp, Pseudomonas aeruginosa
atggccaagatcaacccgcaagatctgaaagaccggctacttgcccctggtttcaccgcgccgcccgttctggaacagttgtcggacccgatcagcgacacgcccatggtgctgacactcgaccaggtcctcccctggcacgacaacccccggaccactcgaaacccgaaatacgatgagttgaaagaatcgatccggcatcgaggcctcgatacgccgccaccagtgactcgacgccctggggaagacaaataccgcattcgcaacggcggaaacactcgcctggaaattctcaacgagctctacaaagaaaccggcgacgaacgttacttccgcttcaactgcctgttcaggccctgggacaagcagcgcggcgaaatcatcgcgctgactggtcacctggctgagaacgatctgaagggtgacctcaagttcatcgagcgagccgtgggcattcagaaagcgaaagcctggtatgaggaggagaaaggcgaaccggtcggcatccgcgagctgtcacggaagctcaccgatgacggctatcctgtttcacattcacacatcagcaagatgctggatgccgttgagatactgctgccagccatccctgtgatgctgtattcagggctcggtaaaccgcaaatcgaaaaactcctgtcactcagaaagtcggcatcctcctgctgggcacgtctatacgccggtgaagggattgactttgaaatgctgttccaggacacgctggcaatcttcgacagtagccctgacgagttcatattcgaccgcttccaggacgagctcatcgatcagatgaagcggcccctgggcctgcgttatgaccagatcctgctcgagatcaccaacggccagcaggaacagcgccggggcactctggtcgacctgcccgcacctgccgcaccacctgaaatcccaccagtagggcaggaaagtcctgccgcgtcgactactggacaatcacaatcacagagccccgctgccggcctccaaacgtccaagaccaatagcctcccgggtaatccctctaccccgccaactccgccgctacctgtacaacagcagcaactgaccgatgaggagcatgcagcgctcttggcaggccatatcgtgagtccggtatcgaccaagatcctgcagactcgccaacgtctggccgctctcgagggtgaacatctacctgtcttcgaggaaacagctcttcacgcaatcccggtgcaagtcggcggcctgcacccgatcaccgacctctggtacatcgagcggtcgatcgacacctccgaaatcctgcgacagcacatcgctgatctggctgaagaaatcgctctgcacgtcggcgccccaggcgagatcgtcaggatccagggcggtgtgggttacacgtatcgcgagcccaatgaagaccctgagattactgattcagcgctgcacctcatcacgctgcttcaagcgctcagcggccaggtccaagtcgtcctgaactcacacgaccagcagacctgccgcgacgccctgggcgagtttcaattctcagctggcctcgctcagttgctgctgggccaacccaccacaggcgatcagccatccagccaggcaggccgtctcaatgacgaagccctggtgaaactgttccggataattcgtcttgcccgacgtctggttgaccttgagctgccgccggccgcctccgagcaagcagctaccgaccagtga

SEQ ID NO: 342540 - DNA, 270 bp, Pseudomonas aeruginosa
atgaagaacgttacttcgatcgaccgcaaacacgcagaagacaagtttgttgtacgcatgccgcaagggctccgcgatcaactcaagcaaaaagccgcgcataaccaccgctcggccaacagcgagatcgtctaccggctggagcgcagcaacgagctcgaagaagaactcgctcgagcgaaccgaatggtcgacgagctcttcgccaagaaccagcgtctgcaggcagagctggctgcggcgaacacgcctcaggtggcggaggcatga

SEQ ID NO: 342541 - DNA, 891 bp, Pseudomonas aeruginosa
atgaaaggggttcgtcgcccaatcctgcgctaccacggaggcaagtggaaacttgctccctggatcatccagcacctggcgccacatcacacttacgtcgagcccttcggcggcgcagcctccgtcctgctccggaaagcccgcagctacgccgagatctataacgacctcgacggggacgtggtgaacctgttccgcgtcgcgcgggatcacggtgagcaactgcgccaggccctggcgcttaccccgtttgcccgggaagagttcgaagccagctacgcggaaacgtccgatccgctcgagcgcgcgcggcggatggtaatccgaagcttgcaaggtttcggtaccgcagctgcgtccggcgaacgtacagggttccgctcaacctcgaccagatccggtaccggacctgcactggactggcgcaactaccccgacacgctgaccgcgataacagaacgcctgcagggcgtggtgatcgaaaaccgcgacgccctcgcgctgatggaatatcacgaccggccgaatacgctgcactacgtggatccgccctatgtccactcgacccgcagcacgaaggtgcgccacaacgccacaggcaagtcgtaccggtacgaactggacgacaaccagcacaaggagctggcggcattcctcaagcggctgcgcggcatggtggtgctctccggatatccctgcccactctacgacgagctctacagcacctggcacagagtcgaccgccacgcctatgcagacggctccagagagcgaatcgaatgcctctggctcaacagcgcagcgcttgaggggttggcacaactggatttcttccaggccagtaatgcgtctccatcgccctcattccagaccacggtcgctcagtactga

SEQ ID NO: 342542 - DNA, 1023 bp, Pseudomonas aeruginosa
atgcctatcaaacacgccatcgtccacctgatcgagaagaagcccgacggcaccccggccgtgctccacgcgcgcgacgccgagctgggcgactcccaggccatcgagaacctgctggccgacctcaacgaaagctacaacgccaagaacaaggcctggggcttcttccagggcgagtccggggcctacccgttcagcggctggctcggcgagtacctggagggcgaccgcgacttcatcagcttcagccgcgaagcggtcgagcacctgcagaagctgatggaagagtccaacctctccaccggcggccacgtgctgttcgcccactaccagcagggcatgaccgattacctggcgatcgccctgctgcaccacagcgaaggcgtggcggtgaacgagtcgctggaggtcaccccatcgcgccacctcgacttcggccagctgtacctggcggcgcggatcaacatctccgagtggcgtaacaacaagcagtcgatgcagtacatctcgttcatcaagggcaagggcgggaagaagacctccgactatttccgcgacctcatcggctgccaggagggcatcgactcacccggtgaaacccgtaccttgctcaaggccttcagcgacttcgtggaaagcgagggcatggccgagcagcaggcccgtgagaagaccgagacgctggtcgactacgccacctcgcaggcgcgcatcggcgagccgatgaccctcgacgcactctcggaactgatggacgaccagcaaccgcgggcgttctacgactacatccgcaacaaggactacggcctgtcgccggaaatcccggcggacaagcgcaccctcaaccagttccgccgcttcaccggccgcgccgagggcctgtcgatcagcttcgaggcgcacctgctgggctccaggatcgagtacgacgaggagcgcgacacgctgcggatcagcagcctacccactcagcttcgcgaccagctcaagcgccgcaaggcggagcaggagagcacgtcatga

SEQ ID NO: 342543 - DNA, 258 bp, Pseudomonas aeruginosa
atgaaggcatcccagacctatcagtgcatcgtcaagttcgatggcgccggcttctggaccaataccattcagaagcagagagcgacctgcacctggagcgacaaggtggcagcctcccgccttgccgaacggctgtttggcgaggacaacgcctacatcacccgtatgccggcacaggcaggcgaccacgaaaagcgcatcgagagccgctgggaactgtcctgtagaaatcccaaggaggtagcgcacgatgcctga

SEQ ID NO: 342544 - DNA, 528 bp, Pseudomonas aeruginosa
atgaacactgaagcccgctttccgagtatccacgcctcggccgcgttcaccgactcggcggtggttcatgccaatcacgttggggtcaaccccatcgagctggacgccctcagccaagtgatctcgcgcctttcgcgggacgagagcacggtcgcacccagttcgatggagcgagagcttcgtgagctggaggaactggggtacatcgaaatctcgaccacccaggccggaaccctggtggtcactacgcgcgctccggggcaactgctttcagcctacttctggtcggtatggatccctcgccacctgttcagttgctcgctgaaagtgagcctggtgccgcacctctgctgcggcactcaggactcccagcacctcaccgccgtgttccgcattgcaggcagcaaggacgccgcgcgtgagttcctgcatcagttggccaacaactatcccgggcatgagcccgagttgcccgaactggtggccgttcaggtcggtgatgcactcagcaaggaggccgaatcatga

SEQ ID NO: 342545 - DNA, 186 bp, Pseudomonas aeruginosa
atgaacacttcccagcacctggtcacccaccagtgcatgaattgtggtcagcaccacccataccacctggtgcgccagattcttcccgccgagaacaccccagaaggagaagccgaggtgttggtctgcccctgctgcgggagctacgacgtccatcagttggaggctgtctttgatgaacactga

SEQ ID NO: 342546 - DNA, 1344 bp, Pseudomonas aeruginosa
gtgagcgcgctggagcttactcctcctcactcagtcgaggcagagcaagcggtactcggtggcctgatgctggacaacgcggcatgggacattgtcggcgatcacctgcataaagaggacttcttccggcatgaacatcggctgatcttcaccgccatcagcgagttggccgcgaaggacgccccgtttgacgtcgtgacggtgtcggaagcgatcgaagaccttccagaagccggcgggctggcctacctcggccagctcgctgacaacacgccctccgtggccaatatcgaggcttacgcgcagatcgttcgcgatcgggcgcacctgcggcagttgatgtctctcgggcaccactgcaccagaaccgcctcgaaccaccaggcgaatccccgtgaggttcaggaggagatcgagcagaagctgttcgccctcggccaagatcagcacaagtccgactttgtcgatatcaacaagggcctcgcgaagatcgtcgacaccatcgattaccgcttcaacaacaacgtgacggtaacgggggtcccgacaggcctgaaggatctcgacgagctctccggcggactacagaagtcggatctcatcatcgtcggtgcccgtccctcgatgggcaaaacgtcgtttgccctcaacttgatcgacgccgcgctgcagagcgaccaacagaagtctgtccaggtttacagcatggaaatgccagcagagcagctgctgttcaggcttgctgccctgctcggccaccttgaccttggcaagctgatgaagggccaactgcaagaggaggattggcccaggctgaccgtcgcgatccagcgcataaacgactatggcagccgactggtcatcaacgaccagggcaacctgacgccgacagagctgcgcgccaaggttcgccgtgcagccaggaagtacggccaccccgtactgatcctggtcgactacctgcagctgatgcgctgcccaggcctggaaaaccgagccaccgagatctcggagatctcccgctcgctgaaagcactggccaaggagatggattgccccgtcgtggccctgtcccagctcaatcgcagcctggagaaccggccgaacaagcgaccgaacaacgcagacctgcgtgagagcggcgcaatcgagcaggacgcggacgtgatcatgttcgtgtaccgcgacgaggtctaccaccccaacaccgaggccaagggcatcgccgaaatcatcatcggcaagtaccgcaacggcccgatcggcaccgtccgcgccgccttcatcgccaaccagacccgcttcgccgaccttgcaccaacttggcagggagctcttgcatga

SEQ ID NO: 342547 - DNA, 225 bp, Pseudomonas aeruginosa; identical to SEQ ID NO: 340270

SEQ ID NO: 342548 - DNA, 708 bp, Pseudomonas aeruginosa
atgactcgctctgctctctcgaacatcgcctacgaggctctggtgcgtgcccgccgcaaattcagcaaccgagaggagcgctgcatccgcgaaacctggaccgccgaacaggaactggtgctgctgcgcctgtatccagatatgccgaacgaggtcctggcagccaggttgaacaaaacgctccagcagatctgctccaaagcgtatcggctcgggctgaaaaaaagccccgagttctccaagaagatccggcaggactggggcagcgcaactcggttcaataagggaaacaccccatggaactgcggcatgaaggggcttcccgcgcgaggacgctcatcggaaacgcagttcaagaaggggcagaagccccacacatggctcccggtcggcagcacacgggtaagtgccgatggctacctgcaacgaaagatctcggataccggctatcccccccgggactggaagagcatccacatcctgctctgggaagaacacgtcggccccatcccaatcggccattgcgtctgcttcaaggacaacaacaagcagaacgtcgtcatcgacaacctggaactcatcacccgggccgaacgcatgcgccgcaactccatccatcgctatccacctgagctgaagagcgcaatccgcgtcatcagcaagctcaagcgcaccattcaggaggtcgagcatgaaaaacaagattga

SEQ ID NO: 342549 - DNA, 738 bp, Pseudomonas aeruginosa
atggcgaagactcctatcacccaagcccgcgacgtcgacgcggaacttgtgctgcaactgaacaagttcggcagcgccgccgaccttcggagccagcaggccaaattgaccggcgctgcgcgagaaatacgcaagctgactggtggcggtaccgacctgttcgggaagctgggttgctacttgagcttcgaacaaaaacagctcctacaagacgctgcgcgcctgctcgactcggtgaacaagcaggttgagcatgcgaaagaaaagcgtgatcgcgacgagaaacaagccaagaaacggcgtgagctgcgtgggcgcctggccaagcaactggtcgcctcgaactacccgcttccgggaaatacgctcgaagagcggctggaaatcctgcagatcgcgttgatctacaaccgggccaaggtgttcgatcctctgtactccacgcaccagctccactcaaaactcaaacgctggctggagcgtcccaagcagctcatcgggtggcgcagtgaagccgagtatttcgctagtcaggtggggagcctgcgatgtgacttcattagtcatctgattaacgaaatcgcctatgacgatggcagtgaagtcgaggagcgcctgcgcgtcatcaaacagaaggtcgctgactgcaccgcacagatcgctctgaccagcgaggagcaggaaacccttcggctctggacagacgctctgcaatcggctccggagggtctcatatga

SEQ ID NO: 342550 - DNA, 867 bp, Pseudomonas aeruginosa
atgaatgcgaaagcgacttcggttgtatccaccaagggtggtgtagggaaatccaccaccgccgccaacctcggtgcattttgcgccgatgctggcctgaaaaccctcctcatcgacctggaccccgtccagccctccctatcttcgtactacgagcttcctgaagtcgcccagggcggcatctacgacctgctcgccgccaacataactgacccagcgaggatcatctccaggacgattatccccaacctggacgtcgtgatttccaacgaccagaacaaccaactcaacaacctactgctccaggcgcccgatggccggctccggctggcaaacctcatgccgtccctgaaacagggctacgacctggtgctgatcgacacccaaggtgcgcgctccgctttactcgaaatggtcgtgctcgcatcggatctggttgtttcccccctgcagcccaacatgctcactgcgcgcgagttcaaccgcggcaccatgcaaatgctcgatggactgcgtccctacgagcgcctcggcatgcggatccccaaggttcagatcgtcatcaactgcctggaccagaccaatgactcccgggcgatccacgagaatgtgcgtgccatcttcgatgagcatcaggacatttctgtgctcgaaacgactgtcccggatgccgtcgtgtttcgcaacgcagcatcgcgcgggctaccagcgcaccgcctcgaaacgcggcaaccctccaatcgcacatcagcgcccgcgctggaaatcatccgcaacctggccatcgaggtctttcccgagtggactgaccgcttcctggcgctgacgccggaggcggttgcagcactggtcaagggagggcgctga

SEQ ID NO: 342551 - DNA, 609 bp, Pseudomonas aeruginosa
atgatcaccagatgtcttatgttggcgtttgtttctatcgcgagtcttaccgcacttccagcttacgctcaccatcctctcggcggagatacccctgagacaatgctgcatggtcttttgtcgggtattggacatccattactaggcctgacacatgtgctgttcatggccgcgataggcctgctctttgctttacagccaggcgctacaactggtcgagtcgtgttatttcttggagccacttgcgtcggcgcattagtccatgtgttgggccttgatatacctgcagtcgaacagatgatggctcttggagtagccatagcagggctgatgctggcgtggcgcaagttagcaattctgcctggtgttttagcgctggcgtgtattgctggtttactccatggttttgcctatgctgaagacatcattggtgcccgtacagggccactagtcagctatttcgtgggttttgtcctgatccagggcgttattttgtcgggtatcgtatgggctgcgcgcaaacaattgaccgttcggactgctcgtctgatacgtcgctgggagcttggtgttggcggactggtggcagggtcaatgtcatcaacttaa

SEQ ID NO: 342552 - DNA, 720 bp, Pseudomonas aeruginosa
atgattgttagtggagatccttatgacttccccatcacgggtttgctggatccgcagcgaacagcattggtggttattgatatgcagcgggatttttgtgatccgctgggctacatgcattcacgaggcgacgatgtaggggctgcacgcgccatagtgccccgaattctggcggtgctggaaatggcgcgccgcaccgggatgctagtgatctatacccgggaagggcatcgcgccaacctatctgatctacctcacagtaagcggcttaaaactgcgcgagctggagctcaaattggcgctcagggccctctgggccgcttgttgattcgcggcgaggcgggctgggactttatcgatgaaatgcagccgctggcaggtgaagtgattgtcgataaggttggaaccggtgcttttcatgcgaccgagttgcacgatgtgttgcgcaatcgtcagattgacaatgttgttttaaccggtgtgacgacaggggtatgcgtgacctcaacggcaagggaggcaaccgaccgcggttacagcgttctggtgttggaggattgttgtgccgagccagatccgcgtaaccacgatatggctattgagctgttgaaaatcgaggatggatatctagccacggtatcctcagcccagcacttcatcagcgctttacaaggccaggccgctgatactgtgacagatacccggggagtaaacccatga

SEQ ID NO: 342553 - DNA, 255 bp, Pseudomonas aeruginosa
atggtggacgtgactgacgtgatgatcgtggtgatggtgaccagtgcgctgatggtcgtggcgctgctgcgccttggccataatttctgcctcaaccactgcaatgcgctcggactggatgagttcatgctgctcaagcaaaccctgcaaagccaccaaccagcaactgtagtattgctcatcactttcaatacaactgccctgttcatgacgctgtatagatgcaatcaaagcctgctggaagtcctgcagtga

SEQ ID NO: 342554 - DNA, 705 bp, Pseudomonas aeruginosa
atgaacggcattcacgatatgggtggcttacacggctttgggccggtcaaggtagacccagatgagcctgtgttcgttacgcgctggggcagccgaattttttgcatgacccaagtgattgatcgtctgggtgtatggaatctcgacgaacaccgacacgaaattgagctgatgcgccctcaggattacctggagtggagttactacggtcgttggatgtttgcgatggagcgcatcctcgatcgtcgcaatattttgtcgacagctgaaataaatcgacgcgttgatgaactgagcgccgggctcaagcaccttacaccgccagagcacccgcagcgtaactggccgcttaaagaccaagacaaagtgccctggggcgcctggcgcaaggacgtcgaagttacgcccgtattccatgtcggacagcaggtgcgtgtgcgcaatattcatccgccgggccacacccgggtaacaagctacacccgagggaaagtgggaacggtcgagcgggttaacgctcaggcgtgggtattccctgatacgcgtgcgcattatcgcggggaaaatcttcaaccggtttataccgtgcgtttcagcgctcagacactgtggggcgatgaacatgcggaagccaacctgtttatttatatcgacctgagtgagaaccacattgaggccgcaggagatcagcaaaatgagtcatga

SEQ ID NO: 342555 - DNA, 768 bp, Pseudomonas aeruginosa
atgagcaccgttgaaaccgaccaggccgtattcaggattgagaatctgagcatcaactttccagggaaacggcagccagtaccgagcccgttgcagggtttgaacctgagtatctatgaaaaccagatcactaccattctgggtcagtctggttgcggaaagagcacgctgctgaatgccctgggtggctttgtcattggagaggatagtggtggcgtgttgtatcgccagcgttatatgaacgggccgctggaagagatcgtgatgattttccaggaaaacaatctctacccatggctcagtgttgccggcaacgtcaagtttggtctcaggtttcgcaagcatgacgcggtggatatcaagacaacagtcagcaacatgctcgaaagtgtcgggctgaatgatgctgctggggcttacccccaccagctgtcagggggcatgcggcagcggacggcaatagcgagggcattgattaccaagcctaaggtattgctgttggatgagcctttcagcgcactggacataagtctgaaacgccgaatgcatggattgctgcgcagtctgcaggaagagacgggcacatccatggttatggtgactcacgatgtggaagaagccattactgtgggcgaccgggtgctggtgttgggtggtaatccggccaaagtgctggtggatgctgataccagcgctggcgatatgcgagaccgctattccaacgcctatttgcaactgcagaagcagatagaagacgttatctattga

SEQ ID NO: 342556 - DNA, 648 bp, Pseudomonas aeruginosa
atggtgattgagagtgactttcgtatcggcttgggctcccaatccgccacgctggatgaagccatatttgccaccttcagtcgtgttttcaccggcatgtttctggcttttgtagcggctattgccacgggtgcactgatcagtctgtcacgctttgccacctggtcgttgagtcctttgctgtatgtgctggcccccattgcccccattgcctggattcctactgccattgtggtgtttggtatcagcaatgtgacggccgtattcatcgtgtttatgggcgtgtacttcattctgaccatcggcaccctggcggaaattcgccgggtaccgcaggaatatctgaccatttcgggcaatctgggagccaatcgttggcagcagtgggtgtatgtcgtactgccaagtattttccccggggtgttcacattgctgcggaccaatttcatcgcagcctggatggcggtgctggtggcggaaatggtcggtctgcgtgatggcttgggggcaatcatcatgatggggcgcaacctgttcaataacgagctgattatgtttggcatgctggtcattgggctgtctggttttgttgtggacaggaccctcgctttcatcggtaacaaggtcttgtggtggagggtcaaatga

SEQ ID NO: 342557 - DNA, 660 bp, Pseudomonas aeruginosa
atggaggtgattgcagatggcaagctggggttggattcgatggaggcgttggctgatcacatcaatgcgggcaaaccgaaactgacggctgcagttttgcagggagacaccctggaactgatattggttaccgagttggcgaaccgcggtctggcgcctgatgccatcgagtttgtttacttcgacgacctgttggccatggttgaagctttccgtagcggcaatgtggacattctcagccacatcaaaccctatacctctgagatggtcagctcgcgtggtgctactcaactgaccaataacgccagtacctggtcgctcaatacgccaaatacggttgtgagtgtgctggagaaaaccttgaacgagcggcctgaggtggttgaaggctatctgaaagggctgatctgtgcggcagagatcatcaacagtgatcctgacaaggcgatagatttgctcgcacaaggcaattatttccgcgtttccaacgatgttttgaaagacgcctttacttcagcaccacagcccatctccttcacgccagatgtggcggcagtgcaacaggttgtcgatgacctggtgaagatgcagtacgttcgtccgggagtaagcgcagaaagcatcttcgcgattgacctgattcagtcactggagcaatag

SEQ ID NO: 342558 - DNA, 948 bp, Pseudomonas aeruginosa
atgaacctgtctgatattgatctcaaacttctcaagatctttcacgctgtggttgaggcggatggctacgcgaattcccaggcgggcttgaatctgagtttgtcgaccatcagctcgcatatgagtaaattggagggtcgcctgggcttccgtttgtgcgagcgggggcgccgggggtttgcgctgacgcctaagggtgatgtgttctatcgccagatgctggactttctgggtgcggtgcagttgctcgagacaaacgcgaaaaatcttcgcaacgacattatgggtgagctggccctgggcatgatcgataatctgatcagtgatcctgactgtttgctgcccacagcactgtcacgtttctttcaattgcctaattacaagttccatttgtcggttcatgtgttatccccgcatgaactcgaaaaaggagtgcttgaacggcggctggacctgggggtgggcatcttctatcagcgcaagcccggactggagtatcgaccgctatatcgcgagcgcgatgtgttggtgtgtggtgcatcgcaccccttggcgcaagtgacggacccacatgagattgcccagctagtaccacgtgcagcgaaggtggtaagaaactttatgctggcgcaggaatttcccttcattgacgaccatgatgacagcatcattgctgcggtaagcaatgtggaggctgcggcaatgatgattctgaatggtccctttatcggttgcttgcctttgcactatgcccaaaggtggctagaaacggggcagcttgtggcgttattgccagacaagtttgtgcgccactcacaaatttcattggtgactcgtgatcaggagtcgccacgctcagcgattcttaacagctttctggattgtcttgagcgcgctccccagagtgaatcggcggccgcgcccgcaattggtgcggcactgcagtaa

SEQ ID NO: 342559 - DNA, 966 bp, Pseudomonas aeruginosa
atgactgcggcaacttgcggatgggtcacaatgagcatgcgggagctggatcgcctcaaggtcatcgaggcaatcatcgagggtcggttgaaacctgccgctgcggcgcagcgtctgcgcctgacgacacgtcaggtgcaccggctggttctgcgttatcgcgaggatggcccaaccggcctaacatctcgtcgacgtgatcagccgagtaaccggcagctgtcgccaggtctggagaatcgcgccattagcttgattcgacggaactatagcgactttggtccaactctggcccaggaaaaactggtcgagtgccacggccttaagctggccaaagaaacggtacgacggatcatggttgatgccggcatgtgggtaccgcgcaagcaacggccgcccaaggtctatcagccacgcaaccggcgcgcctgttgcggcgaactgatccagatcgatggcagcgatcatcgctggttcgaggatcatggaccggcctgcacgctgctggtcttcattgatgatgcaaccagccagctgatgcacctgcatttcaccgaagccgaatcgaccttcagctacttcaccgccacccgcgcctacctggagcggcatggaaagccgctggccttctacagcgacaaagccagcgtgttccgcagtaaccacaaggcgcctcagggcggcgacggctatacccagtgcggccgagcgatgtacgagttgaacatcgagagcatttgcgccaacagcagccaggccaaaggtcgtgtggagcgtgcgaacctcactctgcaggatcgcctggtcaaggagctgcggcttcgcggaatcagcaacatgcccgacgccaatgcctttgcagcccactttatggccagctacaacgcgcgttttgccaagccgccgcgctctgagcatgactgccatcgcccgctgcgctgcacagtgatgaagatttggatctga

SEQ ID NO: 342560 - DNA, 396 bp, Pseudomonas aeruginosa
ttgaccgtgcagtacgacaaggtgctgtatctgctagcggacactccgcagtcccgtcgcctggcgggtgatcatgtcgagatctaccactacccggatggccgcatcgagcccagggtggacggcaccgccctcccctttaccacctacgacaaactctgcgagatagaccagggtgccatcgtcgagaacaagcgcttgggtcatgtgctgcaagtcgcccagctcgtccaagcgcagcgcgacagtcggcgctcgcaatcggtaccgggaaatccgcggcagtcaacgcaaggcaagatgctgtcgaagaaggcgcagcgagaactgatgccggaagatatcgccgccgccctggataacacgccaccatcgaggcgaagtcgccatgcgtga

SEQ ID NO: 342561 - DNA, 264 bp, Pseudomonas aeruginosa
atggctatcgagatcaaccgccagtcgtacatggctctgcgctcggccctggagctggaactgctcgatgccggcatcgactcgcctgagctgctgagccggcttatgcgccatgtgctttccgccgaatccgcgacccgtaccgagtcgcaaaccgttcgccgggccttcgttacggcccgtagaaacccgctgctgggcgcaatccctcagcacagtccagggcgcacaaatcgcccgtatatccgcaagaggaaaccctaa

SEQ ID NO: 342562 - DNA, 504 bp, Pseudomonas aeruginosa
atggcaaggaatgttttcttcagcttccacttcaagaatgatttttggcgcacccagcaagttcggaacatcggtgcattggatggtcagaagctctatacgccgaacgagtgggaagaggtcaagaaaaagggtaatgcagcaattgaaaagtggattgatgacagccttgtagggaagtcatgcgtagtcgtactggtgggctccgagaccgcaagccgaccatgggtggtgaacgaaatcatcaagggttggaacgcgggcaagggcgtcgtgggcattcgcatcaacaagcttctagataccaatggaaactcttcggtggcgggctccaaccctttcgatctggtcacactgaagaacggtactgtgaacctttcgaactatgccaagctgatcacccccgtaggggtcgacagcaaagcggtctacgcatcgatccaggagagcattgagcaatggatcgaggatgccattgccgtccggaagaactacaagccgtga

SEQ ID NO: 342563 - DNA, 1464 bp, Pseudomonas aeruginosa
atgactaaagcggctttgaaccgattcctcaatgagtaccctgatgcgctgaacgatggtgtgggggcgattttcgttggtgccggcgtctcaatggcggcgggttacccttcctggtcagagctgctcagtgacatcgctgtagagcttgaggttgactcgaagaacgtccacgacctggcggcgctggctcaatggagcatcctggaaaacggtggtgccacacgcgtccgtaatgtcatcaagaacgagataggccctgacaaacctatccccgagacggttgagatcatctcgcggctaccggtcagacatatctggacgaccaactacgaccgcttgatagaacgtgcatttgaatccattagccggccgctcaaccccatatccggctccaaagatctcgcccttagggtgacacctggcgcagcgctgctctacaagatgcatggttctgtggatcgcctcgacgatgtcgtcatctccacggacgactacgagctgtttcgttcaaaacgaggccagtacctaccgctgtttcaagcgcacctgaccagcatgtccatgctgttcatcggcatcagcttcaccgaccccaatgttcggcatgtcctatcgctgattcgggaaagcttcaccgatgcgccgcccgagcacttcgccatcgtgcgtgcgccgcagaaggccgacttcacgaccgaaggggaattcgcagcgcgcaatgctcagcacaagctgtgggcgaaagatctgaaacgctatggcttgttggcggtagaggtcagtgactatgccgaaattccggcgcttctacgtcagattgaaaagcgagtcgctgcgcgcagaatctgggtgagtggcagctggcctcttgagcggggaggttccgagtcagccgacattcatgcactggccgaggacattggccggcagattggtgagacagggcgccacctggtgactggtgcaggcctgttggttggatcggcgtcattgtcggggttcttgggagcgctgcggcaaggcggcggatgggatctcgagcgacggctgatcgccaggccctttcctcaacccctggcgggagcccagcccaacaacgaagaatgggctgcgctgcggctggagcttgcgcgacaagctggtatcgccattttcattggcggtgcgaagctggccggcgacaagttggaggtcgctcaaggcgtggaacaagagtttgaagttgccaaggcggcaggggtatttctgcttccggtaggggcgtctggtggcgctgcgcagaaaatcagtgacctgctgttgggatcagagctctcctcatctggtcaggacgctgtaaggcccacggataaagaactgaaagtactttctgctccaggattcctggatagcaaagttgggcggcgcaagctcgtttccctagtttttgagatcattgaccgaatagctcatgctacgtga

SEQ ID NO: 342564 - DNA, 915 bp, Pseudomonas aeruginosa
atgagtgccgatctatttatctcttacgcgtggacatcaacagcccatcgagattgggttcgcttgcttgctagtcaactccatttgctcggctacgtcgtaaaaattgatgaggcagtagattatggatcaagtctgcatggtttcatgcgagaggttacagagtccactcatgttcttttgattgtcgacgagaattatgttgatcgagctaataataagccaaagtctggggttggcattgagacggaatgggtaagtagggcttttatgggcaagccagccaattggttgtcagttatattcgtccgaaaccccgagcgtatattgcctaactggctcaatgatcataatcctaagggttttgactttaattccagccctgaaaataacgagtttcccgggtcgattcagatagacgagctctggcgatgggttgaagggctgccggctgacaagactcatgccgtcccattgtctttggttcgaaaacgcgcagcacgccttgagcgtgttgatgctcttcgcgacccagctctttacgcgaatcccgcccttaatggacgtgtgacctttcgctatagaaaccatgcccactacacggttggccacggggagttcgaattcaaaatcaacttcagtgggcattccaacaacagtatccaggtgtacatagatagcggcttgaaagcggttggcctgattgttggtccggattttgacccgctcactgtagagtctttcataacaccgggtcgcattgtcaacccagttttggggcagaaagcagtcctattaaactcgtacggagttctgtgtatcatcacaattgatgaggtgcagcgtgaggtcaacgcacaagagtatgttccagagcatgtgacgttcacttatgaaattctggttagggattag

SEQ ID NO: 342565 - DNA, 666 bp, Pseudomonas aeruginosa
atgcagcccacctcgtccacccgcaagccccgcgccagcagccaggcccggatcgccgcgatcctcgacgccgcccgcggcctgctcgccgacgaaggcatcggcggcctgaccatctatagcgtggccgaacgcgcggaaatgccgccatcgtcggtctaccacttcttccccagcgtgccggccctgctccaggggctgaccggcgaggtccacgccgccttccgcgcgtgcctcgaacagccggtggaccatgcaggcctgcgctgctggcgcgacctgtcgcggatcgtcgaggagcgcatgctggcggtctacgcccgcgacgcggcggcccgccaactgattctcgccagccacggcctggccgaagtcacccaggccgatcgccagcatgacgtgcaactcggccaggccatgcgcgccctgttcgagcggcatttcctgctgccaccgctgccgaccgatatcgagatattcagcctggccatggagctaggcgatcgcgtctacgcattgtcggtacagcgtcacgggatcatcgacgcacgcctggcggaagaaggcatgcgggtgttcgacgcctacctggggctctacctgccgccgatcctggaaaagcgtagcgaaccattaaccggatttatatccgatttaaatcgatag

SEQ ID NO: 342566 - DNA, 1908 bp, Pseudomonas aeruginosa
atgagcacagaatggcaattaccgcccacatacgaatcgggtatgaatagagagtatgccatcgccaaatcgcttatcaacagatttgccgatggtgcatttgatcctccttcaggcctagtttcttcgattgagaatcacctgactgatccagacgacgccgaggctgcgcttgaactatttaccgcgcaattgaatgcaactctcgatgcaatggagccccatgacgatccgagctttcaagccacgctatctattgccatagtagtggcctgggcttcgtcggagaccgaaagccgactccatgctttcttaaggctaactcgtcattcttggtgggtcgcgcatctgtgggttgatgttgcactggttttagccaacaaagatgaaatattcaaaactaaacttatcaaaatggcaaaagaacatttttatggggccgagaaaaatcttctcgaagaatatagtgtagacccttccaacccaattacccttgatgaaatttggtatgggcatataagagagagtcgatccgatgagtctagctggcgatgggttgaattactagccacgcttgacccaagccagcttttcgaattgatgagctccatgaagagcctaatcctactaaatcgagtgctagacagcccagaattttaccgaaacttagacctctgggagcaactaactgttgaaacacctgcatgcttccaaagcaatggttgttggaatggtgggatattgcttcccagtcttatcaggcatggacattttaagctgattcatgtagccgacggtccggaccatccaacaggagttttggaccagcatgtcagatcattgctaacccgcttcgtcaataccctcgcgaaaagatccgacttcgaaggcgtgttcaaacgctggggtacgtggctaactcgccaacatcttaacttccgctccagcgccccaggtctcaaaagagctcttgaaagccaagatattttctgggcgttaaccgaaaaagtcagcccgtctttttcccaagaaatatcaaatcacttagataactcttgggatccgtggatctaccaatcgatgctcgcgctcttacattcgaataagcctgagcaattttccccaccggatatcagtaacttcatcaatgagtggtgcctaacgcccgatgaatgggacacgactaaaggcaagcaactccggaatcatgcgaggcactaccatgcaactgaacctaacaactatgcttgccgagttcttggatactccatcgcgttgagcgatgagtttagagatcattgggtagaaatgtggaataccagctttgcgctgagagaaatcctagaattccgaccggtatatcagatttctgaagagtggcggccttcagacgcatccgggctgatgcgcacgctagttgacataggcttgggcatcctcgactgcactgccaatgatcaggaagccgtgaatccagaattattgaccaaatccgctgcgctttttgaagttctgtggtcagctacaactgagatgctaagcattgacatctacggcgacgacttctggacgcttatgcagcaacatttagccattcgtcggatacgatgggctgccgaagccatggattcaattcaagtcaaatatagcgatcatctcgataatgcagccagcccgagcgcacatgcaaccttgaaattgatgtccagcgatacacgctcaatcgtaagtgttttgcccctgctgcttcaaaacggcatagtccgggagcgccttaaacaccttgtcaacaaggcggagattgacatgccggcacttgcaatcagcgcagctaaataccaacaagcgccagaaaggaagttcaaaattcatccccatcacgttagcttgatcgaagagttgacatag

SEQ ID NO: 342567 - DNA, 648 bp, Pseudomonas aeruginosa
atgcctaagttaccgtccagaactaacgtcaacgtagcagcggttgtcgaagccaaactaactccgcaactacttatcccttgtgagtcgccctaccgggacgaaagccgacatcatttcccctgctatgacgctatcttggctcgtcgcagcgctgagcatgtacggatagtcgacgaatttgccgatgcaattagaactgcgcagacgcgtgtatggattattgacaagcatattttttctgaggatggagataaacctgatcatagccttcggatccagaaagtcgctaactggttcattacggaacagcttaaatctgtacgaattcttacgagccgacatgattcacgaaattccatagagacaatttttgctgaattacaggaggtggtgacaagtacgagaggcaagctcggcacccctattgatataaaccttctcttttcgctcggcgatttcgaccatattcatgatcggtttgcgatcatcgacgacgaactatggcactttggcgctacagtgggcggttttcaccgggatgttaatgccgctagcagagggtgggatgcaaacactcacagagcgctagatttttttaacctagcttgggaaaggtctagcaccaaatcgaggagatcggcatga

SEQ ID NO: 342568 - DNA, 1266 bp, Pseudomonas aeruginosa
atggaaagcgaagatatgaccaacaaatcagagcgatcgtccatacctttccgtaatttggggattattcgctactctcgtcgaatctcaaaaagccaagcatggccagacgtccttgacccaagtgggcgaacaaagaattgtgaagaggtttttcggtttatcgagcgccatatgcacatcgattttcgagagtacccagaatatctaggtggtatgacgcttgccgttcctgatcgtgacgtgcattcagtcaaacaattcattgaacccaaagaagacggctctgaatccctctacttccatgtaaaacctcaccaaggacaagcgctacaagatctaagcctgactgcattcgagggacaggaagggatgctcacctcgtttgaaacctttaaagtccctgaggatggtttggtcgaaattaataggccatctactatcgataccgctggattgattttgacccatgaggaacgcggggtgctaatgcaggcgcctatgcgatcattcatgcgtcagatgaacttaacgacggaagtagtcgagcgacgcgttaagatttccgcacctgaaagagaaggaaagaagagcccgcaaaatgagtattttacagagaagaagacgttagcttccgcccaaacatatggtgatccagtggatcatacggacgcctataagcgcttaatcgacgctaaagctgagcgttacctcaaccacagcgcacgaatttatgatcagacttggtttattaccggccagcgaaaagaagcacttgatcatatcagacaaaaactaaaaaattcacgcgcgaccgtatttatagcagatccctacttcagcgcaaaccaaatcacgcaatacctctttgctatcgagcgtgacgatatccagatcagagtactgacatcagttaatgcctttaaaaaaaccaaagttccaccgactgattccgagcctagcgcccccgtgcctgatacgcgacaagccttgctgcacagcatcgatacattccgaagcactcataaaaacagcctagacataagagtcgcaacgacagaaaacagtctcttccatgaccggtttatcgccatagatggtcgcgtatggatgctgggaagctcactcaactcaatcggcatccgcccaacccttgttatgcggatacctcatggcgaaaaaatcctcgaccacctcctcgacctgtttgatcaagctatttctctagaagaattttcaggacagcagggcgaaatcgatgcctaa

SEQ ID NO: 342569 - DNA, 276 bp, Pseudomonas aeruginosa
atgattaagccattcgacatggagctgttcttggctggcatgctgaccgggtcgcatgcgacgcggcaacgccatttgcggcaggcaaagactatccaagctgaaatcgcggagcgctggcagcgagagacgccctggacttggcagaaaaagcacgttgcctggttcctaggttatcgtttagccaagcgtagtgaggcgacgcggtattactatttgctgacggtgcgactgatagctcggcgattagaaaagtcatgggtattcaaccgctaa

SEQ ID NO: 342570 - DNA, 981 bp, Pseudomonas aeruginosa
atggctttggtgggtagacgcgatggtcgcaatttcggttatggcaggcaattgagctacgcagggccgcaggcgcttaaggacatgttcggcggcggccactacggcacggtcaaggcgcactgtgatcggtggcaggcattcgtgaagtggtgccgctccgaacagggaccgggtatcaacgatgcgcggcaggttgatcgcaaagtgttggcagactacgcggcgtatctgcgcgacctagttcagcgcggtgacctcgccgtcagcaccgcacaaaaccggctttccagcgttaacaggaccatggcggcgcttcgcggtgatcagtgcgtgaaggtgccaagtccgagcaaggcgttgggtatgcagcgcaccggggttcgtcattcggtgccacaaggccaagaccgcggacaggtaaagcaaatcgtcgacgcgctttgtaatcgagatcagcgacgggccgccgcgatcattctgttggcgcgagctaccggcatgcgcttgcgtgaggcaatcttggctgacctgcaacgactaaatcgtgaggctagagacatcggcaagatcaacatccaggacggcaccaagggcggccgaagcggtgcctcggcaccccgttggattacggtgaacgatgcggttcgagtagcgcttggatatgcagagaatgtgtcgccagagggtagccgcaacctgattgcgccacacgaaagttacctcaacgttctgcaggaaatagtccgccctgcgcggggcatcctccacgcatataacctcaagggcttccatgaactacgagcggcttacgcatgcgagcgctacgagcaaatcacccagcaccgagcgcctatcaacggcggtcaatgttgccagttagatcagcgtcttgattatgaggcccggaggcaagtcagctatgagctggggcacggtcggatggacgtggccgctgcctacattggaggacggacatga

SEQ ID NO: 342571 - DNA, 1032 bp, Pseudomonas aeruginosa
atggataagagcgtaattttttccgtcgcagggtcaggaaaaactagtctgatcatcgagcgtcttaaccttgttcagcgggcattgatcatcacttatactgaaaacaattaccggcacctacgcaacagggtcatccagagattcggggtgatcccatccaacatcacgctcatgacgtacttctcgttcctgcatgggttctgctatcggcccttaatgcaattgcggctaggaacccgaggcctgaatttcaggcgtccacccaataggcagtatcacctgaatgacctcaatcggtatcgcgatggaagcagcaggctctatcactgccgtctcgcgaaactgctggacgttgtgcaggccttaccggccatacgtgcccgcttggagcgcttttatgactgtctgtacgtcgacgaggtacaggatttcgcaggccacgacttcaacctactgctagaggtttcccaggcgaatattagtatgacgttcgtcggtgacttccaccagcacaccttcgataccagcagagacggagcggtaaacaaaactcttcacgacgatgtcattcgctacgaaaaacgatttcgtgacgccggtatcacggtcgacaagcaaacgttgagtcgcagctggcgatgcgcaaaaacggtctgcgacttcatcagcgcaaagctgcaaatcgagatgcttgctcatgaggagcgagacagccggatcattacggtcaacaaccaacatctagctaatttgttgcacgctaatccaaccatcgtgaaactgttcttaagcgaacactataagtacggctgctactccgaaaactggggagcaagcaagggcatggatcactttaacgatgtttgcgttgtgatgggcccgggtgcatggaaagactatttggctgagaggctacaccaggcaaacccgcaaacccgcaacaagctgtacgtggcctgcactagggcgcggggagatctgtatttcgtacccgagaagctgctgaaggcgtttaagcaaggaaattaa

SEQ ID NO: 342572 - DNA, 1563 bp, Pseudomonas aeruginosa
atgccggctataaaaaaaattatggtcaagaatttcaaaagctttgaagacctgatccttgagtttgacccaggcaagaacgtgctgatcggtgacaacgaggccggcaaaagcagcgtgctactggccttagatctggtgctgagcgcgagccgcagtcgcgtcgagaccataggttatgaagccctgctgaatcagggagcagtgcaaaatttcctagcagggcctgcgacgctggatttacttcctgtcgtcacggtggacgtgtttctcgaagagggagacgaccagggtttctacggtacacagaacgttctgggaacccagacagatggcctgcgtatggcgatcatcccgttgatcgaagagttcggccagacaattgtcgacctgctcagagccaataaggacagctttccctacgaatactacagcgtgcagttctcgacgttcgccggggcacctcacgtcagctaccggcggccggtcaagcatctgatgatcgacagctctcgtatcgacagcgaatatgccgctcgcgaatacacacgagctgtattcggatttcataccgaggtacccgatcgctaccgcctcgaaaatcgctaccgacaagggaaagagcttttcgggcgagagaacctaaaggacttgaacgactcgctcggggactaccagtttgccttgcgaaccagttcgcgctccaacctagaaaccgacttggtgataaccaaaggcggcatccctattgagaatcgcggcaagggggagcagtgcttcatcaaaaccaattttgccctacagaaagatgaggggaaagggagcctgcacgcgctgctgctggaggagcccgaaaaccatctaagccacactaatatgaagcgcctggttgagagacttgcgggcacgacgggcactcaattgttcatcgcgacgcacagcagccatatctgcgcacgactcgatctacgccacgcgctgctgctcggctctggtcatgcgggacgtttgaaagacctgtcggagcccaccgcaaacttcttcatgaaagcccccgataacaacgtccttgagctcgctctctccaagcgagtcatcttggtcgagggagatgcagagttcatcctcatggagcatttctataagcaacaggcaggccaccctccccaatccgataacgtgcatattatctcgatcggcgggacgagctttaagcgctacttggagctcggaaagctcctgaacatcagagttgccgcaattcgagataatgacggtgactatcagcagaactgtttagcgaactacgaagactacctgtacgagtcggcccagatcttcgccgacccatcccctgaccgaagcaccttcgaaattgcgctgtaccacgacaaccagaagtcctgcgacgacctctttgctgcagggcgcaaacaactgaccgtccaagagtacatgctcaaaaataaagcggatgctgctttcgaactgctgactaagaagtccgcagaactgatcgccccgatgtacatacaggaagcgatcgaatggataagagcgtaa

SEQ ID NO: 342573 - DNA, 912 bp, Pseudomonas aeruginosa
atgaaaaaatttatttcctatcttgagcccatcactgaaagcctttcgaagttagccggcactgcactcaaattcagtatagccttaggcagcgcctgcgtaatcatctatgcattgcgggtaggtcatttcccccagggtctaaccttgggcgacggactgctatttctgctggccgcgagttgttttggattcgtgtacgctatgttcgttggttgcctagtgtcgctcggcatttgcctatcgattgttacgaggcccattctcatcttcatagctaagcgtagatcgaagaaagttaactcaaaaaaagaacctcattatgaactaactcaatttcactggagcacaatccctttcgctctagtggctataatccttatctggtcgtttggaaaacacgaaatttctgcatattttaccttgccactcctctcgacagcactctatattttctattccatagcaaaatcagcaggcttccggtatcgtcattatgagcgactacttagctcaagtgtcatcatccccgagaaggatgaactacagcgctccggcgcagtccagaaagagaagaacacttatctagtatgcataactataatcatactacttccgctattgatgggtggtgtttcaggtctacttatagatggcgcaatgcgtatggctcagatccgtcttgaacacgccaccgtatatattaagaaaccttacagcaccctaataccagatgaattggtaggcaatgtgcttaaggcaccagatggctacaagccttatgccaatgttaccgtgcaattcacgggctttggcgacacgacagttattgcttttaaagcaggcgaacgccagcgccagctggatatcccaaataaccaaattatcatagagaagaagatgaatgagtaa

SEQ ID NO: 342574 - DNA, 993 bp, Pseudomonas aeruginosa
atgactcgtttgtggatggtgcgtggtgaatcaggaagtctttacgatgcctttcgcgagcgtgaagtggcggcagtcggctggagtcagttagcacctcatgcaacgcctggtattgggcgtaaagagctcactgctaagtatcaagagcttgagccccagcttaaaaagggctcggtggttgccggtgcttcgcaagtttggcgcttcgtgaacgaggtcgcggtcggtgattgggttgtaacttactcgccagctaatcgtttgtatcttgttggtaaggtagcaggggagccggagcatcatccggaatgggccgagcaaggcatggctctgacgcgcaaggttcagtggcagcgacaagagctccctcgcgataacttaggtaccagcaccaagaatagtttgggctcgactttgaccttgttcgaagtaccttccgatgccgctgctgaagtgtttgaggcgttgaaaggcaagccagtaacgccgaaggaagatgaggccgaggaaagtattgctgacccgctggctgatgttgaagctcaggcactagagcgtatcaaggatcgtgtaagcgagctggattgggatgacatgcagcagctagtagcaggaattcttcgtgctatgggctacaagacccaagtctcgccacctggctctgatcgaggcaaggacatcgttgcctcgcctgacggcttcggtttcgagcatccacgtattgtcgtagaggttaaacaccgcaaagggcagatgggtagccaggagattcgcagctttctgggtggccgacataaggatgatcgaggcctctatgtcagtaccgggggcttcagcaaagatgcgcagtacgaggctgacagggcctctatccctttggccatgtggaccttagatcacgtagtgcgtgcgttgatcgaacactatgacgcaactgatgctgagaccaagcgcattgtgccgttgaagcgattgtattggcctgcgtga

SEQ ID NO: 342575 - DNA, 297 bp, Pseudomonas aeruginosa
gtggtctgttcagctttcgatgtggcacggtcttgctaccgcgtccaccgtcttcgacgtcgtcgggtcgatgcgcgccgcgttgcgctacgcagccaggtcaaccagttgttcaaccagcgtcggggctcggccggcagctgcagcatcctgggcatgctgcgcgaagagggcgtgaccatcggccgtttccgagtgcgtcggttgatgcgtgagctgggcctagtcagcaagcaaccgggctcgcacgcctatagacaggccatgttgagcggccggatatcccgaatcggctga

SEQ ID NO: 342576 - DNA, 1596 bp, Pseudomonas aeruginosa
atgcacaacacttacaatatctataaagttaagcacgacaagctggatcagctcctaaccaaactaggtactgtaggtttgacggagcaaaaaacactgcaacccaacaaatactcaatgactttctattactccgaaaatataagaggaaatgagatttggtggtggcaagtctatagagagtttttcaatgatgacataaacgagcccaaaaatatttttcatttcgggatactgctctgcagcaatagcgaaaaaccagaagaaatatacgcagtcagcctgggtaaatcccacttttatctttccaaattcacctattctgatttcggcattcaactggccgtgcgtatggccgatgaaaatactatccttctgaagaaaagccggtatttcgccggaaccaaaagacaggacgtatcgtcttaccagcgctttcagctcggtagctacgaacctggcgagtctgtagatcatctgaaactgaaggcttccaacaaggaagtttggggtgaccgaaatataatatttgctgactccatccaaatggatatagatagaagccccatcgatttagccgtcatctttgaccaaatcgaagccggcattacggagcaggagataattcacctgcccaagcttgagcccatagcggtcgagttggtggatgagctcgatagactgcttcttgcctccatcaaaaatatgcaaggcaacgtacaagttgaagagttttatgttcatggcgtagccatctgctttagcttccatgactacgactaccgtctatcttgcaaaaaacctggccaaactggcttctatcgtaaagacatcggcaacacactcgaagtcactgatatcagcggttttctcagcgaccaccaagacattaccgacatcaatgaagttcgtatccagttcagaaatgatgaccaaggtgccttcaccaaagatttgaaagagctcttagacctagctattgaccacggtggctaccagtattttttgaaaggcggcgaatggtataagttcaaccaaacctttatggattacctgaaacgctcgcttaacggcatcgacactgatttaagagatgcgctgaatgaggctgactatcagcagtggaaggctgataaagagcgcttgctagaagccggcgagcatgttgaagacaacttgacctaccgagagtcatatttcaacaagatacaatgcgctgagaatgggtttactctcttggatagacagttgacacaaattcagtccttggagcaagggaggaaaaaatataaggttgagattgcagatctattcaaggacggagagataatttcagtcaaaatctcggaagccagccatcagctaatatacaatattgaacaatctaaagactctgtagagctcataaagcgaagagtcattcaattcgaagaagagctaaccaccgccgcactctggtttgtgtttgaggatgacatacaaagaattacgcaaatcaattctattcagttcctgttagccatcgagtcttggcagaagctgattaaaagtttcaacctcaagcctaagatttacatctcgaagcataataaatga

SEQ ID NO: 342577 - DNA, 1572 bp, Pseudomonas aeruginosa
atggttttgaccgatgcgtctctagaatttgctcgaaatcatataatagctttttatgatactgacttttatccaaagccttttgagtttcatgcgctgtggaactcttgggtcgaagttaaaagctatcttctcgccgcaccattagctggagcgcacactagcaatccgagagttcttccctgggctaaggcgcgcggaggataccgaattgttcatcagcttgagccattagactcaataatatatactgctctgatttatttggtggccgaagaagtcgaagcgtcgcggatgctgccatccattgcatgctcgtaccgaattgaagttgacgaaaatagttatttctcgagaggatctggcttccccgcatacagagagagctgcgagaggctaggtggagttcatgaatatgtactttctacagacattagtgacttctataatcaaatatatctccatcgagtaggaaacgtaattgactcggtcggagcacccgctggcgcaggcagggagattgagagcttcttatctcgattgaacaacaaagcatctcaaggcataccggtagggcccgcggcttcaataattttggcagaagctattctgctagatgttgaccaattcatatctaatcatcacgtagagcatgttcgctatgtagacgacattcgtatattttcggattcggaagagcagctttcagatattcttgaaaatcttgtggtttatctccacgaccagcacaggcttggcctagtttcggagaaaacctccattagatcgtccgctcagtttcttcaagaagaacttcaaaaccagtatcaaatggataagcttgatattctgaatgaaattgaggctggaaaccaatatggaacatacgaatcggaacaggaaaatgagtatgaagacttccagggatatgatgagtatgggcggtattgcgagggaggcgacgacgaagatgatgatggcgaagatctaggagcgtcattgttagatgccctttttagggttcgtaactttggctatgtagatctcgctgttttgagagccatcattagaagggctaagcatggacaagtagctgagatagcgaaacccatactagaggatatagagttttacaagcccgtaatcaatgatgtttgtctttacttggcttccttaccagtgccagaaattaaagagcttttgccgttactatcgaccctatgccaaaccaacagaatcagcaaccgaagcatgagggtttggatggagtggctttttacccgtgaagcacagtttctaaccgatcaaaacattcgacgttatgtttatcaaggtacacctgccagcgcggccgcagctgcattactggaaggaaacatcgcatgggcaaaagaggcgaagcagaaagttttgacgtcagcatcgtgggacaggagagcctacattcatgcgctcaatatattgtcaaaggatgaagccgagaaatatataaaatttattaagcagaatccatccttaactcatacggataagtgggtgtgtgcttgggtgctggccggatgcccaacgtag

SEQ ID NO: 342578 - DNA, 621 bp, Pseudomonas aeruginosa
atgaaattcctggaaaaactgaaaaaacgcaaagagcggaagtacttccgtggctgggaaaagatcttcaaggccccggagaagatccgtcttgcctacccacattacgaggtcggcgtgggcacctacgggatcccggaggtcaccgagttcggcgacaaggccaccctcaggatcggcgcctacacctcgatcgctgccggcgtgaagatcctcctcggcggcgagcaccataccgactggctcaccacctaccccttcccgaagatgatcgatgaggtcgccgacatccctgacagcaccacgacccgcggcgacgtggtcatcggtagcgactgttggatctgcacgaacgcgctgatcctctccggggtcaccatcgggcatggtgcggtagtcgccgccggcgcggtggtgacccgcgacgtgccgccgttcgccatcgtcggcggcaacccggcccggcagatccgctggcgcttcgaggaagacatccgcgaagccctgctggcttcggcctggtgggactggccggtggacgaggtgaagcaggtcgcccggaccctgtgcagtaccgacatgacagccttcctgcgctacatcgagcaacgcaagggctga

SEQ ID NO: 342579 - DNA, 915 bp, Pseudomonas aeruginosa
atgtactacccaattcttcggggaaaacgacatgaattaaatgctgttgtggagttggcatctcgccctgtggctaataggtttaggccgctgcttgagccagtaaataacaatattgcagagcttgcttcctgtattggttctctttatgggagaggggtttcaccctacgtcgttataaatcctggtcttggtgattatcaggggcggggtgcaaatgttgctgctgctcttcacctcaataatttgtcgtcaggaaaatttattccttgtgtaaaaataattgattcttttgatgctaatgcaattggtttgctccagagtattccaggtgctgctgcatatatggtttctgatatatcgccggcaatgctccccgcgcttgctaatgcagattgtaacttcgtaaatatattaaaagttgatggtgcggttttgaattccgtgcctcgtgttgtctgctatcttgactcttttgccaggcaaagaaggaatgcggactatcaggctgtttctttttattcaaaccttcattttaattacaggaataatcctaactccatcggtgttggtgacttcactgtaatgggggaggagtattcagaagcgggagggccggcatatgtggttgcgatacatatgtcgcatgtacagaatcaacctgtcggctcgatatatgtaaatcatttttgttcaactatgcagcctggatcgccagccaaccccggtggaaaatttcttgaggcactcgataatctgattgcgtttgatcgtggtaatccagggcatttttataactcgtggggacttgcgcagttttatggctaccatgctgaccgacattatcctggattaggtgttgttaaagagctttcagttgaacatcacatggaaactgtttgtagtttcatatga

SEQ ID NO: 342580 - DNA, 888 bp, Pseudomonas aeruginosa
atgatttttcttaaggaagcaacgcgtctttttaatagcaaggagctgtccatatttgcaggtggtgatctagagtttctaattaaagttgcatctagatataaagatgttttagatgataatttttatgctagagatgtattttatcactgctatagagaagctgagaaaaattacaagaatgagtacttttttaaaaacattataacaaaaaatatactaattgggcgttactctttaaatacgtcaactatgttgagcgagtttagggttggttccagtaaggctgactgcgtaattttgaatgggatcagtacttgctatgagataaaatctgagtatgacagtttggttcgacttccagaacaacttgaatcttatcttaagttgtttgataaagtatatgttgtgacgactgagagtcattgtgataagttagagtctattttgcctgattctgttggggttttaaagcttaatagtcgcaatgcactttcggaggttaagaaggctagtctttctggataccctgttgatgtcgatgttttaatgtcttctctaaggaagaatgaatatttggaggttgtaaggaatctatttggagtagtgcctgaaacatcaaatgcgatggcctatgctgcttgcagggagttgctgtttactgctgattctggtgatattagaaaagctttttgtgaaacgctgaagaaaactaggaggatagataaggagtttgttggtaatctacctgaaagcttattggcagctggggttgagtatggattgtcgcatgctagtaagttaaagttgctgcaaaacctaaacatttcactcagtaaggatactatatgtactacccaattcttcggggaaaacgacatgaattaa

SEQ ID NO: 342581 - DNA, 228 bp, Pseudomonas aeruginosa; identical to SEQ ID NO: 333105

SEQ ID NO: 342582 - DNA, 291 bp, Pseudomonas aeruginosa; identical to SEQ ID NO: 328687

SEQ ID NO: 342583 - DNA, 987 bp, Pseudomonas aeruginosa; identical to SEQ ID NO: 327970

SEQ ID NO: 342584 - DNA, 1839 bp, Pseudomonas aeruginosa
atgctctccctgttccagcgaaaacggcccccggtcgctgccgcaccgacgccaccacccgtcaccgccatcccgaaagggctactgcgtcctgagtcggccgcatcgctgctggccaccccacgccggcagaagctgctggagcacatctggcagcgtacctcgctctcgcgcaggcaattcgccaccctgtatcgcacgcccctggaacgctatgccgaactggtccaggccttcccggcctccgaggcgcatcaccatgcctactcgggcggcatgctcgaccacggcctggagatcgtcgcctacagcctgaaactgcggcagtcccatctgctgcccatcggtgccagtcccgaagaccaggcggcgcagtccgaagcctggaccgccgccgttgcctatgctgcgctgctccacgatattggcaagatcgccgtcgatctacacgtcgaactggccgacggcagtacttggcatccgtggcatggcccgctgcaccaggcgtaccgatttcgctaccgtgacgaccgcgaataccgcctgcacagcgccgcaacaggcttgctctatcgccaactgctcgaccgccacgtcctggactggctcagcgactatccggctctctgggcaccgctgctctatgtgctggccggtcagtacgaacatgccggtgtactgggggaactcgtcgtgcaagcagaccgagcgtcggtggcccaggagctgggcggcgatccggcgcgcgccatggccgcgcccaagcacgcactgcaacgcaagctgctggacgggttgcgctacctgctcaaggaacagttgaagctgaaccagccggaagcctccgatggctggctcaccgaggatggtttgtggctggtgagcaagacggtttcggacaaactgcgcgcacacctcctgtctcaggggatcgatggcattcctgcgaacaacaccgccgtgttcaacgtgctgcaagaccacggcatgctccagcctacctcggacggcaaagcggtctggcgcgcgaccgtgaccagcacgaccggctggtcccattcgttcaccctgttgcgtctcgctcccgcgctgatctgggagtctggcgagcgaccagcacctttcgcaggcacggtagagatcgacgcgacgcccgcggaaaacgacgccagcatgtcggttcccacgcctaccgtctcagtgaacccagcgcagggaggtcaagaacctccgatttgggagggcgacagcaccaccatcgtttcaccgcccgcagcccagcccgtgcccgacgtcatggaggacttgctcgcgatggtgggcttgggtgagtcggccggcgttggtcaggatgccgaggagttcctccacacccccgcgccagcaacagccgcaacgtcccttccttcacctgcacccgcgcctacgcctgggtcatcggcaacgaagccgtccggggaacagttcatggtttggctgaagcagggaatcgcctcacgacggctcatcatcaacgacgcgaaggcactcgtgcatacggtgaatgacacggcctacctggtcagcccgggtgtgttccaacgctatgcgcaggagcatcccgaagtggccgcactcgccaatcaggagaatcaacaggattggcagtgggtgcagaaacgcttcgagaagctgcagctacatcgcaagcaccccaatggcctgaacatttggacctgtgaagtcacgggcccgaggaagtcccgccgactgcatggctacctcctcgaagatgggtccttggcactcgccgaaataccgcccaacaacccctatcttgctctgactcaggaaggatga

SEQ ID NO: 342585 - DNA, 1368 bp, Pseudomonas aeruginosa; identical to SEQ ID NO: 117521

SEQ ID NO: 342586 - DNA, 1395 bp, Pseudomonas aeruginosa
atgtcttatcgcaagaaaatatcggtcaatagtgttttgctagatcctgagaatgcccgtcacggaaacaagtcttcgcagcgtgatatctacgaatggatgtgtggtattgaaattgggcagaaagttcttaagttggcggtcgagatcgctaaaaaaggtattagccctttagaaactccaggggtgattcctgcaccagaaggggcgggtaagaagtgggtcgttgtggagggaaaccggagggttgctgctctgaagtttctgaataatccaaagctatgtcctgaccctcgcttgcgcaaacaatatgagagactaaaggcgcatgcggaaacgccggtggccagtaaagttgagtttgtcgtatttgcagatataaatgatgctcgctattggatagaaacccgtcatggtggcgaaaatggcggtgctggcattattaactgggggccgatggagtttgacaattttgcggcaagagttggtaagcgtacaacaaatagaccggcagttgagatgctcgactatgcgtatgctaaagggttgattgagtatgcggagtataagggagtacctgttacaactctcttccggctattaagtacgcccgagtttaggaaggctatcgggtgtgatttaattaaggggtgcttatacaagattgctgatgatgagtatttcgatcgtgctgtggtagccgtcttaaagattttggctcgcggggaaaaaactgttactgagctgaaagttaaaaagcagcgtgaagaatttgcagacgagttaaaagccgctggaaattggaaggaatattccgttcagacaccccgtccagtaaatgctgatgctgttgtatatggtgacgatacagagactggcaatggtgatgagagtagaggggatggactgcagtcgcgcccaggcggtgtcactagacctagatctggcctgagagaccgactattcacatccaaagggcatggagtagtagtccctgacgcggaaacaaaagttaacgatattttacgtgagctggtaacgctcaaacattctggacggtctgggacgccaatatcagtggctttcttgttgcgtgctttgattgagttaagttcggataactatattaagaataatgatggggttataaggaagcttgaacctaatacctccctgagggacaaggttaaatcagcggcaaggcatatgcattataatggaaagctttctgaagatcagcttgatgtaattattaggcattgtgatcaagaaggtgggatgcttaacattaatacattgcagcggtaccttcactcgacggcgtttttcccaaatggcgaaactcttaattcaatttggagcgagattaaagattatataatctgctgctggtga

SEQ ID NO: 342587 - DNA, 861 bp, Pseudomonas aeruginosa
atgtctaccgccccctctttcgttactcccctacggtatcctggcggcaaagggcggctgggagcctggctggctgagctacttcaacataatggcttggagggcggactgtacgtagagccttatgccggcggagctggagcagctatgtatctgctcagcaataattacgtagaaagaattgccatcaatgatattgatcctgtaattcacgcattctggtggagtgttctatatgatactgaccgtctatacggcatgattatcgacacacctgttaccatggaaacttggcaccagcagcgcgaaattatttccaacgcagaaaccactgacttaacaacattaggcttcgctacgttctttttgaaccggaccaatcgttcaggcatgataaaaggaggagtaatcgggggacaaaagcaggctggtacgtacctaatagatgcccgctatagaaaagaagacttagcagagagagttagaaaaattggcgctcttagagaccgaatccagctattcaacactgatgctattgaactgctgaaacaccctgaccttcagctaaacaaccgctccctcacgtacttcgatccgccatactacgaaaaaggtagtcaactctaccgcaatcactacaggccagaagaccataaaaaaatttctcagacagtcttgagcatagatactccatggctagtgacctatgacaactgcaaccagatcaaagacctctataaaagcgcacagggagtagagttctcgcttcattattcgacccatctattgagaccaaaagcaacagaagcgatgttttatggaaacattgaactccactccccacccagaatgagaagatag

SEQ ID NO: 342588 - DNA, 1626 bp, Pseudomonas aeruginosa
atgtctttgcgcagtatgcccatcgcgacccgtgccgccctgagtttcgccctgatcaccgctctgctggtcatcaccggcatcttttccctgaaccgaatgggttcgctcaacgaagcctcttcggacatcagcgacaactggctgcctagcgtccgcgaaagcgccgagttgaacgttctgctcgccgaactgcggcaggtgcaactggcccatgtgctggcggcggacgacagcagcaaacgcttcctggaaagccgcatgacggaaatcggcaaggaactgaccgatcgcgagggcgcctaccaacggctgatcagtggtgccgacgagcgctcgatctacgagcgctacctggctacccggcagacgctcctgcaaagccagcagaccctggtgcagatgtcgcgcagcaagccgctggaagagacccgccagtacaccgaaagcaccctgctcgaccagtaccgcgccacccagcagcaactgcaggcgctaatcgacttcaacgtcaagggcgccagccaggccagccacacggccgatgaggtctatcacagcgccttcgccgcagtgatcggcgtactgctggtcgccggcctcgctaccgtggtactggcttggctgttcacccgcagcatcacccaaccgatcggcgaggcgctgcgagtggccgaggtgatcgcttccggcgacctcaccagccgcatcgacacctctggccgcgacgaaccggccaagttgctggtcgccctccagggcatgcaggcacaactgcgccagaccatccagcagatcggcagctcggcgacccaactggcctccgccgcggaggaactcagcgccgtcaccgagcagggcaaccgctcgctgacccagcagaacgacgaaatccagatggccgccaccgcggtcaacgagatgaccgccgccgtcgaggaagtggcgcgcaacgccagctccacctcggacgcctcgtccgcctccgagcaatcggcgcagaacggacgccagcgggtactggagacggtccaggcgatccgcctgatgagcgaagaagtggacaatacctcggcgctggtcggcggcctggcggaaaaggcccaggacatttccaaggtcctcgacgtgatccgcggtatcgccgaacagaccaatctcctggcgctcaacgcggccatcgaggcggctcgcgccggcgagcagggccgcggtttcgccgtggtcgccgacgaggttcgcgccctcgcccatcgcacccaggaatccacccgcgagatcgagcagatgatcgccaacatccaggaaggcaccggcgccgcggtcggcgccatggacagcagcagcgtacgcgcccgcaacatgctggagatcgccgaagccgccggcctggcgctgaacgagatcgcggagcgggtcggccagatcaacgagcgtaccctggtgatcgccagcgcctccgagcagcaggcccaggtggcccgcgaggtcgaccgcaacctggtgaacatccgcgacatctcgctgcagacgtccgccggctccaaccagaccgccgccgccagccaggaactgtcgcaactggccatcgacctgaacaacatggtcacccgcttcgtcgtctga

SEQ ID NO: 342589 - DNA, 126 bp, Pseudomonas aeruginosa
atgtccttcatccgttcttgcatcagtcgttccgtcttcctgctcggcgccggcgtcgccgtggcggcgcaggccgaggtgcgtatcgacggccccatcgaatatggcgtgttcgaaatccgttga

SEQ ID NO: 342590 - DNA, 492 bp, Pseudomonas aeruginosa
atgagcgatgcccttgccctgaccgtcaacggtcagtccctgcgcctcgatgtcgcccccgatacccccctgctctatgtcctgcgcaacgacctgcaactgaacggtcccaagttcggctgcggcctcggcgagtgcggggcctgcaccgtgctgatggatggcgtcgccacccgctcctgcatcaccccggtgaaggccgccgtgggccgccgggtagttaccctcgaaggactcggcgatgccgcccatccgcatccgctgcaacaggccttcatcgacgaacaggccgcccaatgcggctactgcatcaacggcatggtgatgaccgccaaggcgttgctggatcgcaacccgaaccccagcgacggcgagatccgccaggaattggcctacaacctgtgtcgctgcggcacccatgtggagattctcaaggccgtgcggcgtgccgccgagagcctgaaggagcgtcaagaggagcacccggcatga

SEQ ID NO: 342591 - DNA, 1545 bp, Pseudomonas aeruginosa
gtgctgctggatattgccattggcatcgtgctgatagtcgctctgccaggggccgaccttctgccgcagcagttggtagtcctggtcatactcgcggctgagggcgatgccgttgccccaggtcaggcgcagcagcgggccgaagggcaggtaggcgatctgcccgaccagggtgctcggcgccttgtcgcccactgccagggtcacgctggcgacctggccgccggcgttgcgcgggtagccgatggcgaggccggaggggtagccgatctccagcagttggttggccgcgtcgtagcggtaggtcacgcggtcgagcagggtctgctggtcgaggcggatgctgcgcacctgctcgaccaggttgccgcgctcgtcgtagcggtacaccaggctgtcgcgagcgccttcgatggagcccaggcggccgatgccctggttgccgtcggcggtgaggtcgtagcggtactgtacgtcgaggctcgggtcgctcggcgagccgcgctcgatcaggcgattgagggcgtcgtagcgatactcggtgaccgtaccgcgagcgtcggtgcggcggatgacgttaccggcggcgtcgtgctcgaaggtggtggtgccgctgtccgggctgaccagtcgggtcaggttgccgagcccgtcgtattcgtagcgggcggtgacgccgcgcgggtccttgacctcggtgaggttgtcctgggcgtcgtaggcgagttgggtcttgccgccgagaggatcgctctggccgaccagccggtcgagggcgtcgaaggcctggctgtgggcgaactggcgcgggttggtttcgccgaccggattgtcgttgaggtcgtaggcgaagctgcgtgtctggccgccggcgccgaccgcacggagcagccggccaagctcgtcgtaggcccattgctgctggcgcaccaggctgccgctggcgtccttgatgcgctgggcggtgcgattgcccttggtgtcgacgtcgtattcgaggcgttcgccgaggttgttgccgatcgccaccaggcgccgtgcgtcgtcgtattcgtagctcagccaactgccgtcgccacgggtgacgcgggtgatctggccgaccgcgtcatagtcgaagcgggtggtgctgccggcggtgctgacggaggccagccagccgtcgacgccggtgtaggcgaggctgctggtgacgccgttggcatcggtgatgctgccgggcttgccgcgctcgtcatagtcgccgaggcgggtgacctggccgagggcgttggtcacctgggtcaggttgccgcgactgtcgtaggcatagagggtgacgtcctgcacatcggtgcgcggaccgtcggcgcgctcgatcaggccgagggcgttgtagctgtagctccaggcgcgctcggccgcctgcgcgggcagggcgagggcgcaggccagggcgagggcgccgaggcggggaaagtatggggggatgcgcatgggtgtcgtccttgtcagcgggtggtgacggtctcgccggtcttgcgtccctcggcgtcgtactggtag

SEQ ID NO: 342592 - DNA, 555 bp, Pseudomonas aeruginosa
atgattgacccaaccgacaagcaaacccaacccctccccctggagcagccgaagcgcgggcgcggtcggccagccaccggcaaagccctgtccgacgcagagcgggcgcggcgctatcgggcgaacaagaaaaagcgtgacgatcaaccgtcacgaaaagataacgaggacgggaaagaggcgctataccggagaacagtgatccagcaagctgagcaaatacgggcgcttgaacagcaactggtgcagcagcgcgaggaatacaacgacctggtgcacaagctcatggctgaacgcgaccagctcaagcgcgacctggctgccaagccaaggcgtcaccgcgatcaacctgccgccgaactgccagagagcgcctacgaggacgaacccgaggcgaagacctggacgctccagggacgcagcggaagcggcaagtggcagaacctggccgcaggcctggaccgcaaagaagccagccggcaactggatcgagtgatcgacaacaagctgctgggatccacgaagggccgccaataccgactgattgaagaataa

SEQ ID NO: 342593 - DNA, 1173 bp, Pseudomonas aeruginosa
atgtcgcttccgaccggccctcagagcaggatgttctacgactacctcacggtagagcaggtgtattcgcatccgctcccgaaggtgtcggacacgggcatttgctactacgaccggcgaactggtgaaaccatccgcgatacagctcctggctggaagcatgagggtagctattcgaccctgatcaagattcgcgtcgatggctgcaagctccgcgtcgagggcaatcccagcgccgttaatcggctcgacaatctcgacggctaccgctccctggatgactgcatcgcggtctacaaccaaatccttcttgagtacggcgaccagtacggtttttggcggttgccacgattcacgaagtgcactgagtgggggcttcgccagggtgatgacggcacgaagtccagcatggtcggcaacggtgcgcggattcggcgtatcgacctgaccacgaatcggacggtggggaagggcaacgtgatggcctatatccgggcgctcagcacccagcgatatggctacaagaacgcccatctctacgaagacgggctgacctgtgactggaaggctcgcgaccactacgaaaaggcctatgcgaaaggcccagccattcgcaagttcctgtttccaaagtgcaaacgcaatttcggcgaagagtccgccgagttccgctatctccaacgcctggccgattactgcgacgaccagggcgtcgttcggatggagcaagaactcaagagtgagtttctccaggcgaagcggctggagtggtggggattattcgatgagcagcaatttcaggccatccatcaaaagtttttggccatagacgacaagctcgaggtaacggcaatggactacaacactatcgctgatcagttgatcgccaagggcattgtgtccagccgccaggcggccaatgcgacggcaaatatcgccctgcaatggatgaactgccctggtatcagttttgacttccagaagtctcagatgcagacctatcgcgctcgtctgaacaagattggcctgaatatcgctcaaccctatgacgtcactcgccatagcgcggtgatcgtgcgtcgtgccgaagagatcgtgaccaacgatttcttggtgctgccggagttctaccggcatgccccggcccagcgtcatctgcggttggtggcctga

SEQ ID NO: 342594 - DNA, 177 bp, Pseudomonas aeruginosa; identical to SEQ ID NO: 330351

SEQ ID NO: 342595 - DNA, 237 bp, Pseudomonas aeruginosa
atgcgcacggtgagcttccagggcgcgaccctctcggccagcgaacgccgctcgcttgagcttcgccagcgcgccatggcggcggtgaatcagtccgtgttgcagcaacaggttgcggccacgctccaggccctggagcagcacaaagagcagggcggcaagcccgaaaaggtctggtcgacgatctccaacgaaaagggcacgccgttcctgggcgacgtgttcgggtggccgtga

SEQ ID NO: 342596 - DNA, 309 bp, Pseudomonas aeruginosa
atgcccttcgtctatctcggcctgactcgtgacgccggaacctcgaaaaagactggcaacgcctacgacatttcggtcgttcacttcgctgtcgatgccacgcaatcgactcgccccgatcgcaagtttgccctcggcctggagcctcaaaacctgccgatcgcgccggaagccgtgagccaattccagcgcgttgagccgctgtcgtcggtgaacttcgagttcgagccggaccctcggaacatgcagcgcaaccgtatttgcggcgtgaaaccgctgccgaaagctgccactcaggcggcttcgtga

SEQ ID NO: 342597 - DNA, 207 bp, Pseudomonas aeruginosa
atgcaaaagatgaaacaactgatggttcgtggcggtgtcgttcttggctcgctgggtctgctggctggtcaggcgatggcggcagttccggctgatgctactgcggcgctggccgatgctaaggccgatggtgttgccattggcggcgtcgtcctgggcgtgatcatcgcgattgcggcgttcaagtacattcgccgcgcactctaa

SEQ ID NO: 342598 - DNA, 315 bp, Pseudomonas aeruginosa; identical to SEQ ID NO: 329412

SEQ ID NO: 342599 - DNA, 1188 bp, Pseudomonas aeruginosa
  misc_feature (393)..(393): n is a, c, g, or t
atgtttgttctccgcaccggtttgcagggtaatagtaagactctcaatacaattaaagaggtcgacaataaagccgcgaaagaggggaggacggtctactatcacaatattcgtgagttcaaggcggatcatccggcgatcaaggcggaatgggtcgagttcgacaatccgcaagagtggttcaagcttccgcccaacgccattatcgtgatcgatgaagcgcagtcgttctttcgtgtgcgcccgcagggttccaaggttcctgagtatgccagcgccctggagacgatgcggcattctgggcatgaggtgcatgcgattacgcaaagcccgatgttgatcgatgcgcatatgcgcgaactctgtaactgccatatccattatcaccggggnaacggtggaaagattgttaagcggtgggagtttcagaaagttcagacggacgtgaataagaagtatgacttcgcggatggtgaatcgacccggatcaccatcgataagacgtacttcggctgttataagtccgttgcggatggggctgagcatcacttcaagttcaagccgcctcgggcgttgttcgtgcttgtcggtgcagccctggttatcggttatcttggctatggcgtctatgagcgtcgtatggcgacgcatgagcctgcccaatccgttcctgcggtttcttcgtcgagcgttgcgcctgcggcctctgcgggcgttcctgatgtcgatcaggtgcgtcacgtgactgccggtgagtatctggcgatgcgcaagcctcgggtgcctgatgtgcccagctcggcgccgatctatgacgaactgacgcggccggtggcgtatccgaagccgttctgtctgtcgtcacgtgatgagttcctggtgcagaagaatcgcaagcgcatggtgaccgggtatcgtgatggccggttgtatggatgccgttgcaacagccagcaaggcacgcgcctggatatctcgttcgaggcctgtatggcgtacgtcgagcacggtgcgttcgatccggcaattcctgaccgcgtacctgcggctgtcggcgtggccgggccgggcgaggcacgagccggtacggcggcgccgatggctgcgaactcgtcgacggttgcgccggagagtgctggcacccgcgtgactgtggtgaattctggcaagcctgggctgctgtggtga

SEQ ID NO: 342600 - DNA, 555 bp, Pseudomonas aeruginosa; identical to SEQ ID NO: 342592

SEQ ID NO: 342601 - DNA, 1173 bp, Pseudomonas aeruginosa; identical to SEQ ID NO: 342593

SEQ ID NO: 342602 - DNA, 177 bp, Pseudomonas aeruginosa; identical to SEQ ID NO: 330351

SEQ ID NO: 342603 - DNA, 237 bp, Pseudomonas aeruginosa; identical to SEQ ID NO: 342595

SEQ ID NO: 342604 - DNA, 309 bp, Pseudomonas aeruginosa; identical to SEQ ID NO: 342596

SEQ ID NO: 342605 - DNA, 207 bp, Pseudomonas aeruginosa; identical to SEQ ID NO: 342597

SEQ ID NO: 342606 - DNA, 315 bp, Pseudomonas aeruginosa; identical to SEQ ID NO: 329412

SEQ ID NO: 342607 - DNA, 210 bp, Pseudomonas aeruginosa
atgagctgggcgcaacggctcaagcgggtcttttccatcgacatcaccacctgcgcccactgcggcggcgcggtacggatcgtcgccagcatcgaggaacccaccgccatccgcgccatccgcgccatcctcgcccacttcgagaagcacggcgcgctggagcaagcgcactaccggcccgcagcgcgcgcgccgccgccggccgcgtga

SEQ ID NO: 342608 - DNA, 1221 bp, Pseudomonas aeruginosa
atggcggacaaagcgttaaaaaccagcgttttcatctgggagggcaccgacaagaaaggcgccaaggtcaagggcgaactgaccgggcagaatcccatgctggtgaaggcccatctgcgcaagcaaggcatcaatccgctcaaggtacgcaagaaaggtatctccctgctgggcgcaggcaagaaagtgaaacccatggacatcgccctgttcacccggcagatggcgaccatgatgggcgctggcgttcccctcctgcaatcgttcgacatcatcggcgaaggcttcgacaatcccaacatgcgcaagttggtggatgagatcaagcaggaagtgtcctcgggcaacagcctggccaactcactgagaaagaaaccacagtacttcgacgaactctattgcaacctggtcgatgccggcgagcaatcgggcgccttggaaaacttgctggatagagtcgcgacctacaaggagaaaacggaatcgttaaaagcaaagatcaggaaggcgatgacttatcctatcgccgtcatcatcgttgccttgatcgtctccgccattcttctgatcaaggtcgttccgcagttccaatccgtattccaaggttttggcgcagagctgcctgcattcactcaaatggtcgtaaatttatccgagttcctacaggagtggtggcttgccgtcatcgttggtgtgggggcgattggctttaccttcaaggaactgcataaacgctcgaaaaaattccgcgacacactcgacagaacgatcctcaaacttcccattttcggaggcatcgtctacaaatctgcggtcgcccgttatgcacggaccttgtccacgaccttcgccgcgggtgttcccctggtcgatgcgctcgactccgtctccggagcgaccggcaatatcgtgttcaagaacgcggtcagcaagatcaagcaagacgtttccaccggcatgcagctcaacttctccatgcgcaccaccagcgtctttcccaacatggcgatccagatgaccgccatcggcgaggagtccggttcgctcgatgagatgctgagcaaagtcgccagctactacgaagaggaagtcgacaacgccgtggacaacctcaccacgctcatggaaccgatgatcatggccgttctcggcgtactggttggcggtctgatcgtggccatgtaccttccgatcttccaactcggcaacgtcgtcggataa

SEQ ID NO: 342609 - DNA, 192 bp, Pseudomonas aeruginosa
atgcctatcctcggggactccccattccataaagggatggtcttctatctcgtggagatgccaccggtaggcgacttcggcgacgttggccggaagtacgtccttggttacctgtacaaggtgacgccagcgcgcacggccaccgaacttggagtcgtagctgagtacataccgttgcggccgcgatactag

SEQ ID NO: 342610 - DNA, 495 bp, Pseudomonas aeruginosa
atgccgtcattgctcaagggcatgcgcgccgcgttgctgaacctcgccacgctgctgttgctgctcgacctggtcctgctcatctacggcgtgttcgcccgctacctgctcggcagctcgccgatctggatggacgaactggcccgctacctcatcatcggcgcagtaatgctggcgctcggcgcggtatggatggaaggcgggcacatgcgcgtcaacctgctggaacaacgcctgccgccgcgcctggcgcaggtcctcaggctctaccagtggctgctggcgctggccttcttcgccttcgccgcctgggtcagcacccgctacgcgctgaacgccgggcgcttccgcagcctcggcctgggcgtcagccgcacctggccgttgctcagcctgccgctcggcttcggcctgctgaccctcatgctgttgctccagggcccctggccgcggcagccggccagcaccaccgtcgagggagggtcgcaggcatga

SEQ ID NO: 342611 - DNA, 690 bp, Pseudomonas aeruginosa
atggttgaggcgagcctgaccttgctcgatacccaacaggtggatgactgctggaaccgcattggcgtgcatggcgacaagtcctgcgaacgcctggccgagcatgtccattgccgcaactgcgaggtttacgctgccgcggcgacctacttgctggaccgcatcgccctgcgccaggaccagctcgacagcgccgaaacgatggacagccagcgcgaaaagagcgacctcggcgagacgcgctcgatcctggtgttccgcctgggcgaggagtggttcggtctggccaccggcagcctggtggaagtggcgccgatgaaccctatccattccctgccgcaccagcgctcgcgcgccctgcaaggggtgaccaacgtgcgcggcgcgctggtcgcctgcctttccctcggcgaactgctggatctcgaacccggcgccgcgccggtcagcgagcgccgggtggttccgcgcatgctgatcatttccgccgccggcggtccggtggtggcgccggtggaggaagtcgacggcatccatgcgattccgctggcgcggatactgccgcccaaccacgccgacggccaggcctcgcgccggcacgtggccggcgtgctgcaatggcgtgagcggagcatcaccctgctcgacgaaggccctctcctgcaagccgtagcgcggagcctggcatga

SEQ ID NO: 342612 - DNA, 1143 bp, Pseudomonas aeruginosa
atgagcggcaaacgcatcctcgacatcgaactgttgcgcgggctggccgtactcggcgtggtattccaccatctgcacagcaacctgttcagcggctccccggcactgctggacggcatcaaccagcgcgtccagttctggtggggcgtggacctgttcttcgccatctccggcttcgtcatcgcccgcaccctcatcccgcaactgcgcgaggcgcccacacgccaggcattctgggaacaggcgcggtacttctggatccgccgcgccttccgcctgttgccctcggcctggctgtggctggcgctgatcctggcctgttgcctgctgctgaaccgctccggagccttcggcagcctgtcggccaacctcgcggcgagcctcgccggtttcctccaggtcgccaactttcgcttcgccgacagtttctaccgctacgaatacggtgccagcttcgtctactggagcctttccctggaggaacagttctacctcctgctgccgctgctggtcctctgcctgcgtcgctacctgggctgggccctgctggcgctggtgctggtccagttcttcagcctgcgcacgccgctgctgatggtgttgcgcaccgacgccctggccatcggcgtactgctcgccctcgcctccctgcagcctggctatgcccgctggaaccccaccctgctgggccgcgcctggagcgggccgttgctgctggtcgccgtggccgcggccctgggcgtgctggccagcgaagcgtacagcctggtcgccgtgcggatcggcgccatcgcgctattgtgcggactgctggtgtggatagcctcctacgaccgcgactacctgctctccaacgggccgctgaagcgcttgctggtctgggtcggcgcgcgctcctatgcgatctacctgatccacatcccggcgttctatctcagtcgcgaactctgcttccgcctgggctgggacgccggcgagcggcccctgtcgctgctcggcaccagcctggtcctgatcgtcgtactcagcgagctcaactaccgcttcgtcgaaagcccctgccgcgacctgggctcccgcctggtcaagcgcctgagcgccgcccgccgcgtcgccaccacttccggagccacctcatgctga

SEQ ID NO: 342613 - DNA, 1053 bp, Pseudomonas aeruginosa
gtggaacgggtcggcctggacgacaacttcttcgaactgggcggtcactcattgttgctgctgatgctcaaggagcggatcggcgatacctgccaggctacgctgagcatcagccaactgatgacccatgccagcgtcgcggaacaggcggcatgcattgaggggcaggcgcgtgagtcgttgctggtgccgctcaacggcaggcgcgaaggttcgccgctgttcatgttccatccgagtttcggctctgtgcactgttacaagaccctcgccatggcgctgcgggatcgtcatccggtcaagggtgttgtctgccgtgccctgctgggcgctggtcgcgaggtgccggagtgggacgatatggttgcggaatacgccgagcaattgctgcaggagcaccccgaaggggttttcaacctggcgggatggtcgctcggcggcaacctggcgatggatgtcgcggcccggctggagcagcgtgggcggcaggtggctttcgtcggctggatcgatgcgccggcaccggtcagggtcgaagcgttctggaacgagatcgggccgacgccggaggcagtcccgaacctatccgtgggcgagatgcgggtggaactgctcggtgtcatgtttccggagcgggccgagcatatcgaacgggcctggtcatcgatctgctccgccacgacggacgatgagcagcgctggacgaggatgagcgactgggcggaagcggagatcggcgccgagttcgcgacactgcgcagcgaaatcgcacagagcaacgaactggaagtgtcctgggagttgaaacagatcctcgacgagcgcctgaaagcgatggattacccgcgtctgacggcgaaggtcagcctctggtgggccgcgcgcagcaccaatgccatccagcggagcgcggtggagcgctcgatggccgaggcgatcggggctgagcgtgtcgaaccggtgcgggtgctggatacccggcacgacaagatcatcgaccaccctgagtttgtgcagagcttccgggccgccctggagcgtgccgggcgctga

SEQ ID NO: 342614 - DNA, 2403 bp, Pseudomonas aeruginosa
atgcgccgtgccttccaacgcaggatgcttccccactcgctcgccatggccctgagcctgccgctggcgggatatgtccaggcgcaggaaatcgagttcgacatccctccccaggcgctgggcagcgcactccaggagttcggccgccaggcggatatccaggtgctgtatcgcccggaagaggtccggaacaagcgtagcagtgcgatcaagggcaagcttgagccgaaccaggcgattaccgagctgcttcgtggcaccggcgcatcggtggacttccagggcaatgcgataaccatcagcgtcgccgaggcggcggacagcagcgtcgatctcggcgccaccatgatcacctccaaccagttgggcaccatcaccgaggacagcggctcctatacgccaggcactatcgccacggcgacccgcctggtcctgactccgcgcgagacgccccagtcgatcaccgtggtcacccgccagaacatggacgacttcggcctcaacaacatcgacgacgtcatgcgccatacgccgggcatcaccgtctcggcctacgacactgaccgcaacaactactatgcccgcggcttctcgatcaacaacttccagtacgacgggattccctcgacggcccgcaacgtcggctactccgcgggcaatacgctcagtgacatggccatctacgaccgggtggaagtactcaagggggcgaccggcctgctcaccggtgcggggtccctcggcgccacgatcaacctgatccgcaagaaacctacccatgaattcaagggccatgtcgaactgggcgcgggcagttgggacaattaccgctccgaactggacgtcagcggcccgctgaccgagtccggcaacgtccgcggccgggcggtagccgcctaccaggacaagcactcgttcatggatcactacgagcgcaaaaccagcgtctactacggcatcctcgagtttgatctgaatcccgacaccatgcttaccgtcggcgccgactatcaggacaacgatcccaagggatcgggctggtcgggcagcttcccgctcttcgacagccagggcaaccgcaacgacgtctcccgctccttcaacaacggagccaagtggagcagttgggaacagtacacccgcaccgtcttcgccaacctcgagcacaatttcgccaacggctgggtcggcaaggtgcagctcgatcacaagatcaacggctaccacgcgcccctcggcgcgatcatgggcgactggccggcaccggacaacagcgccaagatcgttgcgcagaagtacaccggcgaaaccaagagcaactcgctggatatctatctcaccggccccttccagttcctcggtcgcgagcacgagctggtggtcggcacctcggcttccttctcccactgggagggcaagagctactggaacctgcgcaactacgacaacaccaccgacgacttcatcaattgggacggcgatataggcaagcccgactggggtaccccatcccagtacatcgatgacaagacccgccagttgggcagctacatgaccgcccgcttcaatgtgaccgatgacctgaacctgttcctaggtggacgcgtggtcgactaccgggtaaccggcctgaatccgaccattcgcgagtccggacgcttcattccctacgtcggcgcggtctacgacctgaacgatacctactccgtctacgccagctataccgacatcttcatgccgcaggacagttggtatcgcgacagcagcaacaaactgctcgaacccgacgaaggccagaactacgagatcggcatcaagggcgaatatctcgacggacgactcaataccagtctcgcctacttcgagattcatgaggaaaaccgcgcggaggaagacgccctctacaacagcaaaccgaccaaccccgccatcacctacgcctacaagggcatcaaggccaagaccaagggctacgaggcggaaatctcgggtgaactggcgccaggctggcaggttcaggctggctatacccacaagatcattcgcgacgacagtggcaagaaggtttccacctgggagcctcaggaccagttgagcctctacaccagctacaagttcaagggcgccctggacaagctcacggtcggcggcggcgcccgctggcagggcaagagctggcagatggtctacaacaatccccgcagccgctgggaaaagttctcccaggaagactactggctggtggacctgatggcccgctaccagatcaccgacaagctgtcggccagtgtcaacgtcaacaacgtcttcgacaagacctactacaccaacatcggtttctacacctcggcatcctatggcgatccacggaacctgatgttcagcactcgctgggacttctga

SEQ ID NO: 342615 - DNA, 1650 bp, Pseudomonas aeruginosa
atgaccaatcccaagcgcggcgccattcgcgaactgctcgccctgctcaggccctttcgagcgatcgtggccgtctccatagcactgggcatggccggcggccttgccatcaccctgctgctggccagcatcaacaacgccttgcactcggaaaacggcctcggccaaggcgtactgctgtcgttcggcggactctgcctgctggcattggtcagttcgatcgtctccgacatcggtaccagctacgtcggccaacacatcatcgcgaagctgcgcaaggaactcggcgagaaagtcctctcggcgcccatcgagcagatcgagcgctaccggacccaccgtctcattccggtactgacacacgacattgacaccatcagcgacttctccttttccttcaccccactggccatagccttgaccatcactttcggctgcctgggttacctcgcctacctatcggtcccgatgttcctgctgacagtcgtcgccatcgtcatcggcacggcagcccagtacctggcgcgctcccgcggtttcaaagggttctatgccgcccgcgatctcgaagacgaattgcagaagcactacaccgccatcgcttcgggcgcgaaggaactgcgcatccaccgcccccgtcgctatcgcatgcacaccggccgcatcagcgaaaccgcgaacaacatccgcgacctccacatcagctccatcaatatattcatcctggccaagaccttcggctcgatgctgttcttcgtggtgatcggtctggcgcttacgctccaggcctactggccttcgtccaatccggccgccatcactggcttcgtgatggtcctgctgtacatgaagggaccactcgaacaggtggtgaccatccttcccatcgtcagccgcgcccaggtcgccttccagcgggtcgccgaactttccgagcgtttttcctctcccgaaccccatcttctgctcagcgaacaggaggccccggacaagaccgtcgacagcctggaactgcgcgacgttcgctacagcccccccgccgtcgaaggcagcgaaccgttccatctgggccctatcaatctgcgtatcgcccaaggtgacatcgtcttcatcgtcggcgagaacggctgcggcaagacgaccctgatcaagctgctgctcggcctctatcgcccgcagtccggcgagatccttctcaacggagaaccggtcagcgcggagacccgcgacgattaccgccagctcttcagcaccatcttcgccgactactacctcttcgacgacctggtccagggcaagcaggcttcgttgcagaacgcgacccaatatctgcaacgcctggaaatcgcccacaaggtcagcgtcatggacggcaacttcagcaccaccgatctctccaccgggcagcgcaagcgccttgcgctgatcaatgcctggctcgaagagcggccggtcctggtcttcgacgaatgggccgcagaccaggacccggctttccgcagggtcttctacaccgaactgttgccggacctgaagcgccagggcaagaccatcatcgtgatcagccacgatgatcgctatttcgaaatggcggaccagttgataaggctctcggcaggcaaggtcgtcaaggaaaccgagacggcgtga

SEQ ID NO: 342616 - DNA, 405 bp, Pseudomonas aeruginosa
atgacgaaaaggaaactggcctatatctggtccctgagaaacgccgcggccgacaaggccggccagtacgtgccgtacaagggcgaacagcggtacatgaagtcggtactggagtccttggtggaggcgctgaaccagactgcgctgggcgatgcctacgagctcgtgggcgtgatctacgacgacgacgcggagctgcctcgcgaccagggaaaaatcaaggactacggtttcgcctatcgtcccgggcagcaatggttctatccggcagacctgcaggtgcaaggcaagaccctgaacgacctcttgctcagcgtgccgtccacctaccgtcggtacccgcggggtacccccgagcatgctgctccgccacgacggacgatgagcagcgctggacgaggatga

SEQ ID NO: 342617 - DNA, 855 bp, Pseudomonas aeruginosa
atgcacgcattatcgcccctggccctggccgcactgatcgtcgccaccgcccccgccttcgccgacgaagcgaagaaacccggcacggtgttcaaggattgcaaggactgcccggagatggtcgtactgcccgccggcagtttcaccatgggcaccccggacgacgaggtcggccgccagcccgacgagggcccgctgcacgacgtgaccttcgccaagccgttcgccatcagccgctaccaggtcaccgccggcgaactggacgcctacctgaaggccaccggcgtcaagctggccgacggcgatacccgccccggccgcgaatgcatcgccggcaaaccgcgctaccagcaaggccctcgccagccggcggtatgcgtcgactacaacgacgtgaagaactacgccgcctggctgtcgaagaagaccggcaaacactaccgcatgctcagcgaggccgagcgcgagtacggcgcccgcgccggcagcgccggccccttccccttcccgttcgacgaaggcaaggaatacagcatcgccaagcacgccaacacctacggcgccagcgatggctacaacttcacctcgccggtgggcagcttcccgcccaacgccttcggcgtctacgacatgcacggcaacgtctacgagtgggtcgccgactgctggcacgaccactacaacggcgcgccgagcgacggcagcgcgtggatggaggacaagtgcgagctggtgcagatccgcggcaacgactggggcgagccgccgatcttctcgcgctcgggcaaccgcaacaatgcggcccccagcgaccgcggcgactggatcggcttccgcgtggcgcgcgaactctga

SEQ ID NO: 342618 - DNA, 6666 bp, Pseudomonas aeruginosa; identical to SEQ ID NO: 327986

SEQ ID NO: 342619 - DNA, 375 bp, Pseudomonas aeruginosa
atgtccaggcatgaagacctgctgttgcaactcatccagcgtgaccccgacaagatcaggagcatcctggggctgcccgctccaaagccagacctgtcctggtacgaaggagcagacgtctggattgaagctggacaccgcagcgacaggggcgcggaactacgcatagccttcggggagccactcccgaatggctatgccgatttctggataccgttcagtggaccggatggcaatgcactgggctggctgcgcttcagctacatcaccacggtacgggagaagtctctgttcaccgcctgtgaatggcgctccgcaggcgaacctgcgccggccgaagagagccgcctgcccctccccatagagaacctgtga

SEQ ID NO: 342620 - DNA, 381 bp, Pseudomonas aeruginosa
atgaatgaatttcccccttatctcggcatgcccccgtcccgctcggtgttgtgctaccagccgcgagccagtgtgcaaaacaccgagctgcaagcccaactggtggaactggcccaagagcgccggcgctttggctatcgccgcctgcacatcctgctgcggcgtgctggcgtgcaggtcaaccacaagcggatctatcgcctgtaccgcgctgccggcttgatggtgaaacggcggcgccgccgccatggcgtcgcggtggagcgcgaacgcctgagtttgccgagcgcaccaaaccaagtctggtcgatggacttcgtcttcgatgcactgagcaacgggcggcggatcaaatgccctatcagcgcgacatcaagctga

SEQ ID NO: 342621 - DNA, 957 bp, Pseudomonas aeruginosa
atggccaccgaattcggcacagccgcgaaccacgccgacctggtcgaacgactcgtccagttcctcaccgccaacccgacgctcgtcgcggccggccaggcctacgagaaaacgttcgacaacaccattcccgcatccgggacggcgatcgcgattcgccaggtgacactgcgtgctcccggcctgggcggcgaagacagcatcttcatgggcgtccagtcctacggcgataccgcgctcgactactacaacgtccggctgatgggcggtaccgcgttcaatcctggcgcgctcccgccgggtggcgacttctggacggcgttcgtcaactacagcccgcgggtgcagttgctcgcgtggaaccagcccatgccgtactggttcttcgccaacggccgcaggttctggctggtcgtaaaagtctcgacgatctacgagtcggccggcgccggcttcatcctgccaccctgtccgccgtcgcagtatccgtacccgctggcggtggtgggttcctaccgtggcgacgtcgccacccgctggtccgacgtgagcgaccggcaccgaggcatcagtagcccgcttgagcgcagttgctatgtccgcgatccggcgggccgttggctgggcttcaccgtcgcatcgaacagcaacaacgagtccaactacgacaatcggaccctgctgccgctgggctgcgcccgctatgcgggtagtagcgacactgtgatcaaccagctccgagactctttcagcaagttccccctgaaggcgttgagcctcgtgacccgcgaaactgaaggcaggaggtacttgggcgacttcgacggcgcctggtacgtcccgacgctcaactccggcgccgaagacgtcatcaccgagaacggagtcgatcacgttgttttccagactgcatggcggtctggcaatccctggctcttcgcaattagggcggactga

SEQ ID NO: 342622 - DNA, 318 bp, Pseudomonas aeruginosa
atgaccccgctgctcctggacatcaacaagcgcggttgggcggcactacatgactggtccggcgctgtgcgccacgcgacgggcggaatagccagcattcccgcgcccgcaatgcctgctccgggcctttctgcttcgcgcctgcaggagcccgcgaagaacctcagcgcgacgctgaagaacaaccagaacttctacctggtcgatgaccccagccgcatcggtgatgtgatggcaggtcgttacggcgacgaggcaatggttctgcacatcagccgcgacccgcagaaattccgtcaactactgggaatcaactga

SEQ ID NO: 342623 - DNA, 957 bp, Pseudomonas aeruginosa
atggccaccgaattcggcaccgccgtcaaccacgccgacctggtcgagcgcctggtccagttcctcaccgcgagcccggacctggtcgcagctgggcaggcctacgagaaggttttcgacaacaccatccccgcgtccggcacggccatcgccgtgcgccaggtgaccctgcgcgccccaggtctgggcggcaccgacagcatctacatggggattcagagctacggcgataccgccctggactactacaaccttcgcctgatgggcggcacggcgttcaatcctggagcaatcccgcctggcggcgactactggaccgcgtttgctaactacagcccgcgggttcaggcgctgctgtggaatcagcccatgccgtactggttcttcgccaacggccgcaggttctggctggtcgtaaaagtctcgacgatctacgagtcggccggcgccggcttcatcctgccaccctgtccgccgtcgcagtatccgtacccgcttgccgtcgtgggctcctaccgtggtgacgttgcaactcgctggtcagacgtcagcgaccggcaccggggcatcagcagcccctatgagcgtagctgctatctccgcgatcccgccgggcgctggctcggtttcactgtcgaaggaggggctgccaacgagtccgactacagcaatcggacgctcctcccgctgggctgcggccgatatgcgggcagcagtgacaccgtggtcaaacaactgcgtgactcgttcgggaagttcccgctcaaagcgctgtcgttcgtcacccgcgaaaccgaggggcgccgctatctgggcgacttcgacggcgccttctacgtgccgacgctcaactcgggcgctgaagacgtgattgtcgaggacggtgtggaccacgtcgttttccaaaccgcttggcgtagcggtaacccttggctctacgcgatcaggaaggactga

SEQ ID NO: 342624 - DNA, 309 bp, Pseudomonas aeruginosa
atgaccccgctgctcctggacatcaacaagcgtggttgggctgcgctgcatgactggtccggcgctgtgcggcacgcgacgggcggcatagccagcattcccgcacccgcaatgcctgctccgggcctggctgcttcgcgcctgcaggagccatccaagaacttcagcacctcggtcgccaactcgatctacctgcacgccgttcaggacacggatcagatggcggccgacatgtgggccggcaaaggcggcgaacacttcctggtctggctgaacaagaaccgccaggccgtcaagcagattatctag

SEQ ID NO: 342625 - DNA, 288 bp, Pseudomonas aeruginosa
gtgctggaccagcaccagtacatggtcgtcttcggccagttgcaacaggttcacccgcagcagcggcccccgttccaggtcgaatggctgcacaacgatggcctgtatccgttcgatcaggccttcttcaccgaactgttcccgctcgatggaaacgctaaccgcaggttgtacctgctggtacgaacgccctccctccagccggaagcgggtacgcaaggtttcatgccgcgcgaccaggctgtcgaagctgcgttgcaaggcatccacgtccagccgcccgcgtag

SEQ ID NO: 342626 - DNA, 159 bp, Pseudomonas aeruginosa
atgggtgccccgcaaatcatctggatcgtgctggccgctgtggtcctggttacgtcctatgcgtgcgatggcctcaccaacgtgatcagcttcaagcagcgcgtgttcgacgtgatcgcgatgacggccctggtgtggtggggaggcttcttcggatga

SEQ ID NO: 342627 - DNA, 294 bp, Pseudomonas aeruginosa; identical to SEQ ID NO: 332596

SEQ ID NO: 342628 - DNA, 201 bp, Pseudomonas aeruginosa
atggctgaccttgccgatcacgccaacgaactggtcctggctcgcctcgacggcctcctggcggcgcgcccggcgctggccatccgcgagtccgcggaagactgcgaggactgcggcgagcccattccccaggcgcgccgccgggcggcaccgggttgcagtcgctgcatcgactgccaggaccgccacgagcgccgttga

SEQ ID NO: 342629 - DNA, 351 bp, Pseudomonas aeruginosa; identical to SEQ ID NO: 334799

SEQ ID NO: 342630 - DNA, 735 bp, Pseudomonas aeruginosa
atgagcaatatcccattcgacccgtcgaaattcacggcaccgaaagcgaagcctctaccagtcgtgcttcttctcgatgtcagcggcagcatgagcggagagaaaatccgcaatgtgaatgatgccgttcgcgatatgttggatacgttcagcgacaccgagaacggtgaaactgaaatccatgttgcgatcatcactttcggttctcaggtagcgctgcatcagccgcttgccagcgccagcgatattcattggcaggacctttcagctggcggcatgactccgcttggcacggcattgcaaatggccaaagcgatgatcgaagacaaagatgtcattccttcgcgtgcgtatcgtccaacggtcgtattggtctctgatggtgggcctaatgatgcgtgggaaaaacctctgaacgcgtttattagcgacggacgctctgcaaaatgtgaccgtttggcaatggcgataggcgctgatgctgacgaggcggtacttgggaaatttatcgaaggcacctcgaatcgcctcttctacgcagagaacgccaagcagctacgtgacttcttcaagtttgtcaccatgtcggtgaccattcgcacgaagtcacagacgccaaataatgtacctgaagcgagcaccattgacatccagccggccacaatcgaagcacgccaggataaacagaactctgtgacacaaagttcttcgacagaagatggagggtattggtaa

SEQ ID NO: 342631 - DNA, 804 bp, Pseudomonas aeruginosa; identical to SEQ ID NO: 330254

SEQ ID NO: 342632 - DNA, 1653 bp, Pseudomonas aeruginosa
atgactcgcgaggagaggcgggaagtttttaaatctctgattaatgaagactcatggattacggccaaatctggcctgatggtaaatacctcggacgatgtatggatattactgccgaataatggaaaaggaaaacggctgtgcgttgattgggttcattcgtctaacatgtcagatgatgataaaaagttaattctgaatgtatttgtggactacgtgcgaaccaaggctgcgagtacggcatcaggcatcgttggtaatgtaaagccatttatggtggatggcattccctccttagccagagttaaagctatatggagtgggctgcagacaaacaataagaaggggctcaatcagttctttgggacgctctctaggcaaggtaatacacggtatgaagaatatcacaagtatacgcggacacatttggacaagggtaaaaacaatactcttgatccgtccattggggcactaagcgatattgagtttgactcgttagccaggcagatcaatgaaaatatacaagagttcgactggggcgccagtcgggatcttttgttttttcagtcgccgaggctatatgcgcggctcagaaatatagtcactaacaagttgttgctctccatcgtaaggcggccaattcaaattgcgctattgaaatggtctgatttgatcccctcgggtgcgagttttcgcgacgcgggaattcttcctgtggacgaaatcggcacggtaggggggcaaacattacagcttagagtgttcatagttaagtctaagggcgcgcaattctcaagggagcggcccgagcgctatccaatacatctttccgaatatatctcaagggttcttatagactataaacgggtggtattggaagggctcagactagtgatgaactcagcagagattcaagtggatcaatctgaactcttgagcctcatgaatgatatgcctatgtttccagcggttgatttttttgaagtgcgatttgactctttagatttgttcaaaagcatgtttacgccaaagtctactgcctaccacatatcggagactgcagttgcacaggccatgagatgggttccggttgcctctgatcgaactgtcgaatgtatggctacttccaacagaattcgtcacaccgtattgactcgcggtgctcaaaatggtttgcccgccgttcaattggccaagatgacaggtgtcaccgtgccggctgcaaggcattacatagatttggattatgtatctaggagagagattgactcaaagtatatcggaaatgagtttctaaagaaggcttttagccataccttaactgtcgttccggaaggcgatgaggtcattgtcgacaataagttcaaccctgttggtggggcactcagcaagcattcctgcgcgacctgttcaactattttagggagaccattggggtgttatgggtgcccaaactttcgtccgatattagaagctgatcacaggtcggtattggctgatgcagagggcaagcttgctgcaaaccgcaactccctagttggtcctctttacgcccgaagtattgaaaaactggagagacagattgtttgggtgaagctgacaataatggtttgcgatgaagaactcgcaaggcagcgcacaatcaatgcttaa

SEQ ID NO: 342633 - DNA, 669 bp, Pseudomonas aeruginosa
atgcctgggaagaaggcaccgagcgcaggtggtagggcttacgttggtttttggttccattgctccccaaaccccaagacgatcctccacattcaggatccgaccgccacggttgcctcaattgcctactacacggcaccggtcattgctcgcctggccactcgcggacaagcctcaaacgacgctcaaagccgctacatccgagcgcttcaggcccgagatgttgaagtcacgctcggaagccatcgattagcgcctagcttcgctccacgctatgtggacggccagaaggcatctcgtactgatcgagtcccgatttggcttttggaagagaaacagacggatgtgaatgtcgcgctcggtatgtaccggacggcctgccgcgccgaacagctgggcatcgaccagatcgttttagtttcgggggacaccgacctggcccctgccctggccgctattcgaggcgacttccctcaaatgcacctcggcgtgatccttccacaccgaggagaacgcagcgaaatagtcagggagccaccaggctctttgcagaagcatgccgactggatgaggcggtacatcagtgacgaggaaatggaggcgtgccagctccctcctaaagtgcccctgcctcggaagccggcaatcgttaagccggactactggtaa

SEQ ID NO: 342634 - DNA, 234 bp, Pseudomonas aeruginosa
atgacagaagagaaagacgccgccgcccatgccttgatcgagatgtatgcggacgcacttgagttgacccatgggccttgcctcgctgggcgcgccgctttgatggcctggctggatgaccaattcttgcggctggccaaactggatgtacctgacgacgcagctgcaggcttgatcgacaccgcctatatgctctggcaggctgagtctacaagccaggatcgtaaggactag

SEQ ID NO: 342635 - DNA, 762 bp, Pseudomonas aeruginosa
atggccacgctgatggcgatgccggtaccggggatccaggagcgcgatcacgcgctcgattgggtgaaatggcttgccctggtcgcgatggtcctcgatcacctgtggtttgtgctgccggctgactggcaggatccaggttacgggctgcgcgttgctgggcgcctggcattcccgcttttctgcctcgccatcgcggcaaatgtcgcccgtcagccggccgggtttccggttgggatccgccgttacctgggcggcttgttgctgttcgccttgctcagccagccggcctatgcgggtttcttatccaatggcacgcacaacatcctgtttacgctcgcgctcggtctgccgatcgccgcggcggttcagcaccggacgccggcgctgatcgtcggcgccgtgctctgcgtggccatcggatatgcctatagctccgtcctcgcgtacagcgtctggggcgtactgctgccggccgtcatggtgacggcaatccgcgctcagagttcggatctgttccaggtgctggccatcgtcgctggcgttgttgcgctgctggccaacggcgcgctgctggctgtgttccgggaactgacgccggttcaatacagccaggttgccgcgatcgccgtcgcgccgctgctgggtttgctcatgctgcagatccaggcgccgccggtgcgcccggtcggtcgctggatgtacgctttctatccgctacacctgctcgtgctgatctcgctcgcgatcgcctggagctga

SEQ ID NO: 342636 - DNA, 210 bp, Pseudomonas aeruginosa
atggccaccgcgattgattacgccggcgcctggcagcgcctgaatgaggccctagcccgcaacgtggcccagtccgagggcgacgctgagatgtttgcgttcttgctcacgtcgaccctgggcgcattcagtgcgcaaggcctgctcgatgatcaagcctctaccagggcgattgagctgctccatcaactgcaccaggtagaggtctga

SEQ ID NO: 342637 - DNA, 930 bp, Pseudomonas aeruginosa
atggcgacagtcacacaagagcgggtccatgctgcagctgatgccattgaggcggcaggcggtcgagtatcggtgcgcgctgtgcgcgaccacatgggcggtggttcaccgaaccagatcacaacattcctagcagcctggcgtgcgaagaagcctgtagttgctgcagctgagatcccggttgatccccgtatcgggcagctgatcgctgaacaggtgcgggttgccgctggcgaggcagcgaagcgggctgacgagcgtgcaactgaagcagaagacacgcttgcgttatgccagcaggaaaacaccgagttggctgagcagctggcggatgtaacctctgcactggaagacgtgcgcgcccagcgtgagcagcaggccggcactatcacggagctgcgcgaggatctggctcgcaccaggcaggaggccctacaggaaatcgaggcggctgacgcaaaggctgatcgcgagcgcgaagctgccgaaactgcgcgccaggccctggcccgcgctgagctgcgtcttgaagctctgccgcggcttgaggctgaggtcgaacgtctgcgcactgccctggaagaagcacagtccggccggcaggttgccgagcaacaggccgctgtcgcgacggcgaagctggaagctgccgcgcagcgcgttactgccgcagaggagcgcgagcgcgaggctcgccagcaggccagcaaggctctggaagccgctgagaaagcctcgggcgaggcccaccaagcgcaggttgcgttgcaggcgacgcaggcccgtctggagtcagcaagccgcgagctcgaaaccgctcaggcctcggcggcagaggcgaaagccgagctgaaagagatccgcgctgaactgaagaaaccggcgaagcccgctacgaagcccgcagtgaagaaaggggaggggaactga

SEQ ID NO: 342638 - DNA, 687 bp, Pseudomonas aeruginosa
atgagcttggttaaacgatttgatcgaaacgctgtaggccgagactttgcggtaggtgatattcacgggcacttcacgcttctggagcttgcgttatcgacagtcgggtttgactcagcggttgatcgcttgttctcggttggcgacctggttgaccgaggtcctgagtcccgcgaggctctggcctggcttgataagccctggtttcatgcggttcgtggtaaccacgatgattacgtgtgccgtttcgagacgtgcgatatggacaactggtcccggaacgggggcgcttggtttaccgatctgagcgcttctgaacgcttcgaattttctaagaggttcaaggcgctaccgctggcaattgaagtgacaactacagctgggcttgttggtatcgtccatgcggattgcccatgtgcgacatggagcgagtttattgacgagctagaagctccctcctcatcagcgaggttgcgctcgatctcaagctcggccatgtggtctaggagcaggctgaaatcaggaggaaccgctcctgtaggtggtgtggtggccattgtatgtgggcactcggcagttgagcgcacagctgttatcggcaacgtacaccacatagataccggcgcctggcgggagggtggacgttatacgttgatcgatcttgagcacttgtcgcctgcatcctga

SEQ ID NO: 342639 - DNA, 648 bp, Pseudomonas aeruginosa
atgacaatgatcctggtgctcggcggagagaaaggcggtagtggcaagagctgtatcgctcagaatctgacagtgtggctccaaaggaagggttccgacgtactgttgctggacgctgacccacagggcacgtctgtcgattgggcgcgtgagcgtgagcagaatcctgatctaaaggatattcaggtcgaatcggctcacggagacattcgcaaaacgcttcttgatcgagcaaagcgctatcaagcgatcgttgtggatgcaggcggtgccgactctgtagcgctgcgatccgcattgaccgttgctactcatgcgcttctaccttttcgtccaaagcgacgcgacctcaagaccttggctcatgttgaagagctcattacgctggccaaaagcgtaaacccggatctagtggctcgcgcaatcgttacccaggccccttctttgcccagccagattcagcggattctcgattcgaaagatgcatgcgcaagctatggtcttgaacctctccaggtgttcaccactgcaagaaacgtttatgacgatgcggatgagaacggatcgtctgtcttggaggtaggaactgaccctcgggcagtagaagaaattgaaatgatcgcagcagaactctggggggctcagtga

SEQ ID NO: 342640 - DNA, 234 bp, Pseudomonas aeruginosa
atgtttcccctggagcatgcgccttgggggttccgcatcctggccggcctggtcatggtcgccctagtgttcggctgtggcgccgccgccctggcctggccgtttgcgattgctggactgacgtacgcagctcacaccgggcaggcaactgctggatctgctgtgctgggaatgctgtacgtgacgatcgctgcatatcttgcgctgctcactcatctggtgatcgagcaatga

SEQ ID NO: 342641 - DNA, 498 bp, Pseudomonas aeruginosa
atgaagctggtgaaaagtgccttggccgcggtggtgatgctggccaccgtccaggccgaggcggctagcgaagctcatccgctcccgctgctgaggtttgcagaaaagtgcgtgacgaaagcattccagctgaactacgcggcctatgaacgccaactgcaggatttgcacgttgaatgcctgaccgatccagcttatcgggactggcgttccagtcttcagcgcgtcgggatcctcgaacagctcaaaagccccaagaacgggctcgttcttgcggtaaacagcggccctggacgagttacgcaggaaggcatcaagaacgtgggcaacttggaccgctataccgcgacggtaagaaccccagtggcaatcgtattcaacggaaaagtagaccgggccccagagggttatgttgaaacggatgttatccgggtgcggcagaacgacagaattgtcggatacgcgattcacgcgatccgtttgaacatcaagaagtga

SEQ ID NO: 342642 - DNA, 423 bp, Pseudomonas aeruginosa
atgaaaatcaaaattgcgctggtagctatcgtcctcgcagccctggttggctgcggtgagtcgaaggaaaacaaaatcatgcccaaagaggcgactactgatgccgtctacagcgaaaaggcatcgcggtacttggaagaggtgatcggcaccccgaagaaggctaaacgaatcgaaatgacgttctggcacgagactgatcgaaaaggtgttggctatctttccctcgtcgttgatggcgtcgagatgattcgcccgattgataatatcggtggttacagcgccgcaagctcgcaggggttcaagttcatttatgaaggtggtacctggaaagcctatgtcgccgaggctgaagaaaatacacacggcgaacacccacaggagtttttcgacaaaacgactggaatacttcgtaaatactag

SEQ ID NO: 342643 - DNA, 396 bp, Pseudomonas aeruginosa
atggcatatcatgttagggaatactacggggatgttgattactgcataaattgcactggcgacgcagttgtgggtgatgaggttcgattcgagcgagcaaagttcgctgggtcgtaccgtaatgccaagtttgtaggttttgaattgataaccgggaagataattaaagacagctacgggcgtgacaagcagcagcacacatttacgttagttttggcggatgacaccgaaattcgtattaagggccgcaacctttacgcaaatgacttgtatcgcaagccgtggaccgatgagcaggcgcgtattgaggcccaatctgaaaagcacgcgaggggtgacgcagcccgcgcaactcgcaccatgcgtaaggagaacgaacatgcattccgtttctga

SEQ ID NO: 342644 - DNA, 195 bp, Pseudomonas aeruginosa
atgcattccgtttctgaccgcatcgagcaggtttcgacctgcccagatatccagcgagctcttgccgctttgcgcgagatccaggttaaggcggtagagctgccgccgagttgcgagcacgacgcgcacgtcattgcggctctcgcggtgactgttgagcagatcctgagcaaggagattaaagatgctgcttaa

SEQ ID NO: 342645 - DNA, 192 bp, Pseudomonas aeruginosa
atgctgcttaaagaagcccaggtgaaaattccccgcgccattggaattggtttgattgtgtatttcggtctggtcgtacctgggcgcgaagtagtcaatcgtgtagatccgattgaacacgttaaagcagttgagactgaaatccctgttccgcccgttttctcgcccgaggtgaatcatgagcaaaattaa

SEQ ID NO: 342646 - DNA, 2202 bp, Pseudomonas aeruginosa
atgaatgaattttctcaacttgtacagtcttggatgtttgggagttggatttttgaaagcgaccaagccggtattatttccgacaacatatctgatgtaacaccgctaacgattttcgctgcagcattctcccagcttggccttctgatgtttggtgtgctcgcgtcttgggccatgttcctaggtattttccggttgaaaaacaacggaaacttcttcggtgcccgcgacggaaacgaggcatttttctacccgcttcgtgtggtagtagcgttgatccttgtcgcgccagttgttccggtttcaagtgctggcggcgtggctataacactgacaaccggccacgctctaattgcaggactctcaaaggcagctgctgaatttggagacacggtacagcacaactcttttgagttgatgcaccgttataatctttttaacgacccgaaattccgcgttgatgttgatccagttgttgccctagacatgctcaactcctggaaattgtctgcagctcaacttgctggttttgccgtctttcaggatccaagtgaggaaaaaatcgtagccggcctaactggcgagcagcttgccttggtggcgctgcggaatcgttggaatgaagtctacggcaacactcatcctgccggatccggagatgctcagtcgcaagcagctgaggcgtttctcagcgttgccggccgctctctgcagatcccgcttattgctccaacagacgcccttgcccgggaagtgactctgggtgcaaatgggctgatcgactcaggcgcagtagatgagactatcggtcgtgagcttgaaactgaaggttggtactgccaactcgggtggatgagctcgatgatgtgctctgatgagtacgttcaagttaaagctaataacgcagcctccattgaagctggaatttccgcggcacagcgccaaatctgggttcagcttgtcgctcatgctcttcagtatgcaaagtctgttcaagatggtggtgttacgcaaacagaacataaggaatatttcgagaaatcaattaactggacagctcagtctgctgattggtacagcaaaacagtcgaaatgacgattgccaatacgattgctggcgatcaagcacaacgtgcagaaccctattttgatgaaatgaaaaattggggttggatgctaggtggtactttcgttttgcgagctgcaagcgattttagtcgcgccgcaagttatgcagatggagccacaagcaaaatgatgcctaaatcgtcactgtcggctttgactggcggggaggtattatcgaaagttgttgaacaagaaacgcttgctcaaattcagcctggaaatactggaaacgccacgaagtcgttattagtccgtgtctttagtcttgatatcctcaaggagacaacagggccgagcatgcaaaacattcacacaatcgccgcatggggccgctcgctagtcggatcaggtattggcttttatgctggggggaaaatggcgcaatacgtgcccggcctttcatctgttaccgatggcgcgcttccaaaatcgataggtgcggtgatgatcatcgccgggggtctcattggctatatcatgccactgcttttcgctatctatgggattatgggagctatgggatggctcgtggcggtggcaacagcgttttttggcgtaacactctggagtgcgggatttgcagctccaaagggtgaagaacacacttctcaaatgtcatctaagggatttaacgcactccttttcattgggctttaccccgctttggcggtaggtggacttatggctgctatcgtaataagtgcgatcagtctcgcacttgttcaagctgcgatgatgggaatttggggcatgttcgatcccggtactgctgaagttggaagacccctagaaagtcttggcgcgattctgattggcggtttgttactggtagctgtaggcatatatttgagttggcttgcagtaatcacctccgcccagctcatcatggctttcccgcgcagtgtgctgaacatgatcgccttctctgagccgggcctgaatccttatgaaaattcccctcagaatgttatgagcgggatagctatgagtgctcgtcaggtactgactggggcaatcagtcgggctattaccccgtcgcgtaatccaaaccagccacaaggtggtggccaatga

SEQ ID NO: 342647 - DNA, 432 bp, Pseudomonas aeruginosa
atgagcggtgctaagaaaggccctaaggcctcgtcccagtacctcaccgagcaggctgcagttcgccttgagcgcctagctgggcggcttggcgtggcccaagggcgcgtcctggacgcgatcctggaattgcgtagcgactcagagatcgaggcctttgttatggcgcagcgctacgccgtcgatcccaagcagccggtccccgtcctgctcgatggagcagtggtcgcagcggttagtgggcagatcacgagatccgtttcttcccttatgggctcgcttttgccggatctgctgctgtccctgctttcgcattacgcggagcgtcgaccggagcttttggcttctacggcgcagccgatcgtcgagcagatcgtacccctggtactggatcgcctgatcgctgagcaactccgggttgacctgccatga

SEQ ID NO: 342648 - DNA, 645 bp, Pseudomonas aeruginosa
ttgggcgttcgcctggattgcagcacgacgctcaggcatgaggctgagggcggtctctttgtaccggtacttttcaacagatttgtaaaagtcggcccattgcgactcattcagatagatcttggcgccatgaatcccgcgcgtgtaggagacatagagactttgaagcgtggcggtgctaccgggcagatagtaagcctgccataccgtcattccctggcttcgcgtcgaggtcatgctatatccccattggatagcctggtactcgctagcccaaatggtggcgatctttccgtcatcgcgcaggatcgaaaacttagtgtcttcgatcgaccttccatcaacttcttttgtaactcgttcgaagctcaagacagtgccaatgtcaccgttgtagaccttgaggttttcagcgtcagccgcatttttacgaagcagcagacgatcaccaacggctacatcgatcagttcacgccggccattaacgaaggtttcaatgctgacattatcgttgggttcagaggacagctccccaagtgcgatacgcgcatcacggattttttcattgagggctcgaacctgatcgttcgtatcagccaggacaagaattccagcccatcctttttcattggaggggaggtctga

SEQ ID NO: 342649 - DNA, 381 bp, Pseudomonas aeruginosa
atgagcgacttgctgccgccgattaccggcgaggaatcgaaaacgaccccggacgaactgatgaccgaggagatgcagagtcttctggccggtctgcccgcggattcggcgtctaccgactcgccccaggagctgatcgtctccagcgcgaccccgccaagcacatcgagcacgcaatccggcgagctgatcagctggaccctttcgcggctggaccgcgagcccccgcccacaacttgcgccaggtgccgagcagcaatctggcaactggaggagaaaggcgaactcaaggtgtattgccgcctgatgtacaggttcatggaggagaacctgcagagttgcgacggccagcagatggccgcagaaattctgcagcagtaa

SEQ ID NO: 342650 - DNA, 417 bp, Pseudomonas aeruginosa
gtgtctgacaccctttccgagatccagcgtctggccgagcgcatgcgcgatcaccagatcgccaccctggaggcgcagctcgtggagctgcgcaactccccaggcaacggcctggccggcccgttcattctgactatgactatctgcaacctggtagtgcctgtcagcgcggcctttgtcgtgccgagtcacaccctcgacctgcctggtgatgccaacaccagctggcatctggctcttttcagcccgtggccaccgaccgaggccgttctcctggatctgcgcaacgcacttttcgacgacgcccccagcagtacccgggatcgagtcgaactcttttgttacgacaattcggcaatgctggccaagtgcaagtcggccggaattcaactccatctgcacggagccacaaaatga

SEQ ID NO: 342651 - DNA, 477 bp, Pseudomonas aeruginosa
atgacccttacccggatctacctcgataccgagttcacgagtctcaaccgttaccaggccaagctgatcagcctcgccctggtagtaccgggaggccctgagttttacgtcgagttgaccgacacctggacgccggcggactgctcgccattcgtgaccgacaccgttctccctctcctcaaccacgctcgacacggccgcaccaccgaccaggccagggccgagctgctgaacttcctgcagatcctcgggccggtggagatcatcacagacgctcccgaccacgactggcccctgctgctgtggcttgcaggccccgcaggcctaccggccaacgtgcagccggaacccgggctgttgagcatcgacctcgatgccgactacagcggcgacgagccgccccaccacgccctgcaggatgcccgcctactcgccgccctgattgagcccaggcacgggcaacgggacatcatctga

SEQ ID NO: 342652 - DNA, 354 bp, Pseudomonas aeruginosa
atgcgctgcaacattgagctactggatagcaaccataatgcatggttcaccgggacacgagatctaccggcagactacatgctaaagctggcggccgagcgaaagcccgccgtcatggcacaaggattagagttcgcgcagaacgccattccctttttcggtggccaactggtcaaagtcgtgaaggccggtggcagcgaagatcaaattgataaagccgtcatcgagttcgcactggctacagtggtggtggaaagctgcttaggcgtgtccgacgaggatctgctcggccgtcatttcaacttggtcgtgtacgacgacgggctagtccgctacgaccgtctggacgcttga

SEQ ID NO: 342653 - DNA, 204 bp, Pseudomonas aeruginosa
atgacgaaagacgaactgcgcgccgagctggagcgccagaagcagcgatttgaagaggtttacggcggcgaggtcgtgacgtacgcggcccagcctgagcccgaccgcaagccctggaggaagcggccgagcctgctcgatgaggcgttccaggaagaagtcaggaaggaagagaagcggcaggcgacattgcatcaggactga

SEQ ID NO: 342654 - DNA, 531 bp, Pseudomonas aeruginosa
atgaagtcccataaaaacgacatccgctatcaggcgtaccgttcacaagcccggaatctgtcagctgagctgatccgcgagcaacctgacctgttgcgcgaaggcatcgatccgcatcaggtgagattcgagccgatcaacgatgaagctatccaggcctcccacctgtggggcgaagaaactacgctgtacccatgggaggatgtttcttcctggagggccgatgaccgcaagggcttcgatctctcgctgtggtacgggcctgaactgtgtgggctttgctacgcaacgccgaggaaaagcagcatctgcatcaagatcatcatccttgaagggaagcctgatcgctcccatccgctgaagggtgaagtggcttccctggcgttgttggccatcgactactacgcccggatgatcaaatgcaccgagatcgaggtccaagaccctgaaccgcttgtcgtcccttggtatcaggagcttggttttgacttctctgaggatggccgacttgtcatccaggtcaatgcctaa

SEQ ID NO: 342655 - DNA, 186 bp, Pseudomonas aeruginosa
atgatcgccaccaagcgccaagcaaaaccgctgattgccaagctcgatgccatcgcgcagttcgaggctgaagcacgtcgcctggctggccgggtgtccgagaatcagctccgtttcctgaaggtcgccaaggccaagggtaaggaaatggaacctgtcggccggatggccggcgcccgcgcctaa

SEQ ID NO: 342656 - DNA, 252 bp, Pseudomonas aeruginosa
atgaacgtggatctcgcagcctgcaaacagctattcgcctacggcgcactgcgtggcgctgttgtgaccccatatccgatgacggacggtgcatggaacatcctgatcgagcgtcaggatcgaatcctggagccgctgaatggcttccggaaaaccgagcccaagatctacaaatcccttaatgccgcgctggcagacgctgcgcgcattggattcaaggaagtgcgagtgcagatcaaccaggccgcataa

SEQ ID NO: 342657 - DNA, 837 bp, Pseudomonas aeruginosa
atggcgacgaagttaaaagccgtccggcttgatccggcagacccccattccgcgctccgtagaacggctagaaagctgccgttgcaacgtgctgcccctcggaagctcactgagcaacaactcaagaacccgctgattcgcgcagcgcacgaacgcctgggcaacattgtctctctgcgcggtaaatacctgcgtcgccttgatactgtgcatggcgatcgccgcactcgcctggagaaatttcaggcaatcgagcgagttgaagagcagctgctcgtgcgcctcgatctagcaaccggtgtgctgggttacatcgatgccgaaaacgggcgattcgtcctgaatacccagtgcaacatcgccgcggatgcaggcatatcggcgcctgtgctaagccgtctgctggccaccctggatgatgctagctatgtgtatcggcgcatcgagcgtgtacgcctcgaagagactgacgagaacgggcttcacctggtgagaacccgcgttctggtccgtttcaccaaacagttctgggctgatctcggattacgttacgtctacgaacgagtccagaaggcagcaaagaagcgccgcgaagctgagttgcgcgagctaggccagcgccgattggctgagatggagcgccattccctagagctgcatcgacgcgaggtttcacgccagcgctggcaggctaaggaagctcgcaagaatggcatagctcccccagagccaagcgcatcagatagtcagccacagacaacaaccaaggccaccagccaaagtgtccagtccgccctggatcgtttgatggcgaacaagcccaccggcagcggctaa

SEQ ID NO: 342658 - DNA, 210 bp, Pseudomonas aeruginosa
atggcaacagcaatcgattacgccagcgcctgggcgcgcctgaacgaagccctggcccgcaacgtggaccaggccgcgggcgatgctgatatgttcgcctttctgctgacatcgacgctggccgcattcaacgctcaaggcctcctcgatgacaaagcctctacccgtgccattgaactgctccaccagctccaccaggtagaggtctga

SEQ ID NO: 342659 - DNA, 930 bp, Pseudomonas aeruginosa
atggcaacagttactcaagatcgtgtgtatgcagcagcagaggctattgaagccgctggcggacgggcatcggtgcgctccgtacgcgatcacctgggcggtgggtcgcccaatcagatcacccctttcctcgcagcatggcgtgcgaaaaagccgatcgttgccgcggctgagatccagctggatccgcgtatcggtcagctgatcgctgaccaggtgcgggtcgccgccggcgaggccgctaagcgggccgacgagcgagcagctgaggccgaagacactcttgccctatgccagcaagaaaacaccgagctggctgaacaactggcggatgtaacctctgcacttgaagacgtgcgcgcccagcgtgagcagcaggccggcaccatcgcggagctgcgcgaggatttggctcgtaccagggccgaggcgctggaggaaatcgaggcggctgacgcgaaagcagatcgcgagcgcgaagctgccgaaactgcgcgccaggctttggcccgcgctgagttgcgccttgaagcgctgccacgcctggaggctgaggtcgagcgtctgcgcgctgccctggaagaagcgcagtccggccggcaggttgccgagcaacaggccgctgtcgcgacggcgaagcttgaagctgccgcgcagcgcgttactgccgccgaggagcgcgagcgagatgcccgccagcaggccagcaaggccctagaaaccgctgagaaagcctcgggcgaagcccatcaggcgcagatcgcgctgcaggcgacacaagcgcgactggagtcgacgagtcgtgaactcgaaaccgcgcaggccgcagcagcagaagcgaaagcagagctgaaagaggtccgtgccgagttgaagaagccggcgaagcccgcgacgaagcccgcagcgaagaaaggggaggggaactga

SEQ ID NO: 342660 - DNA, 183 bp, Pseudomonas aeruginosa
atgacggcggccgtggaacggctcaagcagcacggctatccagtgctggaagaggatttggcccggctatcgccgctgatctacgagcacatcaacatgctcgggcggtattcctttgcggtaccggaagaagttgcgcgcggcgagctgcggccactgcgtaatccagacgacgacctgtga

SEQ ID NO: 342661 - DNA, 3015 bp, Pseudomonas aeruginosa
atggcatccctcgaacgtaccgcctaccctgttttgtcgcgctcctattcgagggccgagcttcagcgtgaattcagcttctccgaggaagaagtcacgtgggtcaaaagtcgctctaatgcagcattccgactgaatctcgctgttctgttcaagacttttcaggtactccgatactttccagaaatcgctgaagtgccggagccagttgtcgatttcatccgcacacaaataggtctacgcagcaaggttgcgctatcaccctacaagtggatgcagctttaccgccatatgagtgccgttcgggaaaaacttggggttcgaccgttctacggctcggatggtcaagacatagcatccacgcatgcacagttgatggctcccctcctcgaacagcgcgctgacattattaatgcgatcattgacgagttgctgcgccaaaactacgagctgcccgcctattcgaccttgaatgacctagcagaagccgctcgtgcagaagcacaagagaaaatcttcaaccttgtggtagccagagctccaatcaaggtgatctataagctaagggatcttctcgacacggacttcgggcgtcggcagagtgacctcaacacactcaaacaggcacccaagaaaccctcgcgcaagcatctggaggtactgatcgaccacctagcctggctagagagtttcgggaaactggatgccatttttgatgggatcgtcgatacgaaaattcgccactttgctgcccaagctgcggcgtcggatgtatctgaactgaaggactgctcgctgccgaagcgttacacgctgatgcttgctttgatctaccgtatgcgggtgcgaacccgagatcacctggccgagatgttcatccgaagaatctccacgatccacaaacgcgccaaggaggagctggagcaaatccaggcacgtcaacgtcagaagttggaacaactggcggccaccctggacggcgtggtgcagattctggttcaagagccggatgaccaggaggctggtagcctgattcgagaatacctctcccccgatggcaacatggatcggttgcgagaggtttgtgctgaagttcaggccacaggaggtaataactacttgccgctgatctggaggcacttcaagtcccatcgttcactgctgtttcgcctcagccaccttctccagttggagcccaccacccaggatcgctcacttatccaggcgcttcagctcattcaggacagtgagaatctgcaccgtgaatggatcgatgagcatgtcgacttgtcgtttgcatcagatcgctgggtgaagatcgtgcgtcgccctaccagtgaagggccgcctaccaaccgacgttatctggaggtctgcgtgttctcctacctggccagtgaactgcgctcgggtgatctgtgcgtgcagggatcggaatccttcgccgactaccgtaaacagttgctgccttgggaagagtgtctccagcggctaccggcatactgcgagaaggtgggccttcctaccacagcgaaggagtttgtcgcctcgctcaagagccagttggaggaaaccgcgcaacagttagatgacaagttcccttcctgtcgaggggatgtgtcgatcaacgatgcaggcgagccggtactgcggcgggtgatggcacgggacatcccgccttcagccatctcgctacagacggcgcttatgcagcgtatgccagccaggcacgtgctggacattatggccaacattgagcactggattcagttcacgcggcatttcggaccgatgtccggcaacgagccaaagctcaaagagccggccgagcgctacctgatgacgatcttcgccatgggctgcaatctcggtcccagccaggccgcgcggcatctggccggtaatgtcacaccgcatatgctgtcctataccaatcgccgccacctctcgctggagaaactggacaaggctaatcgcgagttggtggagctctatctgcaacttgacctgcccaagctttggggcgatggcaaagcagtggccgcagacggtacccagttcgacttctatgacgacaacctactggccggctaccacttccgctatcgcaagatgggggccgtggcgtaccgacacgtggccaacaactacattgcagtgttccagcacttcatcccgccaggcatctgggaggcgatctatgtgatagagggactgctcaaagtcagccttagcgtcgagcccgatacggtctactccgacacccagggccagtcggccacagtattcgccttcactcatctcctgggtatcaatctgatgccgcgtatccgcaactggcgcgacctagtgatgtgccgaccggatcgaggcgtatcgtacaagcacataaaccgactgttcaccgacactgccgactggcacctgatcgaaactcactggcaggatctgatgcagattgcgctgtcgatccaggccggcaagatttcctcgcccatgctgctacgtaaacttggctcttacagccggcgcaacaagctctacctcgcagcacagacgctgggcagtgttatccgcacgattttcctgctcaattggattggcagccgagagctgcgccaggaggtcactgcgaacaccaacaagatcgagtcctacaacggcttctccaagtggctctcttttggcggcgatgtaattgccgaaaacgatccggacgagcagcagaaacgtctgcgttacaacgacatggtggcttcgtcggtgattctgcagaacaccgtggacatgatgcgcatcttgcaaaaactagcccgcgaagggtggcagtttaccgatgaggacgtgtcctttcttagcccctacctgaccagtaacgtcaagcgtttcggcgagttcaaccttaagctcaaccgaccgccggagccctggatcaaggattcggtattccaacaggctgccggctcgttgcgagtcaactcgaccagtaaggccgcggccgaggaggcaatatga

SEQ ID NO: 342662 - DNA, 195 bp, Pseudomonas aeruginosa
atgccattcttttatttcaagaaaatagacctgtcgaagctgataaaatattccgtggcttacggcaactttggagaactactgagcattatgtccaagtgccatcgagactcaggtggctccgtgtaccaggaactaaaaatcttcaagtggtccatgccgtcgcaggatccgattacgagcgtcgcgggctag

SEQ ID NO: 342663 - DNA, 435 bp, Pseudomonas aeruginosa; identical to SEQ ID NO: 325092

SEQ ID NO: 342664 - DNA, 906 bp, Pseudomonas aeruginosa; identical to SEQ ID NO: 209486

SEQ ID NO: 342665 - DNA, 420 bp, Pseudomonas aeruginosa; identical to SEQ ID NO: 209485

SEQ ID NO: 342666 - DNA, 378 bp, Pseudomonas aeruginosa; identical to SEQ ID NO: 209484

SEQ ID NO: 342667 - DNA, 747 bp, Pseudomonas aeruginosa
gtgatcgccaagcacgtgcccatgcgctcgctgggcaagtccgacttcgccggcctggtgcggtatgtcaccgacgcgcagagcaaagaccaccggctgggccaggtgcaggtcacgaactgcgccgccgacaccgtgcgcgatgccatcaccgaggtgctggcgacccagcaggccaacacgcgggccaagggcgacaagacctatcacctgatcgtcagctttcgcgccggcgagcagccgagcgccgacaccctgcggcagatcgaggcccgaatctgcgccgggctgggctttgccgagcatcagcgcgtcagcgccgtgcataccgacaccgacaacctgcacatccacatcgccatcaacaagattcacccgaccaggggcacgatgcaggagccgtactactcgcatcgggcgctggccgacctttgcgcgaccctggaacgcgactacggcctggagcgggacaaccacgaaccacgccagcgcggcgcggccgccagggccggcgacctagaacagcacgccggcgtggaaagcctggtcggctggatcaagcgcgagtgcctggacgagatcaagggcgcggcgagctggtgtggggtgcaaataaagtttcatcctaacgggaacgatttgctgggctggctgggaagctcactgcccgacctgtacctaaagtctcatcctaatgcctcgcagcggccttcaaatggtcggaaaaccccggagccatgcgaataa

SEQ ID NO: 342668 - DNA, 1212 bp, Pseudomonas aeruginosa
atgcgcgacaacggcctggcgctgcgcgcacgcggtaacggcctggtcatcgaggccggcgacggcacgatcatcaaggccagcaccttggcccgcgacctgtccaagcccgccctggaaaagcggcttggcacgttcgaggcgtcgcccgagcgccaggccacgccggcacggcgcagctaccagaagggacggccgatgcgcttgcgcggcggcctggacacgaccgagctttacgcccggtacaagggcgcacagcagaacctcacggccgccagggccggcgtgctggccgaggcgaagcgccggaaggatcgggccatcgagaacgccaagaaggcggcggccaccaggcgggcggcgatcaagcacctgaccgatggccggctgaccaagaagctgctttacagccaggccagcgccgcgctgcgggccgacctggaggcgatccacaagcgccacgaccaggagcgggcggcgatctacaacgagtaccgccggcggccgtgggccgactggctcaagcagcaggcgacggccggcgacggccaggcgctcgatgcgctgcgcgcccgcgaggcggcccacggcctcaagggcgacaccatccagggcgacggccccgccaagcccggccatgctccggtgatcgacaacatcacgaagaagggcacgatcatctaccgcgctggcagctctgccgtgcgcgatgacggcgagcgcctggccgtgtccagccaggccgaccgcgctggcgtggcggcggcgttgcgcctggcgatggaacgctacggcgagcgcatcaccgtcagcggcagcgtggagttcaaggccgccgtgatccgggcagccgtggatgcccagctccccatcaccttcgccgatccggcactggaaagccggcggcaggccgaggccaccaaggcccaggccaagcgccggtcaggtgtgccccctgtcggccaggaaccgccgccgcatcgccggaacggcctgcacacgttgggccagctcgacaggctgcacatcgagggcgaggcccggcggccggcgcaagcgccgacccaggccaccccgacgccgccggcggccaaagtgcagcagccggccaggcccgcgccgtccgagcttgaacagcgcgaggcgcggctacgggcgcagatggaagccaagaaggcgaaacgccaggagggcaagaagcgcgggcgatga

SEQ ID NO: 342669 - DNA, 786 bp, Pseudomonas aeruginosa; identical to SEQ ID NO: 209482

SEQ ID NO: 342670 - DNA, 267 bp, Pseudomonas aeruginosa; identical to SEQ ID NO: 209481

SEQ ID NO: 342671 - DNA, 1662 bp, Pseudomonas aeruginosa; identical to SEQ ID NO: 209480

SEQ ID NO: 342672 - DNA, 258 bp, Pseudomonas aeruginosa; identical to SEQ ID NO: 209479

SEQ ID NO: 342673 - DNA, 234 bp, Pseudomonas aeruginosa; identical to SEQ ID NO: 209478

SEQ ID NO: 342674 - DNA, 609 bp, Pseudomonas aeruginosa; identical to SEQ ID NO: 209477

SEQ ID NO: 342675 - DNA, 366 bp, Pseudomonas aeruginosa; identical to SEQ ID NO: 209476

SEQ ID NO: 342676 - DNA, 282 bp, Pseudomonas aeruginosa; identical to SEQ ID NO: 209475

SEQ ID NO: 342677 - DNA, 282 bp, Pseudomonas aeruginosa; identical to SEQ ID NO: 209474

SEQ ID NO: 342678 - DNA, 168 bp, Pseudomonas aeruginosa
atgatttttattaccctcaactgcaatatcgaagtggaatacgtcttcgatggttcccagttttttataaagttctatggccggttggtcttctacgcctttatcggcttggacgtatatgacataagcgccgcgctcggcgcctatcgccttcaatttgtgaattag

SEQ ID NO: 342679 - DNA, 219 bp, Pseudomonas aeruginosa
atggcttggggccacataaaggccttcgatgtagccggtcttgattccttggagttcttccaagtcatgtcttatcgagagttcgacatgcccaacagccgcgccggtagcatcacgtgcgatgagcacttctacaggctcctcaagtccaccagagaagtactgctcaatctccgaggcgtgatcatccgcgagccaaagaagattccgcagcgctag

SEQ ID NO: 342680 - DNA, 792 bp, Pseudomonas aeruginosa
atgagggaagcggtgatcgccgaagtatcgactcaactatcagaggtagttggcgtcatcgagcgccatctcgaaccgacgttgctggccgtacatttgtacggctccgcagtggatggcggcctgaagccacacagtgatattgatttgctggttacggtgaccgtaaggcttgatgaaacaacgcggcgagctttgatcaacgaccttttggaaacgtcggcttcccctggagagagcgagattctccgcgctgtagaagtcaccattgttgtgcacgacgacatcattccgtggcgttatccagctaagcgcgaactgcagtttggagaatggcagcgcaatgacattcttgcaggtatcttcgagccagccacgattgacattgatctggctatcttgctgacaaaagcaagagaacatagcgttgccttggtaggtccagcggcggaggaactctttgatccggttcctgaacaggatctatttgaggcgctaaatgaaaccttaacgctatggaactcgccgcccgactgggctggcgatgagcgaaatgtagtgcttacgttgtcccgcatttggtacagcgcagtaaccggcagaatcgcgccgaaggatgtcgctgccgactgggcaatggagcgcctgccggcccagtatcagcccgtcatacttgaagctagacaggcttatcttggacaagaagaagatcgcttggcctcgcgcgcagatcagttggaagaatttgttcactacgtgaaaggcgagatcaccaaggtagtcggcaaataa

SEQ ID NO: 342681 - DNA, 765 bp, Pseudomonas aeruginosa; identical to SEQ ID NO: 6031

SEQ ID NO: 342682 - DNA, 894 bp, Pseudomonas aeruginosa; identical to SEQ ID NO: 209473

SEQ ID NO: 342683 - DNA, 609 bp, Pseudomonas aeruginosa
atgggaaccttcgaggtcgcagccggggtgcaatcggatgatgaccctgcggccctgttgctctacgcatggaacgctgaggtgtcgggcgcgttcctggccccgctgcatgtgtgtgaggtcgtcgtccgaaacgcggtgtccgatgcgctggaagccctctatgggccgcgctggccgtggtcggcaacattcgagcgcagcttgcccgatcccatgcaaggctacagcccgcgccgtgatctgcaaagcgccagacggtcagcgcagaccacgggcaaggtgatcccggaactgaagttcgttttctggcagaagatgttcacgggccgttacgacacccgcatttgggatcagaatctgcggcgcgtcatgccgaaccttgatccggccaagcctgttgccactctgcggcacgcgatctatggcgatttggagcgcgtgcgtctgctgcggaaccgcatcgcgcaccacgaaccgatctttgcccgagcgttggcagatgactaccagacgatagtggcactggtgacgtaccgctgcgcggttacagccgcgtggctggatagcaaccagactgccacagccatcattgctgccaagccctaa

SEQ ID NO: 342684 - DNA, 633 bp, Pseudomonas aeruginosa; identical to SEQ ID NO: 209471

SEQ ID NO: 342685 - DNA, 330 bp, Pseudomonas aeruginosa; identical to SEQ ID NO: 209470

SEQ ID NO: 342686 - DNA, 255 bp, Pseudomonas aeruginosa
gtgggcggcgtacagggtgcgactgttaccgttgcagagaagggcctggttctggcgcttcggatcggcggagaaaatcgcatccttgggcagtatcggggcggcccccgctacttccgcacgattgacgcggcggcgtcgttgctgatccagcacggcatctaccgcttcgaggcggacgtggccgggtggaagcccaagacgctgacccgcaaaggtggcgagttgctgggtggcaccggcatcgagccgtaa

SEQ ID NO: 342687 - DNA, 1476 bp, Pseudomonas aeruginosa; identical to SEQ ID NO: 209468

SEQ ID NO: 342688 - DNA, 309 bp, Pseudomonas aeruginosa; identical to SEQ ID NO: 209467

SEQ ID NO: 342689 - DNA, 564 bp, Pseudomonas aeruginosa
ttgcaaggtcaacgtatcggctacgtccgggtcagcagcttcgaccaaaacccggagcggcaactggaacaggtcgaagtcggaaaggtattcaccgacaaggcatcgggcaaggacacccagcgcccggaacttgactcgctgctggccttcgtgcgcgaaggagatacggtggtggtgcacagcatggatcgcttggcccgcaacctcgatgacctgcgccgccttgtgcaaaagctgaccaggcgcggtgtgcgcatcgagttcgtcaaagaatgcctgaccttcaccggtgaggattcgccgatggcgaacttgatgttgtcggtcatgggcgcgttcgccgagttcgagcgagcattgatccgcgagcgacagagggaaggcatcgcgctcgccaaacagcgcggagcatacaggggccgcaagaaagcgctttcgcccgaacgcgccgctgaacttctgcaacgcgtcaaggccggcgagcaaaaggcaaagctggcccgtgaatttggcatcagccgcgaaacgttgtaccagtacctgcgcgaaattggagcttaa

SEQ ID NO: 342690 - DNA, 2223 bp, Pseudomonas aeruginosa
gtggggcgcgcacagcgcgcaattcgacctgaccctggacacctacgaatcggaacagggcgtgcacgccgaattcacctatgccaccgacctgttcgaggctgcgaccgtggagcgcctggcacgtcactggcgcaacctgctagaggccgtcgtcgccgagccgcgaagacgcctcggcgacctaccgctgctcgacgccgaggagcgcgccacgctgctgcaacgcagccgtctgccggcgagcgaatatcccgccgggcagggtgtgcatcgcctgttcgaggcccaggccgggctgaccccggacgcgccggccttgctgttcggcgaggaacgcctgagctacgccgaactcaatgcgttggccaaccgcctcgcctggcgtctgcgcgaggagggtgtcggcagcgatgtactggtcggtatcgcgctggagcgcggcgtacccatggtggtggccctgctggcggtgctcaaggccggtggcgcctatgtgccgctggatccgcagtatcccgcggaccgcttgcagtacatgatcgacgacagcggactgcgcctgttgctcagccagcaaagcgtgctggcgcgcctgccgcagtcggatgggctgcaaagcctgctgctcgacgacctggagcgactggtgcacggctacccggcggaaaacccggacctgccggaggcgcccgacagtctctgctacgcgatctacacctccggttccaccggccagccgaaaggcgtgatggtccgccatcgagccttgaccaacttcgtctgcagcatcgcccggcaaccgggcatgctggcgcgggaccgtctgctgtcggtgaccaccttctccttcgatatcttcggcctcgagctatacgtaccgctggcgcgtggcgccagcgtgctgctcgccagccgcgagcaggcccaggatcccgaggccctgctcgatctggtcgagcggcagggcgtcacggtattgcaggcgaccccggcgacctggcggatgctgtgcgacagcgagcgtgtcgacctgctgcgtggctgcaccctgctgtgcggtggcgaggcgctggcggaggacctggcggcgcgtatgcgcggattgtcggcatcgacctggaatctctacgggccgaccgagacgacgatctggtcggcacggttccgcctcggcgaagaggcccggccgttcctcggcgggccgctggaaaacaccgctctgtacatcctcgacagcgaaatgaacccatgtccgcccggcgtcgccggcgaactgctgatcggcggcgacggcctggcgcgtggctaccatcgccgccccggcctgaccgccgaacgcttcctgcccgacccgttcgccgccgacggttcgcgcctgtaccgcaccggcgacctggctcgctaccgcgccgatgggatcatcgaataccttggacggatcgaccatcaggtgaagatccggggattccgcatcgaactcggcgaaatcgagacgcgcctgctggagcaggacagcgtgcgcgaggcggtggtcgtcgcccagccgggggtggccgggccgaccctggtggcctacctggtgcccaccgaggccgcgctggtcggcgccgagtcggcgcgccagcaggaactgcgcagcgcattgaagaacagcctgctggcggttctcccggactacatggtgccggcgcacatgctgttgctggagaacctgccgctgacgccgaacggcaagatcaaccgcaaggcgctgccgctgccggacgcgagcgcggtccgggacgcccatgtcgcgcccgagggcgagctggaacgggccatggcggcgatctggagcgaggtcctgaagctcggccacatcggtcgggacgacaacttcttcgagctgggcggccactcgctgctggtgacccaagtggtttccagggtacgccgccgcctcgacctgcaggtgccgctgcgtaccctgttcgagcacagcaccctgcgcgcctatgcgcaggccgtggcgcagttggcgccggccgcccagggcgggatcgtccgatgcgccagggacgcatcgccgcagctgtcgttcgcccaggaacgccagtggttcatctggcgcctggatccgcacagcgcggcctacaacatcccggtggcgttgcgtctgaagggaccgctgcggcgcgatgccctgcagggtgccctggacctgctggtgcagcgccatga

SEQ ID NO: 342691 - DNA, 330 bp, Pseudomonas aeruginosa; identical to SEQ ID NO: 336172

SEQ ID NO: 342692 - DNA, 426 bp, Pseudomonas aeruginosa
atgaccatcctttacagcgccaacctgaaaatctgtagttatttccttaccgaaagtttccttgcacttttcatcctcattctgtttgcaaccacctatagaggaatcatattcagtaccagccgggcattccgtgccgtaacgagtagcgttatttccacgctgacccgcaagatattccacgcctttagagtcgagcttgtacgcatagacataacagctccagtgagtttcatctatcggcttattcctaacctcaatacgagaataaccagagccatagtcactcttgtaataatcattattcgcctgacacgcagcctcagcgctcttatgcttggcctgcccgtccggataagcaattctccaataaaaatcttcggcgctcacattgccggacaaaagcaaaagagcgacaagcaataa

SEQ ID NO: 342693 - DNA, 177 bp, Pseudomonas aeruginosa; identical to SEQ ID NO: 330351

SEQ ID NO: 342694 - DNA, 309 bp, Pseudomonas aeruginosa
atgcccttcgtctatctcggcctgactcgtgacgccggaacctcgaaaaagactggcaacgcttacgacatttcggtcgttcacttcgctgtcgatgccacgcaatcgacccgctccgatcgcaagtttgccctcggcctggagcctcagaacctgccgatcgcgccggaagccgtgagccaattccagcgcgttgagccgctgtcgtcggtgaacttcgagttcgagccggaccctcggaacatgcagcgcaaccgtatttgcggcgtgaaaccgctgccgaaagctgccactcaggcggcttcgtga

SEQ ID NO: 342695 - DNA, 351 bp, Pseudomonas aeruginosa; identical to SEQ ID NO: 331798

SEQ ID NO: 342696 - DNA, 435 bp, Pseudomonas aeruginosa; identical to SEQ ID NO: 325092

SEQ ID NO: 342697 - DNA, 126 bp, Pseudomonas aeruginosa; identical to SEQ ID NO: 331271

SEQ ID NO: 342698 - DNA, 1101 bp, Pseudomonas aeruginosa
atgacagagcagcaaccgattgccgtgctcggcggcggcagtttcggcaccgccatcgccaacctgctggccgagaacggccaggcggtccgccagtggatgcgcgacccggagcaggccgaggcgatccgcagccgacgcgagaacccgcgctacctgaaaggggtcaaggtgcatcccggggtcgagccggtcaccgacctggagcgcaccctggccgattgccaactgatcttcgtcgccttgccctccagcgccctgcgcaaggtgctgcaaccacaccaggcggcattgacggacaagctgctggtgagcctgaccaagggcatcgaggcgcacaccttcaagctgatgagtgagatcctcgaggaaatcgccccgcaagcccgcatcggggtgatttccggcccgaacctggcgcgcgagatcgcagagcacgagctgaccgccacggtggtcgccagcgaggacgacgagctgtgcgcccgcgtccaggcggccctgcacggccgcaccttccgcgtctacgccagccgcgaccgcttcggagtggaactcggcggtgcgctgaagaacgtctacgcgatcatggccggcctggccgcggcgatggacatgggcgagaacacccgtagcatgctgattacccgcgcgctggcggaaatgacccggttcgccgtcaagctcggtgccaacccgatgacctttctcggcctcgccggcgtcggcgacctgatcgtcacctgttcctcgccgaagagccgcaactaccaggtcggccacgcccttggcgaggggctcagcctggaggaggcggtatcgcgcatgggcgagaccgcggagggtgtgaacactctcaaggtactcaaggaaaagtccgacgagatgcaggtgtacatgccgctggtcgccggtctccatgcgatcctcttcgaaggccgcaccctggcgcaggtcatccagctgctgatgcgcggcgagccgaagaccgacgtcgatttcattcccaccacccgctccactgcatcaatctgcggacttccgcagaagtccaagagagtctgcaagtccttgccacacaaggacttttcctctctttga

SEQ ID NO: 342699 - DNA, 426 bp, Pseudomonas aeruginosa
atgtccgtggtaactgatcgccgcatccccgactcgcccgtagaccagcgcctgccgctgacgcagctgctgctggtgggcttccagcatgtgctgctgatgtacggtggcgccgtcgccgtgcctctgatcgtcggccaggcggccggcctctcgcgcgaggaaatcgccttcctgatcaacgccgacctgctggtcgccggcatcgccaccctggtccagtcgctgggcatcggcccgatgggcatccgcatgccggtgatgatgggcgccagcttcgccgccgtcggcagcatggtggcgatggccgggatgcccggcgtgggcatcaccgggatcttcggcgcgaccatcgccgccggtttcttcggcatgctcatcgccccttcatgtcgcgcatcgtgcgtttcttcccaccgctggtga

SEQ ID NO: 342700 - DNA, 1251 bp, Pseudomonas aeruginosa
atggctcagcgggtttgcatcatcggcgccggcgtggtcggcctggccacggcctacgccctggttcgcgaaggattcgacgtgaccctggtggaagcgcgcgagcggggcgggctggaaaccagctacgccaatggcgggcagttgtcctatcgctacgtggcgccattggccgacagcggcgtgccggcccaggcgctcggctggctgctgcgcaacgatgcgccgttgcgcctgcggccgcgtcttgatccggcgcagtggcgctggctgctgggcttcctcgcggcctgccgcggctcgctgaaccgccgcaatgccgcgcacctgctgcgcctggcattgctcagccagcgcaccctgcaggactggcgcgaggaggatggcctcgatggcttcgactggcggcgcaacggcaagctggtggcgtttcgccaaccggccagctttgcgcgggcccgccagggcctggccgatccttcggcgcaattcgtcctgaccgccgccgagtgcctcgcgctggagccggccctgtccgccgcgcccttcgtcggcggcatccacacgccggacgaggaggtcgccgactgccatgccttctgcgtgcaacttgccgagcgcttgcaggcttccggacattgccggcaactgcatggccgcagggtgacgaagatcgtcgagggcggcgcggcggtgcgtggcgtcgaggtcggcggcgatctcatcgaggccgatcatgtggtgctggccgccggctaccgcagcgccgaattgatgctgccgggcctgcgcctgccgctatacccgctcaagggctatagcctgaccctgccggtcggtgcgcagcaccgcgcgccggataccagcatcaccgattacgaccgcaagatcgtctacgcgcgaatcggcgagcggctgcggatcgccgcgatggtcgacatcgtcggcttcgaccccggcctcgagcccgcgcgcctggcactgctgcgccagcaggcgcgggacacgttcccgcagggcggcgatttcgacgccgccgtcgaatgggccggcatgcgcccggccacgcccaccggggtaccgctggtgggcaacggcggctaccgcaacctctggctcaacctcggccacggcgcgctcggcttcaccctggcctgcggcagcgggcgcctgctggccgagcagatcggccgccgcccgccgagcatcgataccactggcctgctgccgcgcggcgcgctggctggctga

SEQ ID NO: 342701 - DNA, 201 bp, Pseudomonas aeruginosa
atgaaagtaattcgactgcagcaggtgatggaaatgactggtctggggcgctcgacggtttacaaatatgtctccgaaaactggttcccgaagccgatttccttgggagggcggagtgtgggctggctagagagtgaggtcaaagagtggatcctagatcgaattgaagagcgcgacacgcaaagggctgtttcggtttga

SEQ ID NO: 342702 - DNA, 276 bp, Pseudomonas aeruginosa; identical to SEQ ID NO: 121653

SEQ ID NO: 342703 - DNA, 1647 bp, Pseudomonas aeruginosa
atgaccgaaatcaccgtgaatggcatgacctgcacatcctgcgccacccatgtcaaagatgctttggaaaagattcccggcgtgaatgccgctgtggtgtcctatccagaaagccgcgcgcaagtcatggcagacaccgccgtgagccacaaccaactgctggccgccatcgccgcattgggttatcaaggctcgatccgggttggtgatttcaaagatgaaccaaaaatccgtgatgcacttgagggcgccggtttgcatatcgccatcattggcagcggcggggccgcgatggcggcggcgctgaaggccgtcgagcaaggcgcgacggtcacgctgatcgaacgcggcaccatcggcggcacctgcgtcaatatcggctgtgtgccgtccaagatcatgatccgcgctgcccatattgcccatctgcgccgggaaagtccgttcgacggcggtattgcggcaactgtgcctgcgattgaccgcagcaaactgctggcccagcagcaggcccgtgtcgatgaactgcggcacgccaaatacgaaggcatcctggacggcaatccagccatcaccgttttgcacggtgaagcgcgtttcaaggacgaccagagcctggtcgtccgtttgaacgagggtggcgagcgcgaggtaacgttcgaccgctgcctggtcgccaccggtgccagtccggccgtgccgccgattccgggcctgaaagagtcaccctactggacttccaccgaagcgcttgtcagcgacaccattcccgcacgcctggccgtgatcggttcgtcggtggtggcgttggaactggcgcaagcctttgcccggctcggcagccaggtcacgatcctggcacgcagcaccttgttcttccgggaagacccggccatcggcgaggccgtgacagccgctttccgcgccgagggcatcgaggtgctggagcacacgcaagccagccaggtcgcccatgtgaacggcgaattcgtgctgaccaccggacacggtgaattgcgcgctgacaagttgctggttgccaccggtcgggcaccgaatacgcgcagcctcgcgctggacgcggcgggggtcactgtcaatgcgcaaggggccatcgttatcgaccaaggcatgcgcacgagcaacccgaacatctacgcggccggcgactgcaccgaccagccgcagttcgtctacgtggcagcggccgccggcacccgtgccgcgatcaacatgaccggcggcgacgcagccctcaatctgaccgcgatgccggcagtggtgttcaccgacccgcaagtcgccaccgtgggctacagcgaggcggaagcgcaccacgatggcatcgagaccgacagtcgcacgctgacactcgacaacgttccgcgagcgcttgccaacttcgacacacgcggcttcatcaagctggtcatcgaggaaggtagcggacggctcatcggcgtgcaggcggtggccccggaggcgggcgaactgatccagacggcggtgctcgccatccgcaaccgcatgacggtgcaggaactggccgaccagttgttcccctacctgacaatggtcgaggggttgaagcttgcggcgcagaccttcaacaaggacgtgaagcagctttcctgctgcgctggataa

SEQ ID NO: 342704 - DNA, 909 bp, Pseudomonas aeruginosa; identical to SEQ ID NO: 221011

SEQ ID NO: 342705 - DNA, 315 bp, Pseudomonas aeruginosa
atgaaccttggagtacccgcgcaccaagacctcgccggcgtccagtttgttggagagcttctggactatgatcccgacgctgtctgcattttcatatatctcataaaagcccgcgggccgccccctgtagtactctggatcgccatggtggtaggaaagaatgtccagcctctgcaatcctccatcgatgcggagcagagacatgccaaacttgatgaccagctttattcccttatccagaattcgggcgcagacatcttccgggatgcgctgccaggccccttcgtaatcagaatcgaaatgaatgacttctga

SEQ ID NO: 342706 - DNA, 624 bp, Pseudomonas aeruginosa
atggccgcaagtgccttggataatcgaccaatgacgatcatcaagctgtcaggcccacttatctgtcagtttggtcgtgagcatcgccgccagctcgataccggtagcgtccaggaagcatttagtgcgctgcgcaacaccttgccaggcttcaaggaagcgatccttcgcctgcaggggctgggcatgcggttcgccattttccgcaatcgaaggaatgtcggcgaaggtgacttctccactggtggtacccgtgaagtgcggatagtgccgatcatttctggcagcaagcgcgccggcctgatgcagaccatcatcggagtggcaatgatcgccgctgcaacaattgccactggtgggattggagggcttgccgctggaggtgcgtggggggttgtcggggctactggcgtttccctggcccttggcggggtagtccagatgctcagcccccaagccaagggcctgagccagtcagccgccccggagaacctgcccagctacgccttcggcagtgcgaagaacaccaccgccagcggtaaccctgtgccgctctgctatgggtacaggcgctggggcggcgcgatcatcagcgcctcgatctacgccgaagacaagatctga

SEQ ID NO: 342707 - DNA, 351 bp, Pseudomonas aeruginosa
atgaagaagctgattggcttgtccgcactggtggtattggctgcctgttcttcgatgagcgaattgcgggagggagtgccttttcagtcgttcactaccaataaggctcctgaacaaactgcggagtgcatcctgttcgcctggcagaaccagtccttggccggcgtgcgctatgacgtgatgttgcagccggcgccaggtggtgggcgcacagttgtttctcaagggcaaaccgagtttgccgatgtggttccggtctcaaacggttccagggtcagtgtgtacttccagtcaggtatcatggattggaggaaaagcagtcgagttgaggcagcgagaagctgcctgtaa

SEQ ID NO: 342708 - DNA, 327 bp, Pseudomonas aeruginosa
atgcgtgcaggcgcgctccggcaccgcgtgcgcctattggtgctgcaggtggtgccagatggaggaggtggtcattccgaagtatgggttgagactcggagggtatgggtggagatcactctgccgacggggagggttgcgccggttgcgaatcagctgcagccggtgatcaccgccgagatccgggcgcgaccggcggctgacctgatggtcgggcgccggttggtccatggtggcaccacctacatgatcgatgccgttctcctcgacaacaagcgcagcatgctccggctgctgtgttccaacgtttcgccaacgccgaggtga

SEQ ID NO: 342709 - DNA, 231 bp, Pseudomonas aeruginosa
atgaacaacgcacgccgacgccaactgcaacagatcaccgctcaactcgaagagatccgcgagcagatcgaaaccctggctagcgaggaggaggaggccctggacgctatgcccgagagcctgcaagacagcaaccgcggagcgcgcatggaagagatcgtcgaccaactcaacgaagcagccagcggcatcgaggacgcggtagccgtgctcaacgaggccgccgcatga

SEQ ID NO: 342710 - DNA, 225 bp, Pseudomonas aeruginosa
atgcattacctttgcggcaaacagataaagatcggcgatgcagtcttaattgaatccggccaaacaactggaaccgttgaggcaataatcgtcacagccgaagacatgaaccaatggcaagtcaacgagccaggaattctcgttaaagcagacccgtttggccttgtattctggccacagagcgatcccgaccctgtgctattgcagcctacccaacacggataa

SEQ ID NO: 342711 - DNA, 870 bp, Pseudomonas aeruginosa
atgaacgtatttgcgcttatcactaatcccgaagaacctatcgatctgaccgaagacaactactacagacgaactaatagaaaggagccgtacatccagacggttaacggtgagctgaggtcatatgcaatctgcccgtcatgccaaaacccaactgtcatggttaacagaacagcaacggaaacccgtagtggtagtttctatgcgaggcatcataagggtaatgttcgtggtattgctaactataatgagagaaggtatttaacgtgtcgtctcgctaatgcggcaagaatggatcaaaaggtaagacgtccttcgtctcggaaagaagaaagtgatgaggttaaggtggctttggtagaggcgtttgatctagtggtttcgtttatcgagtcagatactggagtcaggttcgtagatcgggttttagaggagatgcttgaagatttcggcaagaacaagggctatgaatattcggcgatcaatttgtacaacctgccctatgcgtttgcttatatgacagagtccaaggatatttatgggtgttctgtaagcaatgaggttgcagaggaaataaacaaattatccgaaggtttttgggctaggtcttactttggcttgcattacataaataggaaggagggtagccgctccaagatacggctactgttcttcggtcatacggagtcgatgaagaatggtgggagagagtctatcgtcatgcgggtcgtggagatacctccaggtgcagaggttgacactgccagagtgctttatgagaaatcgatcatcctcgacagtgccaagttctacaactactacatgaagcgcaaacggcgcgtggaaatggcacggtcaaagctgcgttaa

SEQ ID NO: 342712 - DNA, 477 bp, Pseudomonas aeruginosa; identical to SEQ ID NO: 339550

SEQ ID NO: 342713 - DNA, 669 bp, Pseudomonas aeruginosa
atgtgcatgatgcgccacacgggcaagccgtcctgccgcggccatccgctcagctcgaacgttagggctcacatgaaaacaaaatcgttaacgataatattaaccctactactgactgcctgctctggaatcccatataacgcaaacgaaagccacgccaaaattgcttccgacctaaaaataaaagagcaagacatagagataatcagcaaatgcaatttttacccatttgaatacggcgtaaaagtatatgccaaaatgcgcagctgcttatttataaaagaaagcaacaacctcatatttgtcggctacgacagctccaccaaaaagtacaattcggcattcaaagtcagtcttcaggaagtacattgcgcggcaattgccgatcaagacccaggcaaaggcattgtctatctgtatacggcaaaaaatgcatttacagttgcactgctccatagcaataacgacttaaatcatgaggctgtaaatgatttggaaaaagagctaacaaataaatcaatacctacattcgatctctcaatttcagtgacaaatccgttatacaggtacaaatccagcgcccgcagtgtgtgccccctaacaatgcgctcaacgtcgctcactccgttcgccggacagccaaaagctgcgcttttgtctgcccgttag

SEQ ID NO: 342714 - DNA, 609 bp, Pseudomonas aeruginosa
atgttacgcagcagggcagtcgccctaaaacaaagtcaggcagcacacgaactacccgtgcaaacgaccgacggccctatccagctacggctcatgacggaggaagatattccgatgctccatgagtggctgaatcgcccgcacatcgtggagtggtggggaggcgagcgacccagcctacaggatgtgcgggagaagtaccttcctagggtcctcgcggcagagagcgtcacaccgtacatcggtctgctcaacgggcagccgatcgcctatgcccagtcctacactgtcctcggcagcggagatggatggtgggaagaagagacggatccaggagtccgcggaatcgaccagtccatcgcagactctcggctgctgggtaaaggcataggcacgcgcttggtccgagcgttggtcgaccaactgttcactgacccagccgtcaccaaagtgcagactgatcccgccccgaccaatggccgcgccatccggtgctacgagaaggcgggctttaggcgcgtcaggacgatcgtcacaccagacggaccagcgatctacatgctttgtgagaagcagctcgttccgccgccggccgaaagtgctgcctaa

SEQ ID NO: 342715 - DNA, 543 bp, Pseudomonas aeruginosa
atgcccgtcttcgaagtggtgagcggaggtgaccgccgcagcctgatgaagcgcttcgagcgcaagagcaagcagcaggctatcagcgaactggtggacttccatctgctgaactgcgcccggatcgagaaactggagcgcgccctacagacggttgtcaacgctgccgaccatggatcgtggccgactaccgttatgcacggcatcgaggtggcgcgcaccatgctcgccgccgcgcccggcaaggaagtgccgcaggcatggctcgacgtgcaggcagagcgccgccggcagatcaccgccgagggctggacgccggagcacgacgacctctattgcgccgccgaacttccgcgcgccgcagcggcatacatcctcaacggagccaatgacgaagcgcccggtatctggccgttcgtggcgacgtgccggaagccgagagacgcgcgttccaactacgtgcgtgccggcgccttgatcctggccgagatcgagcgcctggaccgagcagcggcgactcagggagggccaagcgatgcgtag

SEQ ID NO: 342716 - DNA, 471 bp, Pseudomonas aeruginosa
atgcatacccaacacatcattctcgcggccaccacgcttgccgcgctgctgatcctgatcaccaccgcctacctttccgggcgcaaggacagaaagaacgcgcaacagcaggcggtcgacgaggcgctctatctctgccgcgtctcgcattggcagcagcgccacgaagagcaacaagcggaactgaagcgcctggagacggagctggagacaagcatcgcgaccaatcatcggcaggctgagaccgcgaagctcctccgcgagcagaacttggccgccgaagaactggacgccatccgcaccgccagtcgcctcctcagcggccacgctcgacagttccaaaagaccggcaccaccaagcgcaacgcagacgccgaagcccaacagcagctcgccgcgatcctccagcggctcgccattacggagctggccagccagtgcgcagaagctgaagcgcaggaggcggcatga

SEQ ID NO: 342717 - DNA, 360 bp, Pseudomonas aeruginosa
atgaccatgaacactcccagcgccagcaaagtccagccacatctgaatctcggacctcacttcttcaacgccctatcttgggttcggcagaccacgttcccggaggatctggagcgtgatctggttgtcctcggcaccgcacctgccctcgcccaggagattgccgagacctatcgccactcgatgagcagggatatcgtgcgcttctacgaggagtacgcttactcggttagcagtgaggagtggcagcagccgctggcggcctatatctcggcccgcctggccgactacgaccggtatggcaagcacgaattaccgatggccaagtacctgctggcgcaactggacaccccgcaatga

SEQ ID NO: 342718 - DNA, 165 bp, Pseudomonas aeruginosa
atgaaggtagccagcattccgctgacgattattctgtttatgctgttggtaggcgtgtttgcgaaggtaagcaatcacttcggtggttcgcttctgctcgaatggactggcgtaatcgtagcgctcgtggctacgtataaattcgggcgctggttcgtcaactga

SEQ ID NO: 342719 - DNA, 618 bp, Pseudomonas aeruginosa
atggcatccctcgaacgtaccgcctaccctgttttgtcgcgctcctattcgagggccgagcttcagcgtgaattcagcttctccgaggaagaagtcacgtgggtcaaaagtcgctctaatgcagcattccgactgaatctcgctgttctgttcaagacttttcaggtactccgatactttccagaaatcgctgaagtgccggagccagttgtcgatttcatccgcacacaaataggtctacgcagcaaggttgcgctatcaccctacaagtggatgcagctttaccgccatatgagtgccgttcgggaaaaacttggggttcgaccgttctacggctcggatggtcaagacatagcatccacgcatgcacagttgatggctcccctcctcgaacagcgcgctgacattattaatgcgatcattgacgagttgctgcgccaaaactacgagctgcccgcctattcgaccttgaatgacctagcagaagccgctcgtgcagaagcacaagagaaaatcttcaaccttgtggtagccagagctccaatcaaggtgatctataagctaagggatcttctcgacatgaatcgccccgggtttcaaggaggccgattggtttaa

SEQ ID NO: 342720 - DNA, 3201 bp, Pseudomonas aeruginosa
atgcgcctgcaggcttcgctcgccgcgtgcgttgaaggccgcgcctggtcagacgacagcttcgacctcatcagtcaggggcaagcgggccccgcgctgaaggaaacgcttgagcggatgcgagacatccgggcgctcgagggtgagatttctacactcaatccactcacccccgcgacaggatcgctttgggacggactgcagacccaaaccaaagcgctcaacgctgcgctggccttccaacgcgcaagacggtctatcctgcaggaaggacgcctggaggacgagcatgagctcgttgctagcggcgcctgtggagagtggctccaaggtgagctgaaaattctccggcagcgagaagccatcgagcgagaacttagcgacctggcagacctgcgagaactgacctccggtctgtggctgggcctgcatacgaaggaagacacggtctcccgcgtactcaagttccacgccctcctcgccagcgccatctctgcccttgtgcaaacaccagaacatgtcgagggcgtcaaatcagcgttggggcgtttgctaggtgacgccaatgccctgctcgagcccgagggtcagttggcccaggccggcgggcagttgctggagtcgcttgataagtacgtcgcgcatacgcagaagctcgtcgacgccgggcatttcttggccgaggacgcggccgacttcacggagcaggagctgagtcagcagcatgtgcagtgtgagcagatcgtgcaatccggcaatggcctgcacgcctggtgcgcctggaagaaagcatgtgatgaagcatccgctctcggcctgcttccgctggtcgatgcgctgaaagcagggcatgttccgcaaggctctgtgcgcaaggcattcgaaacgaactatgcccgttggtggttgaacacggccgttgatcacgagcctgtcattcgcacattcgtgagcgtcgaacacgagcagcgcattcgagacttccgtgcgctggacgaccgcttcaccgcactgacccgtgatttgctgcgcgcacgcctgtgtgccgagctccccacacaggactcggtgagcaagagctcggaatggggcgtccttcggcacgaaatcacgaagaaaacgcgccaccttcccctgcgcgagctgatgtccaaaatccccgatgccctcaccaagctgacgccgtgcttgctgatgagtccgctctccatcgcccagtacctggcagcgaacgctagcgtcttcgatgtagtgatcttcgacgaagcctcacagattccggtatgggatgcgatcggcgccatcgctcgtggcaagcaggtggtgatggttggcgaccccaaacagctccccccgacctccttcttcgatcgtgccgaatccacccaggatgacgttgatgtcgaggccgacctcgaaagcattctggacgagtgcatcagcgccaacctgccgatccgcaacttgaactggcactaccgtagtcggcacgagagcctgattgcgttctcgaaccagcgctactacgaatccaagttggtgacgttcccctcccccgtcacgaatgatcgtgccgtcagcctgcatgtcattaacggggtgtacgagaaaggctctgcccgcaccaacccggcagaagccaaggcgttggtcgctgacttgatcggccggctgcgcagccctgggttcagggagagcaagctgaccatcggcgtcgtgacattcaacggcgaacagcaaaagctgatcgaggatctgctcgacaccgaacgccggaaagacccggcgctggaaagctacttctcggagagcgagcttgaacccgtcttcgtgaaaaacctggaaagtgttcagggtgacgagcgtgacatcatgtacttctcgatcacctacggccctgatgctgcgggcaacgttgccatgaacttcggcccgctcaatcgcacgggaggtgagcgccggctcaacgtcgccgtcacccgggctcgccatgaacttcgcgtcttcagcacgctgcgagccgagaagatcgacctggcacgcacacaggctttcggcgtccgcgacctcaagcacttcctcgagtttgccgaccgtggcgctcgcgcactagcggcagccgataccggaagcctgggtggatacgacagccccttcgaagaagctgttgcgaatgcacttcgccaaaagggctggcaggtcgtcacgcaagtcggcgtgtcgtcgttccgcatcgacctcgcggttgtcgaccccgatgcgcctgggcgctacctcgccggcgtcgagtgcgacggagcaacctaccaccgcagcgcaacagcccgtgatcgggacaagctgcgcgagcaagtactccgaggtcttggttgggagattctgcgaatctggtcgaccgactggtggatcgacgcactgggcactgcacagaaaacccatgagcaccttgaagccctgttgatcgaaagccgccagaagtgtgctgcgcgtgaagcccaggagcagttggccgcgaatgccgctgagtaccaagctccgctggccgacaatgttgtagagctccttgtcgaccgtccccagctcaaaacgcctgatgagtcagtggaacctaaagtcgaaaccgaggtgctggacatgccgagcgtgcgctacgccgatacgcaggtagacgcagtacgcacctcgacaaccttcccttactaccgagggagcgacccgctgagtgctgtggaaggcgtggatccggatgccttcttcgatgcgcgctatgacactgtcctggcgatgatgatcaagcatgtggtcgacgaggaaggccccgttctcgatacgtcgctcgcccgccgaatcgctcgcgcacatggctggactcgaactggcgcacgcattcgtgatcgtgtcgtcagcgtggccgatcgcgcacaccgcaaggttggagaggacgccgggcacttctattggcccagccgcttagcgaactgcgaagccgtggcgtatcgccgaccggctgacgccgataacacccgtcctgtcgatgagatctgcagcctggaactccttgccttggcacgtgcattggcagaccaaagcctcgtcggcgaagacttgctctacgccatggcacgagagcttgggctgagcaaagtctcggcatcaacccgaaccaggatccaaggaacaatcgatcagctgttctcctga

SEQ ID NO: 342721 - DNA, 1896 bp, Pseudomonas aeruginosa
ttgccgctgatctggaggcacttcaagtcccatcgttcactgctgtttcgcctcagccaccttctccagttggagcccaccacccaggatcgctcacttatccaggcgcttcagctcattcaggacagtgagaatctgcaccgtgaatggatcgatgagcatgtcgacttgtcgtttgcatcagatcgctgggtgaagatcgtgcgtcgccctaccagtgaagggccgcctaccaaccgacgttatctggaggtctgcgtgttctcctacctggccagtgaactgcgctcgggtgatctgtgcgtgcagggatcggaatccttcgccgactaccgtaaacagttgctgccttgggaagagtgtctccagcggctaccggcatactgcgagaaggtgggccttcctaccacagcgaaggagtttgtcgcctcgctcaagagccagttggaggaaaccgcgcaacagttagatgacaagttcccttcctgtcgaggggatgtgtcgatcaacgatgcaggcgagccggtactgcggcgggtgatggcacgggacatcccgccttcagccatctcgctacagacggcgcttatgcagcgtatgccagccaggcacgtgctggacattatggccaacattgagcactggattcagttcacgcggcatttcggaccgatgtccggcaacgagccaaagctcaaagagccggccgagcgctacctgatgacgatcttcgccatgggctgcaatctcggtcccagccaggccgcgcggcatctggccggtaatgtcacaccgcatatgctgtcctataccaatcgccgccacctctcgctggagaaactggacaaggctaatcgcgagttggtggagctctatctgcaacttgacctgcccaagctttggggcgatggcaaagcagtggccgcagacggtacccagttcgacttctatgacgacaacctactggccggctaccacttccgctatcgcaagatgggggccgtggcgtaccgacacgtggccaacaactacattgcagtgttccagcacttcatcccgccaggcatctgggaggcgatctatgtgatagagggactgctcaaagtcagccttagcgtcgagcccgatacggtctactccgacacccagggccagtcggccacagtattcgccttcactcatctcctgggtatcaatctgatgccgcgtatccgcaactggcgcgacctagtgatgtgccgaccggatcgaggcgtatcgtacaagcacataaaccgactgttcaccgacactgccgactggcacctgatcgaaactcactggcaggatctgatgcagattgcgctgtcgatccaggccggcaagatttcctcgcccatgctgctacgtaaacttggctcttacagccggcgcaacaagctctacctcgcagcacagacgctgggcagtgttatccgcacgattttcctgctcaattggattggcagccgagagctgcgccaggaagtcactgcgaacaccaacaagatcgagtcctacaacggcttctccaagtggctctcttttggcggcgatgtaattgccgaaaacgatccggacgagcagcagaaacgtctgcgttacaacgacatggtggcttcgtcggtgattctgcagaacaccgtggacatgatgcgcatcttgcaaaaactagcccgcgaagggtggcagtttaccgatgaggacgtgtcctttcttagcccctacctgaccagtaacgtcaagcgtttcggcgagttcaaccttaagctcaaccgaccgccggagccctggatcaaggattcggtattccaacaggctgccggctcgttgcgagtcaactcgaccagtaaggccgcggccgaggaggcaatatga

SEQ ID NO: 342722 - DNA, 489 bp, Pseudomonas aeruginosa; identical to SEQ ID NO: 336918

SEQ ID NO: 342723 - DNA, 411 bp, Pseudomonas aeruginosa
atgctctggtgtttgaaccagggcagagatggcgccggtgaggtgagcgtggaacttgagtacgcgggagaccgtgtcttccttcgtatgcagccccagccacagaccggaggtcagttctcgcaggtctgtcaggtcgctcagctctcgttcgatggcttctcgttgctggagcattttcagctcgccctggagcgactctccacaggcgccgctagcgacgagctcatgctcgtcctccaggcgtccttcctgctggatagaccgtcttgcgcgttggaaggccagcgcagcgttgagcgctttggtttgggtctgcagtccggcccaaagcgatcctgtcgcgggggggagtggattgagtgtggaaatctcaccctcgagcgcccggacgtctcgcattcgctctag

SEQ ID NO: 342724 - DNA, 234 bp, Pseudomonas aeruginosa
gtgcaggccgttgccggattggacgatttgctcgcactgcacgcgctgctgactcagttcctgttctgtgaaatcggcggcatcctctgccaagacatgcccggcgtcgacgagcttctgcgtatgcgcgacatacttatcaagcgactccagcaactgcccgccggcctgggccaactgaccctcgggctcgagcagggtattggcatcacccagcaagcgccccagtgctga

SEQ ID NO: 342725 - DNA, 222 bp, Pseudomonas aeruginosa
atgccgactacggtagtgccagttcaggttgcggattggcaggttggcactgatgcattcatccaaaatgctttcgaggtcggcctcaacatcaacgtcatcctgggtggattcggcacgatcgaagaaggaggtcgggggaagctgtttggggtctccaaccatcaccacctgcttaccacgagcgatggcgccgatcgcatcccataccggaatctgtga

SEQ ID NO: 342726 - DNA, 921 bp, Pseudomonas aeruginosa
gtgcagatccagctccaaggtgacgctcaggtcgtaggttctcaccagcaccgcgatgtcctggagcttcaccccggaggtgagccgctctgctacgtgttctcccaggtcagccagcccgagggccagcggcaggcagtggatacgcgtgcgcggtgtgccctcggcagagatgctgatcttggggttgcgattggcgttgcaactgatcacctggctggccgcgatcgaaagcatgtggccaaagcggaacgtgtgcggcagggtgtatcgggtggcctctggaaagtcttgttcaaagccccggatgaggtagtcgggttcggcaccacgccaatcatagatggcctggtcttcatccccgacgagcatgaccttggcccggtcgccggcgaggattttcagcagagcgatctggatgccgttcatgtcctgggcttcatcgacgatgaggtgatcaacccggttctgaacgtatcgctgtgtcgcgggttgcctcagcatcagcttgacggggtcgtacagctgatcttcaaaaaacctgaccttcagctgcgcccggtgctcttcatagagacgaaatgcctcgacgtacccttgggttatcgacccgtactggcgtgtttcgaacacctcctcggggctgtgcgtgctcgacttgaccagcagcaagaaggcgatgaatccatcgatcaactccttgtccggcgtgacgttgctgccgttgatcgctttaaacacccgggtgaaagcgtccttggcaatcttcgtccgcagatgatccttgggttctatcctggcttctggaagcagcccgttctggacaagtcgattgacgatcttgttgcccatcgagttgaacgtcctgatttcaggcgcagtaccttggactgcctgctcgaaacgccgccggaacgatag

SEQ ID NO: 342727 - DNA, 234 bp, Pseudomonas aeruginosa; identical to SEQ ID NO: 341258

SEQ ID NO: 342728 - DNA, 1320 bp, Pseudomonas aeruginosa
atgaggctgtcgcgctttcccatctcgactctgctggattcggcctcgggacatctcgaggcccatttgtataagaagcggcttgctgccgagagcggcgaaccgctggctcaacagtattccggcatcattttcagcggcaacccgcatgaaaccgttcctcggcgcctgctgctggataaacgcctcaccccgcttgagcggaactgctggcaagtgttccgcttgctcatcaacgacgacgggctgaccgcgttccctacttacgagcaattacgcccttatctcggcatgcagccgggcaagatcgcctcgcgcgaaaccatcgccaaggcactcacggttcttcgattgacacgctggctcagcctcggccgacgcctgcgcaacgacctcaacgggcaagtacagggcaacgtctacatcctccacgacgaaccggtatccccggcagaagccctggagctggaccccgactacatgcagttgctgagccaatccaccgaccacggcaaccgagccatacgcgaagtaggacaggtcacctggagggaattcagggacgatccggacgttggtcggcgcctgccttcccacctggagaagcttgaggggcgcttgaaccatcagcagtgggctctcgatagtcagctcgaagcggatccagcggcagagttcggcatccgaactctgcccgatttacctcattccaccccgagttcggatgccgaactcagtgaaatcagcggcaagcaatgcgctctaccgctgagttcggatgccgaacccagacagaatccgccgagtacacccttggttcggatgccgaactcatatagtacgtatacatacaaacaagattctgtatgtaaaaagccagtacaaccgcgagcacgcgaggacgcacatccgaactggcaggatctcctgaacggactggaggccgagcaacggatccaagccgtaagcgcgctccgacgggtgtccgaggagctgcgtcgtccggtcatcgagcagtggcggcaccgatgtgcgggaggaactgtcggtaaccccttcggctacctcatgacgctcatccagcgtgcagtccagggcaagttcaacgcctcttgggctccggaagaagcggctgagcgaaccatctccatagcggaacgccgtgctccggcaccaccaagccccacaacgcctacacagcctcagattcagccaaagggagacacccggacagggagcgaggtcctcagccggctcaaggacctcattcggcccaggcacggatcgagcgtgccatccgaacggggtgacgagccatga

SEQ ID NO: 342729 - DNA, 990 bp, Pseudomonas aeruginosa
atgaaaaactcactgtcgagcaagttggttttccctcggggcggagccgacggtgagctgggtgattcggcccgaatcactctgccaaggatcgacctcgtcgccgacggcgaacggggtgatgcggcccgcatcacttcgccaggtcctggcctcggcgccgacggcaagctgggtggttccactggaatcactctgccagggatccacttcggtaccggcggcaagatgggtgtttcgggccgaaacacttcgccaggaaccaacctcggcgccgacggtgagctgggtgttgcggcccgcaacactctgctaggaccaggccacggcgccgacggcaagctgggtggtgcggcccgcaccacttcgccaggaccaggactcggtgccgccggcaagctgggtggttccactggaatcagtctgccagggatccacttcggtaccggcgacaagatgggtgtttcgggccgaaacacttcaccaggaaccaacctcggcgccgacggtgagctgggtgattcggcccgaatcactctgccaaggatcgacctcgtcgccgacggcgaacggggtgttgcggcccgcaccactctgccaggtcctgtcctaggcaccggcggcgaactgggtggttccactggaaccacttcaccaggaactgacttcggcgccggcggcgagtggagtggttccactggaaccacttcaccaggaactgacttcggcgccggcggcgagtggagtggttccactggaaccacttcaccaggaactgacttcggcgccggcggcgagtggagtggttccactggaaccacttcaccaggaactgacttcggcgccggcggcgagctgggtgccttgctccgagtcgccatgggaaattccccagcgacgaaccatgtatttcctactgcgcgctcctaccccgatcagcacgatgtggccgaaccccttccctatataggaacactgcaccatggctga

SEQ ID NO: 342730 - DNA, 891 bp, Pseudomonas aeruginosa; identical to SEQ ID NO: 341259

SEQ ID NO: 342731 - DNA, 126 bp, Pseudomonas aeruginosa; identical to SEQ ID NO: 326417

SEQ ID NO: 342732 - DNA, 738 bp, Pseudomonas aeruginosa; identical to SEQ ID NO: 326415

SEQ ID NO: 342733 - DNA, 4254 bp, Pseudomonas aeruginosa
atgaacaagagctatacgctggtctggaaccaggccacaggctgttggaacgtcgcaagcgaaggtacccgtcggcgcagcaagagcggacgcggcaaggcgctcgtagtcgccggagcgtcactgctcggcctgttctgccaggcccccgccttcgccctgcccagcggcgccacggtcgtttcaggcgatgccggattccagacatccaccgatggccggcatatggtcatcgaccagcagagccacaagctgatcaccaattggaacgagttcagcgtccgtgccgatgagcgggtcagcttccaccagccgggccaggacgccgtcgccctgaaccgggtgatcggccgcaacggcagcgatatccaggggcggatagatgccaacggcaaggtcttcctggtcaatcccaacggcgtggtcttcggcaagtccgcccaggtcaacgtaggcggcctggtggcttccaccctggacctggccgacagggacttcctcgccggcaactaccagttctccggcgactccggcgcaaccgtaagcaatgccggcagcctgcaagccagcgaaggcggcagcatcgccctgctgggcgcccgggtcagcaacgacggcgtgatccaggcgcaactcggcgacgtggccctgggcgcaggccagggcatcaacctcaatttcgacggcgacggcctgctcaacctgcaggtggacaagggctcggtcgacgctctcgcacacaacggcggcctcatccgcgccgatggcggccaggtgctgatgagcgcccgcagcgccgacagcctgctcaagaccgtcgtcaacaaccagggcactctcgaggccaggacgctacgcagcgcggaaggacgcatcgtcctcgacggcggcgaacagggtaccgtgcgggtggccggcaagcaggacgccagcgccatcggcggaggcaatggcggcctggtgctgaaccagggcgcgaacgtcgagatacagcgaaccgcgcaggtggacacccatgccgaccagggcgcaaccggcacctggaggattctctcgcacgaggtcagcgtagccgctgtcggccaggcaaacgctgccggtgatggttccggccaggtccatgtagcgcagggcccagccggggccaatgcgtccgatagcaacggcgtgaccatcgttcagcagcagccggccgtcgacctctccgctggcgccaacggtacctccgcagtgcagagccagagcggcgccaacatcggctcgggcgcaagtggcatcagcgtcgtgcaaagccagaacagccccaatatcggctcgggcgccaatggcatcagcgtcgtgcaaagccagaatggcgccaatatcggcgccggcgcgagtggcatcagcgtcgtgcagagccagaacagccccaatatcggctcgggcgtcaatggcgtgactgtcgtgcagagccagaacggtgccaatatcggttctggcgcaagtggcatcaccgttgtgcaaagccagaatggcgcaaatatcggttcaggcgcgagtggcatcagcgtcgtgcagagccagagcggccccagcatcggctcgggcgtcaatggcgtcacaatcgtgcagagccagagcggttccaacatcggccccggcgtcaacggaatcgatgtcgtccagacccagactctccccaacctgagcccaggcgccaatggctccagcatcgtccaggtccagacgctacccgatatcgccgccgacgccggcaatgtgcatgtcgtgcaggtccagaccggcggtaacaaggtcttcggcaactccaccaccaacgtcaggtcacgtaccgttcaggcccggagcaacgagaatgtcggttccggcctggcgaatccaagcagcgcgggaaaaggcccgacgttgcatgccgataccctggcccgcaacctttccacaagcaacgtcgaagtggtcgccacccggggcaacgcgcatgtcggcgcgccgctgtcctgggacagcggcaacggcctgacgctaaccgccgagcgcggggacctcaggatcaatggcgcgctgacggcccagggggaaaacgccagccttactctcaatgccgggcagcgccctctccgtatcgacgacagcctctctctcactggccagggagcccgggtcgaattcaattcggacaagggttatgccctggccgaaggcacccggatcaccctgtccggcaagaacgcaggattccgcgccaatgggcgggactacagcgtgatccaggacctgcagcagttgcgcggcatcgatagggacctgggcggcagctatgtcctcggcaatcgaatcgcaggcggcaactccagcttcctgtcgataggcaacgccagcgccttcggcggtaccttcgacggcctgggcaacaccatcgataatctcgccgtctacggcaccggcgcctactccggcctgttcagcgtcaaccggggcatcctccgcaacctgaacctggaacgcatttccgccgatggagcacaggccacccactacaacgtccaggtcggtagcctggccgccgtcaacctcggtcgcatcgacaatgtgaacgccagcgacatccgtatcgccgcggcctcgaagctgaacagcctcggcgggctggtcgcactgaacctgggtagtatcgacaacgccagcgccagcggcacgctggtcggcaaccgccacacctatgctctgggcggactcgcagccgaaaacatcagcacagccaggggcgtggccagcatctccaacagccgggccgattttgccatctccggccagttgaaggaccatgccagccactacggcgcggggggcctggtaggcaggaaccgcggcggcctcatccgcagcagcggcagtcagggaacgctgtcgctgagcggtcacggaatgaacctgggaggactggtcggatacagctccgccggcggactggcggacgtatccgcctccgtcgacgtctcaggcaacggacagcacggcctgtacggagggctcatcggcctcaacgtaaacagtggtatcgcccacgccacggccagcggcaaggtccggggcacagacgcggaagcactgggcgggctgatcggccggaacctgaacgcggccatcaacaacgccagcgcccatggcgatgtcagcctgcaagccggtcgctacctgggaggcctgatcggccacaaccaggcaggcaatctggccaacgtcagtgccagcggcaacctgagtggtgggtcgctgctccaggccggcggcctgatcggtctcaacgccaatgcctcgctggtcaatgcctccgccaagggcaatgtcgctacccgcggagcagaagcggttggcggtctgctcggagaaaacctgtacggctccgtcatcaacggctccgccagtggcgaagtcaccgacggcagcggcaaaaccctgggtggcctgatagggtccaacctcggcggcaatcattccaacctgaaggcctccgggtgggtaaacgcaggggcgaacagtgacgtgggagggctgatcggccacaaccggggcggcaaccacagcaccctggcggcatccggcaatgtcaccgggggcaagggcagtcgcgtcggcggactcgtcggctataacgatgccgcctcgctgacgaacgtctcggcttcgggcaacgtcagcgccagtggttccagggccatcggcgggttgatcggcagtgacctgcgaggttcgctgatgctcgccagcagtcatggaatcgtgaacgacaagaccggccacaacctgggagggttggtcggccgcggtgaaaacacctcgatccgctccgccaaggccagcggtgcggtgagcggaggcgccgggatcagggccggcggactggtcggctccctggagggctggcaggctctcatcctgggggcctcgaccggcggcgatgtgacggcgggctacgatagctatattggcgggctggtgggcttcagcaccgccaccatcagcggcgcttccgcttccggcaaggtcggaggctcgggtctgctgggcggcctggtcgcctggaaccaggggaatgtcatgggttcttcggccagcggcaggctggagccacaaatccccaaccagatccatggcggactgatcggcatcaattttggctggcagtcctggaactcggtatacggggctgcggcgaccgttccaatgataggtcgccactacaacctgtga

SEQ ID NO: 342734 - DNA, 1626 bp, Pseudomonas aeruginosa
atgttgtcgtcctgccttgccaatgccgccccggatgcggggcaggcgctgcgtgacgtggaaagccgacgcctgaacctgcccgcgccggtggaactggacgccgagcgccccagccccgaggacggcgtatcacgggctgccgaagagggcggcccgacggtgctggtcaagcgcttccaactcagcggcaacaggcagttcgacgatcgacgcctgctggcgctcctgcacgacctgccgggccaggaactcaatctgagccaattgcacgccgccgccgcccgcatcggcgatttctatcaggaaaagggatatgtgctggcgcgcgccttcctcccggcacaggaaatccaggatggaacggtacgcatcgaagtgctcgagggacgctacggcaggatcgaactgcacaacacgtcccgaacgctggaccgcgttctactccgccccttgagcgcactcgaacgagataccgcggtccagggctcggagctggagcgtgcgcttctgctcctgagcgacattcccggcctccaggccaaaggcaccctgctgccgggccaggcgcagggaaccacggacttgcgcgtcgaggcccgccccggcccgctggtcggcggcaggctggaggcagacaactatggcggccgctacatgggggaatatcgcctgggaaccaccctcgacttcaacagcccgctgcgactgggcgaccaggcgagactgagcctgctgggcagcgaccggcaccaacgctactaccgtgcagcctatcaactgccccttggttcccgaggcacgcgcatcggactggcccacgccgagacgacctatcgactggtacgcgatttctcgcgcctggacgcccatggccgggccattaccgacagtctgttcgtcagccagcccctgctgcgtagccgcagcttaagcctgtccacccagttgcaatatgaaaacaagcgacttcgcgatgaccaggagcgtaccgggaggcatagccgcaaggagatccgcctgtggaccgccagcatcagcggaaacgcccaggaccgcttgttcggcggtggacagagcggcttctcgctggcctatgcccgcggccagctcgccatcgactccggcgaagagcggctgctggaccgctacaccatcggtaccgccggcagcttcgacaagatcatgctcaacgccgtacgcctgcagcacctgggcgaccgcctgcagttgttcgcccaactcaacgcccagtggagcggcggcaacctcgacagcgcggaacagttcgacatgggcggcccctacggcgttcgggcgttccccctgggcagctacaagggctacggcgacgaaggctggcaagccagtgcggagctgcgctacagcctggctccgggctggcagctgagttcgttcgtcgaccagggcgcggtgaaattcctcaagcaccccaacaccacggaaggcaatcgcaaccgcatggccgccgtcggcagcggcgcaacctggtacggaacggatcaccaggtcagcctgaccgccgcctggcccctgagccaggaaaacaacatcgagcccgagcgcactccccggctgtggttgcaagcgacccgctacttctga

SEQ ID NO: 342735 - DNA, 1059 bp, Pseudomonas aeruginosa
atgaccggcaccaagcccacaacgcccgtagcccgctatttccaccaagaggcgcaacggcgcggctatgtgctggacgcagcccagggcaatgccattcttcatctcgatcgattggcggagcgcttgcgtcgaggtccgtcgctattccggcaagcgccgcgcagcctctacctgtgggggccggtcgggcgcggcaagagctggctgatggatggcttctttcgtagcgccgatttgcagggcctgcgccggacgcatttccatgcgttctttcgccggcttcatgacggtatgttccgccgccaggggcggcccgatgccctgggcggtgcgctcgatgaactgctaggagattgccggctgctttgcttcgacgaattccatgtccacgacattggcgacgcgatgctgataacacgcctgttcagggagctgttcggcaggaagatcaccctggtctgcacctccaactacgcgccgcggcaactgctgcccaatccgctctaccacgaacgcttcctgccggcgatccggttgatcgagacgcgcatggaagtgctggaagtagccggcgcccgggactaccggacgatttcgccgcggcaggagatcgcttccggttatgccagcggcgggtattgctggccagcctcatgcgcttgcctggacgagctgggcttgtccgcgcccgaaccctcgcaacgcgtgaccctgcaaagcggcgcgaggacgttgcaggcgcgcgcggtgtgcggcgacctggtgtggttcgccttcgccgacctttgcgaggcgccaaccgcggtgatggactaccttgccctcggcgaacgcttctctacctgggtgctggagggcgtaccgccgatggcgcgctgttcggtcgccgcccagcagcgcttcatcaatctcgtcgacgtcctttacgacaatgaccggcgttttttcctgagtgccgaaaaggcgctgccggacctggtcgagggcagcgacctgcctgcggacatgcagcgtaccgccagtcggctggcgcagttgcgccagcttcgctgttga

SEQ ID NO: 342736 - DNA, 171 bp, Pseudomonas aeruginosa; identical to SEQ ID NO: 320798

SEQ ID NO: 342737 - DNA, 450 bp, Pseudomonas aeruginosa
gtgagcgaagggcgggtgaagtggatcggcgtgcgctccggcagccgcgcgccgatccaggaactggaggcggtggaggcacggcgcggcctgggactgacgggcgaccacccgcacccgccgcgccaggtcaccctggtgcaatgggaacatatcgaggccctcggtaccctgctgggcaggccgctgttgcccaacgagatgcgccgcaacatcgccgtcgccggcatcaacctgctcagcctgaaggaccgtcgcttccgcctcggcggcgcgctgctggaaaccactggctggtaccaaccctgcggacgcctggaaaagcacatcgaccaccgcacactgaagagcgtgcgcgaacagggcggcatcaccgcgcaggtgatcggcagcggagtgatccgcctcgacgatccgctggtgatcgagccccctgtctgtctagaatga

SEQ ID NO: 342738 - DNA, 630 bp, Pseudomonas aeruginosa
atgaacgaagcggattatctgcgcctgctcacccgtcaggccgaacaagccaacgacttcctctccaacgcacgtaaatgggaccgcgagcgctgggtctgccagcgcttcctcgaggccctcaacgtgccctatcgccaggaggatttcgccgcccccggggaacagccgccggacgtcctgttcaagggtgccggcttcgaggtgttcttcgtcctcgatgaaggtcgccggctgaacgaggagtggcgcgaggaactgacccgtcgccgccaggccgtcagcctgcgccaactgatccgccgcgaagagcggccacaacggatcgccgccgccgaactgcaggcacggctggcgccaaccctgcgcaagaaggcgcacaactatagcgagcgcggcatcgaccacggcgaactggacctgctggccttcgtcaacctgaagcgcgcggtgcccgatttcaatacgcccttcccgccgcccaccgaatacctgcgccaaggctggcgctcgctgtcgatggtcggtccgacctttgcccgggtgctcttcgctcactccggcgcccccgaattcctgcgcgccaacctcggccgcagcatcctgttcgacgccggggtaggcctgtga

SEQ ID NO: 342739 - DNA, 426 bp, Pseudomonas aeruginosa
atgcaacttcgcagcgtcatcgccgccgatcacccggcactcttcgcgctatggtcgcgaacgccaggtatccgcctccgtgcggaggacgcctatcccttcttcctcgcctaccttcaacgcaaccccgggctgagcctgctggtcgaaaccgaaggggaggtgatcgcctgcctgatggccgggcatgacggtcgccgtggttacctccagcacctggtggtcgatcccggttatcgagggctggggctggcgcggcagatgctcgacgaggtgttggcgcgtctggcgagggaggggatcggcaaatcccatgtcttcgtcctggatgccgccgaggaggcccaggcattctggcgagcccagtcggactgggagcggcgcaaggacatccaggtattttccactcgggagggacacgcgtga

SEQ ID NO: 342740 - DNA, 471 bp, Pseudomonas aeruginosa
gtgaaacgattgcattgggttctgctgggcatgctgctgcccggcctggcgctggccgtggagaagggctccaccctggagccctggacgttgcaggaccagttcgaaaaggcgcactcgctggacgactccacccgggtcctgctggtggcgcgggacatggacggctcgaagctggtcaaggcggcgctggcggaacgcccaaagggctacctggaggcgcgccacgcgctgttcctggcggacatcagccgcatgccggcgctgatttcccggcttttcgcggtgccggccatgcgtgactacagttatccggtgctgctcgatcgcgacgcggccatcgcttctcgctatgcctcggacgagggcaaggtgctctgggtcaggctggagcagcgccgcgtgttggaaatccgccagttggattcgccggtggccctgcgcatcgccctggaacaactgcagccgtga

SEQ ID NO: 342741 - DNA, 690 bp, Pseudomonas aeruginosa
gtgatcgcggccgagttgctgtcggcggaaagcctggaactgggctgggccatctatgcgccgctgctgctgctcgccgcctggcgcgcgccctgggtcgagctggtcagcgatacccgccgccagcacctggtgttcggcaccatgctcgggctgttcctgctctggctggtgcgccgggacttcgagtcgggactgtccttccatttcatcggcatgaccgccgtcaccttgctgctcgactggccgctggcgatcgtggtggggctggtggcgcaactgggcttgtgcctgctcggccgccaggattggctggcgatcggcgtcaacggcgtgctgctggtggcgatccccgcgctgatcgcggagctggcggcgttgttcgtggaaaagcgccagccgcgcaacctgttcgtctacatcttctgctgcggtttcttcccggcggccctcaccgcggtggtggtcctgctgctcggccttggcgtggtctggatcgacggccttttcccgatgccgccctggctggaggacttcgctggttacctgtggctgattatgttccccgaggccttcatcaacggcacggtgatcaccggcctggtggtctactacccggagtggctggaaaccttcaatcgcacgcgctacctgcaggcgccctggaaggacgaagagcgcaagccctga

SEQ ID NO: 342742 - DNA, 210 bp, Pseudomonas aeruginosa
atgggtgtccatgaatgggcccgagagggcctgcgagagttgctgtcgaagagcgacgaggcggaccgggcaatgcgcctgcgcgcgttgctcagcgcaatcgtcgaactgaaccgggcggagcgcgatgctggcgacctggccagcgaactgcaatttcttgcggagaatctcgacgaccagcgcgactacgctttcatgcgtccctga

SEQ ID NO: 342743 - DNA, 201 bp, Pseudomonas aeruginosa
atgaaccagcccctgaccgtggagtgcccgacctgcggcgcgcccgtcgaatggaaaagcgacaacaagtaccgccccttctgctccgaccgctgcaagctgatcgatctcggcgcctgggccgccgaggaacatgcgatccccggcgacaccctggaagacgacatcttctccgccgacctgccgcctcgcgagcattga

SEQ ID NO: 342744 - DNA, 612 bp, Pseudomonas aeruginosa
atgacccaaccctggatactaggcctcacgggcggtatcggcagcggcaagagcgcagccgccgagcatttcatttccctcggcgtccacctggtggacgccgaccatgccgcccgctgggtggtggagccggggcgtccggccctggcgaagatcgtcgaacgcttcggcgacggcatcctcctgcccgatggccagctcgaccgcgccgccttgcgcgagcggatcttccaggcgccggaggaacggcgctggctggagcaattgctgcacccgctgatcggcgcggagatcgtccagtacctggccagggccgaatcgccctacgccatcctggtctcgccgctgctggtggagtccggccagcgccagatgacccagcgcgtgctggtggtggataccccggaacatctgcaactacagcgcaccatgcttcgcgacaaggtctccgaggagcaggtgcgctcgatcctccaggcccaggcccggcgcgacgagcgcttgaagcacgccgacgacgtgctggtcaacgacggcgacctgtcccacctgcagcgtgaagtcgaacgactgcacgccttctacctgaccttgcgaggaggccgagcatga

SEQ ID NO: 342745 - DNA, 738 bp, Pseudomonas aeruginosa; identical to SEQ ID NO: 327277

SEQ ID NO: 342746 - DNA, 849 bp, Pseudomonas aeruginosa
atgcctaacctcacccttgccgaccttcaaggcgaaatccaggccaacgttcgtaccgccctggcggaagacgtcggcggcggcgaccttaccgctcagttgatcgatccacagcgcgaggccgaggcccgggtgattacccgcgagcacgcgacgatcgcgggccgcgcctgggtcgacgaggtcttccgccaggtcgatccgcgagtgctggtgacctggcaggtggaggacggccagcgagtcgagccgaaccagacgctgttccagctaaaaggcccggcccgcgccctgctcaccggcgagcgcagcgcgctgaacttcctccagctgctttccggtaccgccacccgcagccagcactacgccgacctggtcgccggcaccgcggtgaagctcctcgacacgcgcaagaccctgccaggcctgcgcctcgcgcagaagtacgcggtcacctgcggcggttgccacaaccatcgcatcggcctctacgatgccttcctgatcaaggaaaaccacatcgccgcctgcggcggtatcgaccgggcaatcgccgaagcccggcgcatagcacccggcaagccggtggaagtggaagtggagaacctcgatgaactgcgccaggcgctggaggccggcgccgatatcgtcatgctcgacgaactcagcctggacgacatgcgcaccgccgtcgccctcaccgccggccgtgccaagctggaggcttccggcggaatcaacgagggcaccctgcgcaacatcgccgagaccggcgtcgactacatctccatcggcaccctgaccaaggatgtcagggccgtcgacctgtccatgcgcctcaccctctga

SEQ ID NO: 342747 - DNA, 2256 bp, Pseudomonas aeruginosa
atgcagaacgatgccaatgtggtgcacctgactagggtcgcttccgagccgtcgccgaacgccggagcggggcgcctgccggtcatcctcgtgcaggtgcgcgacaaggcggcgttgcagctgaaacaggcgttgcaggcgttgttcgacaacgccgacgacaccctcttcgaaatggccgaccgagccaccagcaacctcgaacagaacgctttcttcgaagccatgcgcgacctgcgcctcaagcgcaagagtatcgagcgggtctacctgcagaaggtcttcgaggagttctcggcgctcaaccaggtacagtccggcaaatccgtgccgaccctggataccgtgtccttcgacagcctcagcctggtacagaacgaggaactggaggagtccgtcgcggtggacgcgatggtggcgcgggtgatgagccgcgatgccaccgcgctggcccacctgagcacccgcctgaacaccctggtcggccggaaggtcgacgagaagagcaatcccctcgctccgcgtccgctgaccgcggctttcctcgatgcctgccaggggctcggcgtcgagatcaaggtcaagctgatcattctcaagctgttcgagaagtacgtcctggcccattgcgaccagttgtacgccgaggccaaccagatcctggtcgctgcgggcgtgctgccggaactcaaatccgcgctgccgcggcgtcagcccgctgtccgtcccgaagcggtacgcgatgccgggaccctgcaggcacaggctgcgctgctcgacggcggtcagcaggaagtcttcggcgcgctgcaggaactgctggcgcaggtccgcgacaatccttccttctaccgtcgcgaaacgcctgagaatgccgcgccgatttccagcaacgacctgatgcgcctgctttcccacctgcaacagcacttgccgggccctggcgccgcggagttcgacgtccgcgacggggtcgaccaactgctccagcgggtcagccacaagagcggccgttctcgggtggtcggccaggtggacgatgacgtcatcaacctggtgtcgatgctgttcgaattcattctcgatgaccgcaccctgcctgattcgctgaaggccctgatcggtcggatgcagatcccgatgctcaaggtggccctgctcgacaagaccttcttcagccgcggtagccatccggcgcgtcgcctgctcaacgagatcgcatccgcgtcgctgggctgggccgaacacaatgatgcccggcgcgacagcctgtaccagaagatcgaacaggtcgtgatgcggctgttgaacgacttcgtcgacgacccggcgatcttcgccgagttgctggaggacttcattgccttcaccggcgacgagcgccgccgcagcgagctcctcgagcagcgcacccgcgacgccgaggaaggccgcgccaaggccgaactggctcggcaggacgtggagcaggtgctgaaccagcgactgctcggcaaggtcctgccggaggtggtggtgcgcctgctgcgggatgcctggagcaaggtgatgctgctgatctgcctcaagcatggcaaggcttcggccgagtggcgggaggccctggataccatggacgagttgatctggagcgtcggcccgcatgacgatccgctgtcccgccaacagttgctggagcgtgtgcctggcctgctcaaggcgctgcgtgagggattggccagcgcagccttcgatccgttttccaccggagaattcttcagccagctggaaaccctgcatgtccagggtctgcagcgcgacaagcgcggcgaggcggctgtcgcggacagccccctgctcgacgaagcgagcccgggcacggccgcggaaaagccccgggcgccggtcatgctgcgggtggtcgaggaaatcgtcctgacctcgccggacgccgccccggcgcctgtcgagagcgaagtgcgcctgccggacaacgacgaggcactgctgcgggtcgatgcgctgcgtgtcggcagttgggtggagatccaggaggacgccgagcacaagctgcgctgcaagctggcggcagtgatccggcccaccggtcgctacatcttcgtcaatcgcaccgggatgaaggtcctggaaaagacccgcatgggcctggcggtggagtttcgccggcaggcggtacgcctgctggacgatgccttgctgttcgaccgggccctggagtcggtgatcggcaacctgcggcgcctcaagggcgcctag

SEQ ID NO: 342748 - DNA, 567 bp, Pseudomonas aeruginosa
atgcatttcgattccgttaccggctgggtccttggcgtccgccactgcccttcaccgaatttcaacctgcgtccgcaaggggacgcggtgtcgctgctggtcatccacaatatcagcctgccgccgggacagttcggcaccggcaaggtccaggcgttcttccagaatcgcctggacccgaacgaacatccctatttcgaggagatccgccacctgacggtttccgcgcatttcctcatcgaacgcgacggcgccatcacccagttcgtctcctgtcacgaccgcgcctggcatgccggggtttcctgcttcgacggtcgcgaggcgtgcaacgacttctcccttggcatcgaactggaggggaccgacacggaaccgtacacggacgcgcagtacactgccctggccgggctgacgcggctgttgcgcgcggccttcccggcgatcaccccggaacgcatccagggccactgcgatatcgccccggaacgcaagaccgatcccggcgaggctttcgactggtcgcgctaccgcgccggattgacctattccaaggaggaaacatga

SEQ ID NO: 342749 - DNA, 1164 bp, Pseudomonas aeruginosa
atgtccatcaaggtcgaggattatttcgcccctgaaaccttccagcgcatgaaggccttcgccgacaagcaggaaaccccctttgtagtcatcgacaagcagaccatcgccgatgcctacgaccaactgaccgactgcttccccttcgccaggatctactacgcggtgaaggccaatcccgctaccgaaatcaccgagctgctgcgcgacaagggttcgaacttcgatatcgcttcgatctacgaactggacaaggtgatgaagaccggcgtcggtccggagcgcatcagctacggcaacaccatcaagaaatccaaggacatccgctacttctacgagaagggcgtgcgcctgttcgccaccgactccgaagccgacctgcgcaacatcgccaaggccgctcccggcgccaaggtctacgtgcgtatcctcaccgagggctcgactaccgcagactggccgttgtcgcgcaagttcggctgccagaccgacatggccatggacctgctgatcctggcccgccagctgggcctggagccctacggcatttccttccacgtcggttcgcagcagcgcgacatctcggtgtgggacgcggcgatcgccaaggtcaaggtgatcttcgagcgcctgaaggaagaagacggcatcgtcctgaagatgatcaacatgggcggcggcttcccggccaactacatcaccaagaccaacgacctggaaacctatgcggaggagatcatccgcttcctcaaggaggacttcggcgacgacctgccggaaatcatcctcgagccgggccgttcgctgatcgccaatgccggcatcctggtcagcgaagtggtgctggtcgcccgcaagtcgcggaccgccgtggagcgctgggtctatgccgacgtcggcaagttctccggactgatcgaaaccatggacgagtcgatcaagttcccgatctggaccgagaagcagggcgagatggaagaggtggtgatcgccggcccgacctgcgacagcgccgacatcatgtacgagcactacaagtatggcctgccgctgaacctggcgagcggcgaccgcctttactggctgtctaccggcgcctacaccaccagctacagtgcggtggagttcaacggcttcccgccgctgaaggcgttctacctctag

SEQ ID NO: 342750 - DNA, 426 bp, Pseudomonas aeruginosa
atgacaggcaatggtgtttccctggtgaccctcggggtcgccgatctggcccgctcctctctctactaccaggcgctgggctggcagccctcttcggacggcaacgagcaggtggtatttctcaagggccgcaacctggtcctcggcctctacggacgcagcgccctcgccgaggatgcgcaggtggaagatcgtccgaccggcttcgcggctatcaccctggcctgcaactgcgcctcgcgggacgaggtggaccgtctgttctccgcagctacggcggccggcgggcaggcgaccaagatgccgcaggaagtgttctggggtggctactccggatatgtcgccgacccggatggacacctttgggaaattgcctacaacccgttctggccgttcgacgagcagggcaacctggtcttgccctga

SEQ ID NO: 342751 - DNA, 1803 bp, Pseudomonas aeruginosa
gtgtcccccactccaccaagcgttacgcgcaatcgcatcgactgggccggcctgggctggctgttcctgttcttctggttcttctccggcatcacccaactgctcctgctgacctccggcaacagcggtttctccggtttccgcaacgccatggtgctgagcaccatctggcttgcgccggtgttgctgttcccgcgctggaccaagccgctggccgccgtcatcgggctggtgctgtgggccgcctcgctggtcggcctgagctatttcggcatctatcaccaggaattctcgcaaagcgtgatcttcgtgatgttcgagtcgaacaccgccgaggccagcgaatatttcagccagtacttcaacccctggatgaccctcggcctggtgctctacagcctggtcgccatcctcctctggcgccgcctgcgcccggtctacctgccgcgcttcagcgccctgccggtggcggtgctgctgatcgtcgcgaccatcggttatccgttctacaagcaactggtcagccagggccgacccttcgacgaagccctggacaaggtccaggcgcgcatggaaccggcggtgccctggcaattgctgatcggctaccagcaataccgccagcaactgggcagcatgcaggcgctgttgcaaaagaacgcggccctaccgccgctgaagaacctcgtcgatgccaatggcgatacgccacgcacgctggtcctggtgatcggcgaatccacgtcgcgcaagcacatgagcctctacggctatccacgcgaaacgaccccgcagttggacgcactgaaggccgcgaaccggaacctcacggtattcaacaacgtggtggcgtcgcggccatacaccatcgaggtgctgcagcaggtgttgacgttcgctgaccaggagcatcccgaccgcttcctcaccgatccgtcgctgatgaacctgatgaagcaggccggctacaagaccttctggatcaccaaccagcagaccatgaccaagcgcaacaccatgctgacgaccttcgcccagcagaccgatgcgcagttctacctgaacaaccagcgcagccagaacgccagccagctggacggcgcggtgctggcgcccttcgccaaggtgctggacgacccggcgccgaagaaattcatcgtggtccatctgctcggcacccacatgaactacaagtaccgctatcccgccgactacgctcgcttcgtcgaccgccagggcgccccggcggccctcagcgatgaccaggtggaggtctacaacagctacgacaacgccgtgctgtacaacgactacgtggtctccagcctgatcaagggcttcgccaacagcgatccgaacggtttcctggtctacctctcggaccatggcgaggaagtcttcgacgaagccccgcacgaccgtctcggccgcaacgaaggcgacccgacccgcggcatgtacaccgtgcccttcctggtctggacttcgcccagctggcagcagacccatccgcgcgacctgcaggccctggtcgaccgacgctacagcagcgaagacctgatccatacctggtccgacctcgccggcctcaactatgacctcttcgatccgaccaagagcctggtgagcaacgacttccggcatgaagtccgctggatcggcaacccctatgcccacaatggcttgcgcgacttcgacaagctgccgctggacaaggccgacgccgggcagcaggtagcccaggccggacgacccgcgccaacgacaccgcgcgcaccgtcccgccagccgaacgaaggctga

SEQ ID NO: 342752 - DNA, 729 bp, Pseudomonas aeruginosa; identical to SEQ ID NO: 327401

SEQ ID NO: 342753 - DNA, 2301 bp, Pseudomonas aeruginosa
atgtcgcgtcagtccacggataccgccgtttcttcgcaacgtctgctggcttcggccatcggtgtggccatcaccgccatcgccgcaccgcaggcagcgcacgccgacgaggccgggcagaaaaagaccgacaaggaccgcgtactgtcgctggatgcggccaccatcgtcggcgagcagcaggacgaaaccacctacaacgtcgaccgctcggcgtcgaagaagtacaccgcgccgctcttggatacgccgcgctccgtcacggtagtaccaaagcaggtgatcaaggataccgccgccgtgtctctccaggatgcactgcgtaccgttccaggtattacctttggcgcgggcgagggcggcaatcccaccggtgaccggccattcattcgcggcttcgatgcgcaaagcgatacttacgtcgatggtgtacgcgatactggtgcacagacccgcgagatcttcaaccttgagcagatcgaggtcagcaagggccctaactcggcattcggaggacggggctcggccggcggcagcctcaatctcgtcagcaagcaggccaaggctgggaacttcatcgatggaggcttcacctatggttctgaccagactcgccgctacaccctggacctcaaccaggaattcctcgatggcaatgcggcattccggctgaatcttctcaagcacgatgccaatgtcgcgggccgcgatgaagtcgatgtcagtcgctggggcgtagcgccgtcgctcaccttcggtcttggctcgccgacccgagtgaccgtcagccattatcacctggaaagtgacgataccccggattcgggcattccctatgccaagagtagcgatcgcagcaagcacaatccggacaaaccggtgaatgtcgatcgaggcaatttctatgggctgacggggcgcgatttccagaagagccgcatcgataccagtaccatcaccgttgagcatgatctgactgacagcctcactattcgcaatacctcgcgttacggcaacagtcatcaggactatctgtggacacaaccggatgacagccagggcaacatcaacaatggctcggtctggcgccgccagaacaatcgggtaagtaccaccaccacagcagtcaaccagactgacctgtttggagagttctacctgggtggcttcaagaacagcttcagcaccggcctggagttcagccgagaagacagcaagcgcgatgggtataccgtcgataccaataccggcctgggcagcaacaagtgcaatccatcgctgatcggggcgcctagcggctataactgcactagtctggaaaatcccaatccgcacgatccatggaatggcagtattacccggaaatatgcgccgctgaatacggtcggcaccaccaaggcaatatatgcgttcgacaccatcgacctgaacgagcagtggcaggtcaatattggcgcgcgcttcgatagtttcgaaactacggcgaagaaccacggtgtaagacccgctaccaaactcagcgacaagtcgagcttctggaactggcaggcaggcttggtgtggaagcctgtacccaacggcagcatctatgcgtcctacgccacttcggctacgccgccgggtagcatgctcgataatggggatacctcgaatgctgtcgacgggttcgccatcagcaacaaccttgagccggaagaaaccacgaactacgagcttggtaccaagtgggctttcttcaacgagcggctggagctgagtgccgcgatcttccgcaccgacaaggacaatacccgcatcctggtcgccaaccagacctacgacaacgccggacaaacccgcgtcgacggcgtggagttgagcgccagcggcaagctgaccgagaagtggaaggtgttcgcgggctacagctacctggacagcgagttggtcgatgccggtaaggctgggcgtaacggcaatgtgaacgcatcggcggcttccaacaacggcaacgagatgccaaatacgccgaagaacagcttcagtctctggaccacctatgacatcttcccgaagaccaccatcggcggcggggctttctatgtcgacaaggtctatggcgacgttggcaataccgtctatgtccccgattactggcgctatgacgcaatggccagctacaaactgagcaagaacgtcgatttccagttgaacgtgcagaatgtgttcgacaagaagtacttcgacaaagcctatgcggcgcactatgcgtcccaggccgctggaaggacgatactgttcagcaccaacttccacttctga

SEQ ID NO: 342754 - DNA, 2553 bp, Pseudomonas aeruginosa
gtgaagaaagtctggttccagttgcattggttcttcggtatcagcgccggcctggtgctggcgctgatgggcgtcaccggagcgaccctgtcgttccaggacgagctgatgcgcgcgctcaaccctgacgtgctggtggtgcagaagcgctccgagggtgtgctgccgctggacgaactggtgcgccgtatcgaaggtgccgagccggggcggaaagtggccttcgtctgggtcgagatggccagcgacaaggccgggcggatcttctataccccgccgccgggacagcgccgcggcgagtcgcgctggatcgatccctacaccggggctttcgtcggcgagccacgcggcgagggtttcttcaacctgatgatgcaactgcaccggttcctcgccatgggcgagtacggcaagcaggtcaccgccgcctgcaccctgatcctgatcttcttctgcctgtccggtctctacctgcgctggccgcgcaaggttttcgactggcgcgcctggctgaccctcgactggtcgcgcaaggggcgcagtttcaactgggacctgcatgccgtggccggcacctggtgcctggcgctctacctgctggctgcgctgaccggcctgtactggtcctacgagtggtaccgcaacggcctgttcaaactgctcgacgacgcgcccgccggccagcaggcgcagcgcggcaagccgggcggacgtggcgagcgcccggccgatgcggctccactggtggtcgactacgcggcggtatggaacagcatccgccaggccggcggcgaccgcttgcaggcctacaacctgcgcctgccgccggcgggcggccagccggcgacagtgttctatcgcctgaccgacgcgccgcacgagcgtgccttcaacaccttgatcctggacccggccaacggccaggtgaaaagcgaccagcgctatagcgaccgttctttcggcagccagttgctggccagcgtctatgcattgcacgtaggcagctatttcggcatggccggacgcatcctgatgatgctcgccagcctggcgatgccgctgttcttcatcaccggctggctgctctacctcgaccgccggcgcaagaaacgcgcggtacgggcgagccgcgccgacctgggcggcagcgccggcgccagcggcgagccctggttgatcggctacgccagccagagcggttttgccgagcaactggcctggcagagcgccggccagttgcaggcggccgggttgccggtgcgggtcgaatcgctggcgcgcctggatgccgggcaactcgccgaggcgcgcaaggcgctgttcgtggtcagcaccttcggcgacggtgaggcgccggacagcgcccgcggcttcgaacgcaaggtgcttggccaggccgccagcctcgatggcctgagctacgccctgctggccttgggagatcgccagtacgagcagttctgcggcttcgcccggcgcatgcagggctggttgcaggggcagggcgcgcggagcctgttcgccccggtggaggtcgatgatggcgacgccgcggccctgcgccaatggcaggaaagcctggccgaggtgaccggcggtgccgccccggcggcctgggaagcgccggccttcgaggtctggtcgctggcgcggcgggagtgcctgaatcctggcagccagggcgagtcgacctggctgctggacctgcgtgcgccgaccgacagcgccatccaatggcgcgccggcgatctgctggagatcgtcccgcaccaggcgcccgcgcgcatccgcgaatggctgcagcggcataacctggacggccaggcgcgggtggcggtcgagggcgtcgagcagagcctggagcaggccctggctgggcgcttgctgccggactctttcgaacacctggtcggcttgcacccgcaggcgctgctggatgcgctgattccgctttccgtgcgccagtactccatcgcgtcgctgcagagcgatggcgacctgcaactgatcgtacgccaggagcagcatgccgacggtagcctgggcatctgctccggctggctcaccgagtacctgccgctcggcgccgcgctgaccctgcgcctgcgccgcaacgcgggcttccacctgccggaggatgacgtgccgctgatcctcatcggcaacggcaccgggctcgccggcctgcgcagcctgttgcgcgccagcattgccgccgggcgcaagcgcaactggctgctgttcggcgaacgcaatttcgcccacgactactactgtcgtgcggagctggagcaagccctggccaggggtgagctgcaacgcctggacctggccttctcccgcgaccaggcggagaagatctatgtccaggaccgcctgcatgaagcggcggatgaactgcggcgctggattgacgagggtgcggccttgtacgtctgcggcagcctgcagggcatggccggcggtgtcgaccgggtgctgcgcgaagtgctcggtgaggaggccttgcaacgcctggccgacgaaggacgttaccgacgcgacgtgtactga

SEQ ID NO: 342755 - DNA, 900 bp, Pseudomonas aeruginosa
atgaaagttctcatcctggcggcctatgcgctgagcatcctctatgtccatttccgcggccgggtacgccacaagctgtcgcgccaattgagcgaccactccagcttcctcgctccgatcaactgcctgatgtacctgttctcgaaggtaccgaaccgcccttacctggcaccgcaaaccttccccgaactgcaggttctggtcgacaactggcaagccatccgcagcgaggcgctgcacctgcacgacgccggcaacatcaagcgttccgaacagtacgacgatatcggtttcaactcgttcttcaagagcggctggaagcgcttctacctgaaatggtacgacgaggcccatccctccgccggacaactctgcccgcagaccaccgccctgttgcggcagattccctcggtcaaggcggcgatgttcgccgaactgccgccgggctcgaagctggtgcgacaccgcgatccctacgccggctcgctgcgcttccacctgggactgttcacccccaacgacccggcctgcttcatcgaggtggacggcgagcgctaccactggcgcgacggcgaggcggtggtgttcgatgaaaccttcatccactacgcggaaaacgccaccgaacacaaccgcatcattctcttctgcgacatcgagcggccgctgacccagggctgggccaccgccttcaaccgctggttcagccgcaacgtgatggctgccgcggccgccccgaacaacgcaggcgaccggaccggcggactcaatcggatcttcgacagcctctacaagatccgcctgcagggcaaacgtttgaagaagcgcaaccgcaagctctactacctgcagaaatggggcttcttcgccctggtactggctttcatcctgtggatctga

SEQ ID NO: 342756 - DNA, 756 bp, Pseudomonas aeruginosa
atgaacgacaccggccggcgtatcctgctcaactgcgacatgggcgaaagctttggcgcctggcgcatgggcgacgatgtccacagcatgccgctggttgaccaggccaacctggcttgcggcttccacgctggcgacccgctcaccatgctgcgcgcggtggagctggcggtacgccatggcgtgagcatcggcgcgcacccggcctatcccgacctgagcggcttcggccggcgctcgctggcctgctctgccgaagaggtgcatgccatggtgctgtaccagatcggcgcgctggacgctttctgccgttccctcggtacccaggtggcctacgtcaagccgcatggcgcgctgtacaacgacctggtcggcgacgatgagctgctgcgcgccgtgctcgacgcctgcgccgcctatcgcaagggcctgccgctgatggtgctggccctggccgacaacggccgcgagctggaactggccgacgaggccgacgtgccgctgctgttcgaggccttcgccgatcgcgcctacctgccggacggtcggctggcgccgcggcggcttggcggcgcggtgcatcacgatccgcagcggatcatcgaacaggccctggccatcgcccgcggcgaagccttccccgactacgacggcaacccgctgcgcctgaccgccgacagtctttgcgtgcatggcgataacccgcagtcgctggcggtcctccggcgcctgcgcgcggccctggacagcctgtga

SEQ ID NO: 342757 - DNA, 678 bp, Pseudomonas aeruginosa
gtgatccgcatcgaacccgctggtgccgaagccctgctgctgacgctcgccgaagagcccgaagtggacctgtctgtgcgcctggccgagctggccagacgtctgcgcgaggggctcggcgaaggcgtcagggatctggtgccgggctggaccaccctgatgctgcattacgacccctaccgcatcgctccgcaggtactggaagaacgcctgggtccgctgctggcggagtggcatgcctggcgccccgccgagaatgccgggcgcctgcacgagattcccgtctggtacgccggcgaggacctcgcgacggtagcggttgcctgcggattgactggcgaaggggtgatcgaactgcacagcgcggccgaataccgggtcggcgcgatcggtttcgctccgggattcgcctacctcggcggcctcgatccgcgcctggtcctgccgcggcgggccaccccgcgggcgcgcgtaccggccggcagcctggccattgccgaggcgcagacggcgatctatccgcaggcctcgcccggcggctggcacctgctgggacgcagtccgtggcgtcccttcgatccggccgccactcctccgtgcccactggcgctgggcgaccgggtgcgcttcgtcgccatcgggcgcgaggctttcctcgacctgggcgggcgcgaatga

SEQ ID NO: 342758 - DNA, 930 bp, Pseudomonas aeruginosa
atgaatggtttgcgggtcgtcaaggcgggtccgcagagcctgctgcaggacgacggccggcgcggctggcagcacctcggcgtatccccgggcggccctctggaccgccaggcggcagcctgggccaatcgtctgctcggtaatccctgggggacgccattgctggaaatcgctttcggcggcttggtgctggagtgcagggtggaggcgacctggctggcgttgaccggagcgcgcctggcgctgacggtggacggtcgcgaatgcctgccctggagtcgcttccgggtccgccgcgggcaacgcatcgaactgggcttcgccgaggccgggcagcgtgcctacctggcctgcgccggcggtttccgggcgaggccggtactgggcagcgtcgcctgccaggttcgcgacgggctcggcggtttacagggcgatggccggatcctggcggagggcgattgcctgccgtgtgccgaagcgggagcggcgtgtccgtgggatgccagcgtgccctggcgtttccagccggactaccggcagcagcggcccttgcgcgtgctgctcggcggcgatgcggcggccttcgacgcagccagccggcaagccttcttcgccagcgcctggcgaatcagcccgcggtccgatcgcatgggcgtccgcctggccggcgagccactgcgcggggcgccgcgcgcctggtcgcagggcgtggtggagggcgctatccaggttccgcccgatggccaacccatcgtgctgatggccgaccgccagagcatgggcggctatccgctgctgggcttcgtccatccactggacctctcgcgcctggcgcaaagccccgcgcatagcgaggtaaccttcgtcgagagcgacctggcgacgcagcaggccgatctgctgcgcttctaccgcttcttccgcggctga

SEQ ID NO: 342759 - DNA, 474 bp, Pseudomonas aeruginosa; identical to SEQ ID NO: 320825

SEQ ID NO: 342760 - DNA, 633 bp, Pseudomonas aeruginosa
atggacacgagcgctttcctgattgccctggcggtggtttacctggtgcccggaccagacatgctcctgctgttccagaccggcgcccgccagggccgtcgcgcggcgctggtcaccgccctcggcctggccctggctcgggcctgccatgtgctgatggccgcgactggactggcgctgctgttccgtaccgctccctggaccttcgacctggtgcgcctgctcggcgccgcctacctcgcctggcttggcctgcagatgctgcgcggtggcggactggccttgccgaccagcgacgcgggttccgcgccggtggtccctcacgccgaccgccgggccttgctgcgcggactcctgaccaacctgctgaaccccaaggccctgctgttctgttcggtgctgctgccgcagttcgtcagccccgaagccggttcgctggccgtccagttcgccgcgctcggtacggtcctggttctggttggcctggccttcgactgcgcctatgcgctggccggtggccgcctgggccgctggctggcgtcccggccgcgggcacagcgcctgcagcagtggggcttcggtgggttgttgatagggttcggggtaaggctggcgctgctgcgccagctctga

SEQ ID NO: 342761 - DNA, 972 bp, Pseudomonas aeruginosa
atggaaaccgttctgaccgcccgtgatctgacccgtcactacgaagtctcccgcggcctgttcaagggccacgcccaggtgcgcgcgctgaacggcgtatcgttcgaactggaagccggcaagaccctcgccgtggtcggcgagtccggctgcggcaagtcgaccctggcgcgcgccctgaccctgatcgaggaacccacctccggctcgctgaaaatcgccgggcaggaggtcaagggcgccagcaaggaccagcgccggcagttgcgccgcgacgtgcagatggtcttccagaacccctacgcctcgctcaatccgcgacagaagatcggcgaccagttggccgagccgctgctgatcaacaccgcgctgtcgcgcgaggaacgccgcgaaaaggtccagcagatgatgcgccaggtcggcctgcggccggagcactaccagcgctacccgcacatgttctccggcggccagcgccagcgcatcgccctggcccgggcgatgatgctgcaacccaaggtgctggtggcggacgagccgacctcggccctcgacgtgtcgatccaggcccaggtactgaacctgttcatggacctgcagcagcagttccgcaccgcctacgtgttcatctcgcacaacctggcggtggtccgccacgtcgccgacgacgtcctggtgatgtacctcggccgaccggcggagatggggccggcggacaagctctacgagaacccgctgcatccctatacccgcgcgctgctctcggcgaccccggcgatccacccggacccgacgaagccgaagatccgcatccagggcgaactgccgaacccgctgaacccgccggagggttgcgccttccataagcgctgcccctacgccaccgagcgctgccgcagcgaggtgcctgagctgcgcctgctcgaccagcgccaggtggcctgccaccacgccgagcaattcctcggctga

SEQ ID NO: 342762 - DNA, 975 bp, Pseudomonas aeruginosa
atgagcctcctcgatatcaagaacctcagcgtacgcttcggcgacaccaccgccgtgcccgtggtcgacggcctcgacctgagcgtcgacaagggcgaggtgctggccatcgtcggcgagtccggctccggcaagtcggtgaccatgatggccctgatgggcctgatcgacgcccccggctgggtatccgccgatcacctgcgcttcgacggccacgacatgctcaccctcaagggccgccagcgccggcgcatcgtcggcaaggacatggcgatggtcttccaggacccgatgaccgccctcaaccccagctacaccgtcggctaccagatcgaggaggttctccgcctgcatctcggcctgcgcggcaaggccctgcgccagcgcgccctggaactgctcgaacgggtcgagatcccggccgccgccagccgtctcgacgcctacccgcaccagctctccggcggcatgagccagcgcgtggcgatcgccatggccatcgctgccgagcccaagctgttgatcgccgacgagccgaccaccgccctcgacgtgaccatccaggcgcagatcatggagctgctgctgaacctgcagcgcgaccaggacatggcgctgatcctgatcacccacgatctcgccgtggtcgccgagaccgcccagcgcgtctgcgtgatgtacgccggcgaagcggtggagatcggcggcgtgccggcgctgttcgaccgcccgacccatccctacaccgaggcgctgatcaaggcgatccccgagcactgtgccggcgaagcccgcctggccaccctgcccggcatcgttccggggcgctacgaccgcccgcgcggttgcctgctgtcgccacgctgcccctatgcccaggagcattgccgccaggagcggccggccctggaggcacacgagcgcggcgcggtgcgctgcttctatccgttgaacctgctgaacgaggtggcctga

SEQ ID NO: 342763 - DNA, 912 bp, Pseudomonas aeruginosa
atgaacgccatgcacaacgctcccgccagcgacccgagcctggtctacccgtccccgctgaaggaattctggcaggccttcgcgcacaacaagggcgccctcggcggcctgctgttcatgctgctgatcgtgttctgcgcgctgttcgccccctgggtcgccccctacgatccgagcgagcagttccgggacttcctgctgaccccgccatcctggctggaaggcggccaggcgcgcttcctgctcggcaccgacgagctgggccgcgacctgctctcgcggctgatccacggcgcccgcctgtcgctgctgatcggcctgtcctcggtggtgatctcgctgatccccggcatcctcctcggcctgctcgccggcttctcgccgaaccgtgccgggccgctgatcatgcgcctgatggacatcatgctggcgctgccgtcgctgctgctggcggtggccatcgtggcgatcctcggcccgggcctgatcaacaccgtgatcgccatcgccatcgtctcgctgccggcctacgtacgcctgacccgcgccgcggtgatgaccgagctaaaccgcgactacgtcaccgcctcgcgcctggccggcgccggcaccctgcgactgatgttcgtctgcgtgctgccgaactgcatggcgccgctgatcgtccaggccaccctgagcttctcttcggcgatcctcgacgccgccgccctcggcttcctcggcctcggcgtgcaaccgccgacccccgagtggggcaccatgctcgcctccgcccgcgactacatcgagcgcgcctggtgggtggtcagcctgcccggcctgaccatcctgctcagcgtactggcgatcaacctgatgggcgatggcctgcgcgacgccctcgatccgaaactgaagaacgcggcatga

SEQ ID NO: 342764 - DNA, 1011 bp, Pseudomonas aeruginosa
atgcttagtttcattgcacgacgattggggttgctgatccccaccttcttcggcgtgacgctgctcaccttcgcgctgatccgcctgattcccggcgacccggtggaggtgatgatgggcgaacgtcgcgtcgatccgcagatgcatgccgaggccctgcaccgcctgggcctggacaagccgttgtaccagcagtacctggactacgtgggcaacctggcacagggcaatctcggcgaatcgctgaccacccgcgaaggcgtctggcacgaattcctcaccctgttcccggcgaccctggaactgtccctggccgccatgctcttcgccggcaccttcggtctgctggccggggtgatcgccgccctgaaacgcggttcgctgttcgaccacggggtgatgacggtgtccctcgccggctattcgatgccgatcttctggtggggcctgatcctgatcatgctgttctccgtgtcgctgggctggacgccggtgtccggccgtctcgacctgctctacgacatcgagccgaagaccggcttcatgctgatcgacaccctgctttccgacgaacagggctcgttcctcgatgccgtgcgccacctgatcctgccggccatcgtgctgggcaccatcccgctggcggtgattgcccgcatgacccgctcggcgatgctcgaggtgttgcgcgaagactatgtgcgcaccgcccgcgccaagggcctgtcgccggcccgggtggtcttcgtgcacgccctgcgcaacgcgctgattccggtgctgacggtattcggcctgcaggtcggcacgctgctcgccggcgcggtgctgaccgaaaccatcttctcctggccgggcatcggcaagtggctgatcgacgccatcagccgtcgcgactacccggtggtgcagaacggcatcctgctggtcgccaccctggtcatcctggtcaatttcgtcgtggacatcctctacggcctggccaacccgcgcattcgccaccaacgctga

SEQ ID NO: 342765 - DNA, 1596 bp, Pseudomonas aeruginosa
atgctccatccgttgctccgacacctgcccctggccctggcgctatgcgccgccggcgcggcccaggcgaagaacctggtggtctgcaccgaggccagcccggaaggcttcgacatcgtccagtacaccggcgcggtgaccgccgacgcctccgcggaaaccgtgttcaaccgcctgctcgccttccgccccggcaccaccgaggtgatcccggggctggccgagcgctgggacgtcagcgccgacggactgagctataccttccacctgcgccccggcgtgaaattccataccaccgactacttcaagccgacccggagcctgaatgccgatgatgtgctgtggaccttccagcgcgccctcgatccgaagcatccctggcatgcctcggcgctgcgcggctacgcctacttcgacgcgatgggcatgggcgagctgatcaagtcggtggaaaaggtcgacgagctcaccgtgcgcttcgtcctcaaccgtcccgaagcgccgttcctgcgcgatatggcgatgcccttcgcgtccatctattccgccgagtacggcgaccagttgctcgccgccggcaagcagggccagctgaacaaccagccgatcggcaccgggccgttcgtcttcaagcgctacgccaaggacgcccaggtccgctatacggcgaacccggactactacgccggcaagccgccgatcgacaacctggtgttcgccattaccctcgatcccaacgtgcgcatgcagaaggtccgtgccggcgagtgccaggtctcgctgtacccgaaaccggaggacgtgccgcgcctgaagcaggacccgaacctggcggtggacgagatcgatgccctgctgaccacctacattgccatcaacacccagcacaagccgctcgacgacccgcgcgtgcgccaggcgatcaacctcgcgctggacaagaaggccatgctcgacgcggtgttcggccccggcgcggccagtccggcggtcggtccctatcccccgaccctgctcggctacaaccattcgatccaggactggccgcacgatcccgaacgcgccagggcgctgctcaaggaagccggcgcggaaaatctcaggatcaccctgttcattcgcaacggcacctcgcctaccatccccaaccccgccctggcggcacagatgctgcaggcagacctggccaaggccggcatccagctgaccatccgttccctggaatggggcgagctgctcaagcgttcgaaggccggcgagcacgacctgtcgctgcttggctgggccggcgacaacggcgacccggacaacttcctcagcccgaacctgagctgcgccgccgccgagtcgggtgaaaaccaggcgcgctggtgcgacaaggacttcgaggcgctgatgcgcaaggcccgcgaggtgagcgatccggccgagcgggcgaaactgtacgagcaggcccaggtggtattccacgaacaggccccatggataccgctggcctacccgaagctgttcaatgtccggcggaacacggtgcagggctacgtgatcaatccgttgagcaacaacaacttcgccaccacctcggtgaagccgtag

SEQ ID NO: 342766 - DNA, 1452 bp, Pseudomonas aeruginosa
atgagataccaacgagtgaccggcgcgacgctgggactggccttgatggcatcggccgcgccaggctgggcggcggacgagcaggcaaccccgccgaccccggacaatcccagctacgccgcccaggtgcagagcatccccagcgtggagaaaccgatcaagggccaggccggcgccagcgggctgttcgaggggcagagcctgaccctgaccacccgcaacttctactcgcgggaaaacatgaaggacagcttcaccttccgcattcccaaggccggcggcggctcccagcgcatccaccagcgcaacgcctgggtccagggcacggtgctcaagtacagctcgggctacacccagggcagcatcggcttcggcttcgacgtcgcagccttcaacgagatcgccctggagcgcggcaagggccgcatcggcggcggcggcaaccggaccctggcgaacagcgatggcgaggcgatcggcgagtggtccaagctgggcgtcgccaacatccgcctgcgcgcctcgaataccgaattcaaggccggtcgcttcctggtcaacactccagtgttcagctatatcgacaaccgtgccctgccctccagcttcaccggcttcgccgtgaccagcgaggagctggacaacctcagcctgcaggccggcagcttccgcaaggtcagcccgcggaccggttccggcgacgaggacatgaccaccgagtacggcacccgccaggtcaagggcgaccgcctgaactacctgggcggcaactacaagccgctcgacgggctggaaatctccctctatggctcgcatttccaggacgtctggaaccagtactacctgggcgtgacccacgacatcggcgacctcgagaacggcatcgccctgcgcaccgccttcaacggctaccacaccggcgacaccggcgcgcgcgaggccggctacatcgacaacgacacctggagcctggccttcactctcggccatcgcgcccacgccctgaccctggcctaccagcaggtcgacggcaacgaatacttcgactacgtgcacgagacctcggcgatcttcctggccaactcgatgctggccgactacaacagccccaacgagaagtccgcgcagatccgctacgagaccgactggagctactacggggtccccggcctgagcaccggcgtgtggtacgtgaagggctgggacatcgacggcacccactacgacggcgatcgcaacggtgcctacggcaactacgccgaggtgcgcgcccaggacggcgagaagcaccacgagctgggcctgatggcggcctacaaggtgcagaacgggccgatcaaggacagcaccttcaagctcacctacatgatgcacaaggccagccagaaccaggtcgacggcagcgtcaacgaactgcgcctggtcagcaccttccccttcaacctgctgtaa

SEQ ID NO: 342767 - DNA, 1614 bp, Pseudomonas aeruginosa
atgcgtagaaacgccgtcatccgctccgcgatcattccctcgctgctcggcgcagcgctggtcgccgccgttccccaggccttcgccagcaacctgatcttctgctcggaaggcagcccggccggcttcgatcccgcccagtacaccaccggtaccgatttcgacgccgcggcggaaaccgtcttcaaccgcctgacccagttcgagcgcggcggcaccaaggtccttcccggcctcgcggaaagctgggacgtcagcgacgacggcaagacctataccttccacctgcgcaagggcgtgaagttccacagtaccgactacttcaagccgacccgcgaattcaatgccgacgacgtgctgttcaccttcgaacgcatgctcgacaaggatcatccgttccgcaaggcctaccccaccgagtttccctacttcaccgacatgggcctggacaagaacatcgccagggtcgagaagctcgacgagcatacggtgaagttcaccctcaacgaggtcgacgcggccttcatccagaacctggcgatgcccttcccatcgatccagtccgccgaatacgccgcgcaactgctcaagcagggcaaggccagcgacatcaaccagaagccgatcggcaccggcccgttcgtgttcagccgctaccagaaggatgcgcagatccgcttcaagggcaacaaggactactggaaacccgaagacgtgaagatcgacaacctgatcttctcgatcaacaccgacgccgcggtgcgcgcgcagaagctcaaggccggcgagtgccagatcaccctcaacccacgccccgccgatctcaaggccctgcaggaagcggcgaacctgaaggtgccctcgcagccaggcttcaacctcggctacatcgcctacaacgtcacccacaagccgttcgacaagctggaagtacgccaggcgctggacatggcggtgaacaagaaggccatcatcgacgccgtctaccagggcgccggccagttggcgagcaacggcatgccaccgacccagtggtcctacgacgagaccatcaaggacgcgccctacgatccggccaaggccagggagctgctgaagaaggccggcgtcgccgaaggcaccgagatcaccctgtgggccatgccggtacaacgcccctacaaccccaacgccaagctgatggcggaaatgctgcagaacgattgggcgaagatcggtatcaaggcgaagatcgtcacctacgaatggggcgaatacatcaagcgcgccaagagcggcgagcatgacgccatgctgatcggctggagcggcgacaacggcgacccggacaactggctcggcaccctctacggctgcgacgcggtggacggcaacaacttctccaaatggtgcgacgccggctacgacaagctggtcaaggatgccaagcgcaccaccgaccagggcaagcgcaccgagctgtacaagcaggcccagcacatcctcaaggaacaggtgccgatcaccccgatcgcccactccaccgtgtaccagccgatgcgcaagacggtacacgacttcaggatcagtcccttcggcctgaactcgttctacgaggtcagcgtcggcaagtag

SEQ ID NO: 342768 - DNA, 711 bp, Pseudomonas aeruginosa
atgtctgcgatttcccgcctggccgccgccgtcaccctctgcgccgccagcctctcggccgtcgccgaggaagcgccgcgctacaaccaggtctcgctgcacgccgaagtcagccagcaggtggcccacgacctgatgcaggtcaccctctacagcgaaaaccagggcagcgatccggccaagctcgccgccgagaccaccagcgtcctcaacgccgccgtcgccgacgcgcgcaaggtcaagggcgtgaccatcagcctgggcagtcgcaacagctatccggtctacgacgacaagggccagaagatcaccggctggcgcgagcgcgccgagctgcgcctggaaagctccgacttcgccgccctcggccagctttccgccgacctgctgggcaagctgaagatgggcggcatggacttcagcatcgccgatgcgacccgcaagaagaacgaggaccaattgatgaaaggcgccgtggacgcgttcaaggagcgcgcccagttgctcaccgaggcgctcggcggcaagggctacaagctggtcagcctgagcgtgaacagcgccggcgcaccgcgcccgtacccggtgatgcggatggcggcgatgaaggccgacgccagcttcggtggcgcccaggcgccggagatcgaggccgggaccagccaggtcacggtcaacgccgacggtgtgatcgaggtgcagatgccctga

SEQ ID NO: 342769 - DNA, 1269 bp, Pseudomonas aeruginosa
atgcgcgcaccggttttcctgctctccgccagtcgccagaaccttggccgtctgctcctcatccgtattctcgtgctggccgcgcaggccggctcggtgggtttcgcctggctctccgacctgttgccgctgccgtggctggcgctcggcctgacccttggcctgtccgcctgcctgattctgttcaccgcgctgcgcctgcgcgcgccgtggccggtgaccgaccaggagtacgcggtacaactggcctgcgacctgatcatccacagcaccttgctgtattactcgggcggctcgaccaaccccttcgtctcctattacctggtaccgctgaccatcgccgctgcgaccctgccctggatctactccatggtgctctccggcctggccctgaccggctacaccctgctgctgatctggtaccacccgctgcacctgcaggcggttcagcacgaggcgatgctgatcaacctgcacctgttcggcatgtggctgaacttcgccctgtcggcggccttcatcaccttcttcgtggtgaagatgtccgaggcgctgcgctggcaggcgcacatgcaggccgagcggcgcgaggaaagcatgcgcgaccagcagttgctcgcggtggccacccaggcggccggtgccgcgcacgaactgggtacgccgctggcgaccatgagcgtgctgctcaacgagctgcgccaggagcgcccgcaggacccgaccctgcaggaagacctggcattgctccaggaacaggtcaagcagtgcaagcacaccctccagcaactggtacgggcggccgaggccgaccgtcgtcaggcgatcgaggagcaaagcgccgcggaatggctggaatcggtgctgcgccgctggcacctgatgcgtccggaggcttcctaccgctaccagtgcctgggcctcggctccgcgccgcgcctgaccccgccgaccgacctcagccaggctctgctgaacctgctgaacaatgcggcggacgcctgtcccgacgacctcgacatccgcctggactgggacagcagcagtatctgcctgagtatccgcgaccacggcgtcggggtgcccctggcgatcgccgaacagatcggcaaaccgttcttcaccaccaagggcaagggcttcggcctcggcctgtttctcagtcaggccagcgtgacccgcgctggtggaacggtgaagttgtataaccacgaagatggcggcactctgaccgaactgcgcttgccgcgcagctacggaatggcttga

SEQ ID NO: 342770 - DNA, 561 bp, Pseudomonas aeruginosa
atgtctgaagagctgctcttcgaaggggaagaacaaccccatctcctgctggtggacgacgatcccacctttacccgggtcctggcgcgggccatgagccgtcgcggcctgcgggtcagcaccgccggctccgccgaggaaggcctggcgctggcccagcaggacacgccggactatgccgtgctcgacctgaagatggaaggcgactccggcctggtgctgctgccgaagctgctggagctgcacgcggacatgcgggtggtgatcctcaccggctattccagcatcgccaccgcggtggaggcgatcaagcgcggcgcctgcaactacctgtgcaagccggcggatgccgatgacgtgttggccgcgctgctctccgagcacgccgacctggacaccctggtgccggaaaacccgatgtcggtggatcgcctgcaatgggagcacatccagcgcgtgctcgccgagcacgagggcaacatctccgccaccgcccgcgccctgggcatgcatcgacggaccttgcagcgcaagctgcagaagcggccggtacggcgctga

SEQ ID NO: 342771 - DNA, 810 bp, Pseudomonas aeruginosa
atgcgtatcttcggttcgagtgccggctgcctgtcggtgctgttcggactggccttcgggctgcctgcactagccgagccttcggtggacctggatggtccgacggcaggctggcgctattccggcctgctcgagcagcccgatgccccgcgtgtcgcctatccgactccgcccatcgatcgcggcggccagcgcggccgcagcctgatcgaaggacacctgcgcgaactggtcggcaccgagcgcgcccagcgcctggtggtcaacggcaatcctctccctctctataccgacggcgccgggcgcttcgtccgcccctatgcgttcggccacggctccaacggcgtccaggtcggcagcgccgacggcaagatcctcaagcgcgtacagttctacgaggccaatcgctcccaactgccgccgcgcgtgcgcgtggtgctgggttgggacgatccgaaggccgagcttgacctgcatatcgtcacccccgatggccagcacgcctactgggcgcatccgcgcctgagcaacagcggcggcctcgatccggacggcgtcgacgggcccggcccggagatgttcaccatgggcgcgccgctgcacggcacctacctgatctacgtgaactactggggcaacctcaacaaccagggctacaacttccaggccggcagcaacgtacaggacgtgatcaccgcgcaggtcaacctggtgttcaacgaaaacagcgtcgacgagaagcacgagaccttcgtcgtgcccctgcgcaccatcggcgacctggtgctggtcaagacctttacctactga

SEQ ID NO: 342772 - DNA, 1770 bp, Pseudomonas aeruginosa
atgagcgagaacaacacccccagccctgccaacggaacccctgcgcccgccgctgcgcgcacccgaagcgccctgtggccggtgctggggatcgtcgccgcgctggccgccggcggtgtgctggcctggcagatgggctggctggagcggctcggcggagggcgcccggccgaagaggacctcggccagccgatcggcgcccaggcacccgcggacgccgacgcgccgcgtgcctaccgtgacctgcgcaagcccgacgcgctgatcgagagcgtgtcgctgagccgcctgccgaaggaaatcctcgaggtgccgttgctgcgcgataccctgaccgaggacttcgtcttctattacgagaacaatggcgaccgcctcggcctgaccggtacgttgcggcggatcatctacgagcacgacctgaccctgaaggacagcctggtcgaggaactgctcgaccaaccggcccaggtcgccctctggcgcggtgccgacggccgcctgcgcgacttcgtggtggtgctcaagcgcggcggcctggcgcgggtgctcgagccgctggcccatatcgccgccgacgaccagcagttgcgcaaggtcggcgagctggcgggaacctcggtctatcgcctgcgctacggcaacgacaaggcgatgctgttcctgtccaagggcgaccggctgttgttgctgtcgaacccacggatgctcttcgacgatggtggcgaaagcgacgacagcccgctgaacgctccggccagcgaagacctggaggcactgctcgacggcgacgaactgttccccgagcgcttcggcctgccgggccgcggcgagctgcgccagcgcatcaccctcaatgccagcgtcctggccatgggctaccagcgcttcatcccgagcttcgccggggtgcgcttcgagaagggcgagcagggctggagcagctacctggcgctgaacgaggtggaacgccagccgccgctggacttcgccccggtctggcaggccatgccgatgggcgccagcgcctgcgtggcgctgccggtcacccctggcctgtacggggtgatgctggagcgtctgggggccgagcagaagatggcccaggccttctccgagcatctcagcggcgctgccggtctctgctggtacgccagttcgcggctgcattcgccgctgctggtgggccagttgagcgcgccggccagtgccgaactcgacgacgagctgggcaagctgttcggtcgcgtgatcggcgcgaaggaagccaaggtcgagggtggcagcttcccggtggaagaccgggtggatggccagacccgccgctggacccgccaggtcagctcgaacttcggcgcctatccggccagccaggcggacaacccggagagcatcagcggccgcgcgttcttccgcatcggcatggcgcgccatggccagaccctgctgttctccctcgacgaccagttgctcggcaaggccctggacaccctcgacaaacgctatccgccgctcgccgaggtgttgccgaaggatgcgctggtaccggcctacctggcgccgcagccgctctccgaactgctgcaacgggaaaccctcgacagcctgccgcaggacatggagccggtattccgcaatgccgccgacacctacctgatgccgcgcctgaaaaccctcgccggcaagggcagctacgccctcgggctgcctgccggaagccaggccaacgcaccgtggcaatggctgccgctggaatggcggtcgctgtga

SEQ ID NO: 342773 - DNA, 651 bp, Pseudomonas aeruginosa
atggcggtcgctgtgagacgcctgactgccatcggcctggcgctgctcctgctggccagcggcgttgcccgcggcgagcccgcggtaacgctcgacccgcagcaatcgcaggtattccgctcctggttcgtgcgcatcgcccaggaacagttgcgccaagggccgagtccgcgctggcaccagcaggactgcgccggcctggtgcgcttcgccgccaacgaggcgctgaaagtccacgatggcaagtggctgcgcgccaacggcctgtccaaccgctacctgcccccggagctggcgctcagtcccgagcaacggcgcctggcgcagaactggcagcagggtggcggccaggtcgggccctacgtgaatgcgatcaagctggtgcagttcaacagccggctggtcggtcgcgacctcaaccaggcgcgccccggcgacctgatgttctacgaccagggcgacgaccagcacctgatgatctggatgggccgctccatcgcctatcacaccggcagcagcaccccgaccgataacggcatgcgctcggtcagcctgcaacaactcatgacatggaaggacacccgatggatccccgacgaatccaatcccaactttatcggcatctatcggctggctttcctctctcaatga

SEQ ID NO: 342774 - DNA, 4581 bp, Pseudomonas aeruginosa
atgaatcgcgtcccagtgaagaccacagcaatgagcaacctgcgccgtttcagccgtagcctggcggtcgccgccctggtcctgctgccgttcgccgccgtccaggcggaagacacggtggaaccgagcggctacacgccgatggccggcgaatccttcttcctgctcgccgacagcagcttcgccaccgacgaggaagcgcgggtccgtctcgaagcgcccggccgcgactaccggcgctaccgcatggagccctatggcggggtcgacgtgcgcctgtaccggatcgaacagccgctggagttcctcaagcggcagaagaacctgcaccgggtcctggccgagggacagttcaagggcgaaggcctgtcgaacaccctggcctatctctgggacaactggtatcgcaagtcgcgccgggtgatgcagcgcgccttctcctacgagtcgcggcaacaggtcaccgaggcggtgcccgagctgaagatgggcaacgccatgaccgcgccgacgccctacgacgcgcagccgcaatacgcgccgattcccggcctgccgctggtcagccagttccgctatccgctgtgggacgccaagcccatcgagccgccgcaggacgtaaagctggccggttcctccagcgagttcatcaacgtcgtgccgggcaatgtctacatcccgctgggcaagctgaagccgggcctgtacctggtcgaggcgcttgtcggcaagtaccgcgccaccaccgtggtgttcgtctccaacagcgtggcggtgagcaaggtcgccggcgacgagctgctggtctggaccgcacgcaagcacgaaggcaccccggtgcccgacaccaaggtgctgtggaccgacggcctgggcgtgatgagcagcggcaataccgacgccgacggcctgctgcggctcaagcacgccagtccggagcgctcctacgtgatcggcgaggaccgcgagggcggggtcttcgtctccgagaacttctattacgacagcgagatctacgacaccaagatctacgccttcaccgaccgcccgctgtaccggccgggcgactgggtctcgttgaagatggtcggccgcgagttcaaggacgcccggcaatcccaggccgccgccagcgcgccggtgcgcctgagcgtgatcgacgccagcggcacggtattgcaaagcctggacctccgcttcgacgcgaagagcggcgccaatggccgcttccaactgccggagaacgccgtcgccggcggctacgagttgcgcttcgactaccgcgggcagacctacagcagcgccttccgcgtcgccgaatacatcaagccgcacttcgaagtcgccctcgacctggccaagccggacttcaagaccgccgagccggtgaagggcgagatcgtcctgctctatccggacggcaagccggtggccaacgcgcgcctgcaactgagcctgcgcgcccagcagttgtcgatggtggacaacgaactgcagtatctcggccagttcccggtggaactgagcagcaccgaactgaccaccgacggcaagggccgcgccgccatcgaattgccgccggccgagaaacccagtcgctacatgctgaccatcttcgccagcgacggcgccgcctaccgggtcaagaccagcaaggagatcctcatcgagcgcggcgccgcgcgctaccgcctgagcgcgccgcagcgcttcagcgccgccggcgagaaggtcgagttcagctatgccagcgaacagccgaccccgctcaagccgagcagctaccagtggatccgcctggaggaccgcgccaccgatagcggtccggtcgccgacggccgcttcgcgctgaccttcgagcgccccggtacctattccgtggagctgcgcgacgacaagggccagctccttggcgccaccggccactcggtgagcggcgagggcgtgaagtcggtgccgggcaccgtcgaggtggtgttcgacaagcccgagtaccgcaccggcgaggaagcctccgcactgatcaccttccccgagccggtggaggatgcgctgttgtccctggagcgcgacaaggtcgaggccaccgccctgctgtccaagggcgccgactggctgcgcctggaaaagctcaatccgacccagtaccgcgtgtggatcccggtgcgcgaggagttctcgccgaacctgaccttctcggtgctctacaccaagggcggcgactacagcttccagaacgccgggatcaaggtcggcatgccccaggtagagatcgacatcgccaccgacaaggagcgctacgaaccgggcgagacggtgaccgtgaccctggccacgcgcttcgccggcaaaccggtttccagccacctgaccgtcagcgtggtggatgagatggtctatgccctgcaggcggagatcgcccccggcatcgaccagttcttctaccatccgcggcgcaacaacgtgcgcaccagcgccagcctggccttcatcagctacgacgtggcgttgcccggcagcaccagcgcacccggacgggcgaaccgcagcgggcgcggcgtcaaggtactggagcggccgcgccgcgaggacgtcgacaccgccgcctggcagccggagctggtcaccgacgcccagggcaaggccagcttcagcttccgcatgcccgactcgctgacccgctggcggatcaccgcgcgggccatcgacgacaacggccaggtcggccagaagaagcagttccttcgctcggagaagccgctgtacctgaagtggagcgggccgactcgcttccgccagggtgaccagcccgacctcggcctgttcgtcttcaaccaaggcgaacagccggtcaaggccgagctgctcagcgggccgcctggcagccagcgcagccagaccctggagctggccaagggagtcaactacattccgctggcgcaacagccgctcagcgatggcgactggagcgccgagctgcgccaggacgggcaggtccgcgaccgcctggcggtgcgcttcaacctgctggccgacggctggcaggtggagcaggtgcagaacctcagcctggcggcggcgagcaacccgctgcaactgccggcggacgcgcgcgacgtacgcctgcgcctggccgatggcccggccgctgcctacctgggcaatctcgatgatctgctggagtatccctacggcggcgtcgagcagaccgccagccaactgctgccgctgagcatcgcctatccggcgctggccggcggcgagccgcggattcgcgaccgcctgcgcctgatcatgcagaacagtcgcctgcgcctggtgcagatggccggcccggacgcctggttcgcctggtggggtggcgacgtcgatggcgacgctttcctcaccgcctacgcctactacgccgactggtacgccagccgcgcactggagatccaactgccggccgaacactggcagcgcatcctcgagccctacgccaagcaggcgacgcagaccccgctgctgcagcgtgcgctgatcctggctttcgcccgcgacatgcagttgccggtgaacaccctgctcggcggcctgctcaacgatctggccaacgccggcgaagggcaggcgcgcgcggagccgctggaggccgacgacggcctggtgctgggcgacccggactcggccgtcggcctggccgcggcgcgagtactggcggtggacctggcacggcaactgcgggtcgcggtgcccgctccgctggccgcccaggccgagacggcgacgcagcgcctgcgtgaggccggcttgccgttcaccgatgccttgctggcctctcactcggccgtggatggccagcaggccagcgctttgctgcaacgcctggcgccggcgcaatcgaccctggaacgcgccctggccctgacctggctgcagggcgccctggcccaggcgccgcagggcaagctgccgcagccgccgaaggactggcaggcgcagcgcggcgccagcggcgaaacctactggcaatggcgcggccgcggcattccgagctgggtcgacctggacgaggcgccggcccggccgttgccggttgcgctcagctaccgcagcgcccaggcgccgagcgggcaactgccggtgcagatcagccgtcgtctgctgcgcctggtgcccggtgagggggcgttcgagttcaaggtcgaggaggttggcgacaagccgctttccagcgacgaactgtatctcgacgaagtgaccctgaacgttccggaagacaccgctctacgctacggcatgctggaactgccgctgccgcccggcgcggatgtcgagcgcaccacctggggcatcaagatcagcggcctggccggcgacgaagcgaccaccctggagcgcgcgcgcaacgaaccgggcgagttgttctacggggtgccggtggacagcctgagtggcgagcagcgtttccgtcacctggtgcgtttctcccagaaaggcagcttcaacctgccaccggcccgctacctgcgtctctacgcgccggaacagcaggccctggaagccaagccggcgctggccaaggtcaaggtcgagtga

SEQ ID NO: 342775 - DNA, 1650 bp, Pseudomonas aeruginosa
gtgattgcgttgcgcgcctggctggtcctgctgtgcgccgtgccgttgctgcttcgcgcagcggaggcgccggtccagctggcctggcgcacgacccagggctacgaactggtgagcctggatcgccagcgggtactcgagcgccggccgttgccggccgatttgcaggctccgctgggcagcctgtggaaactgttcgtcttcgcctggctgagcgacaccggccaggccgagccgccctatacctgccaggggcgcagccgcgaggaggtctactgctgcgagaatggccagacgatcggtcgtgaccgcgccctggtgcgctcctgcgggctgtatttcgagccgcagcgcctcgccttgcggccggaggcctggcgcggctactggcaggcgcgccaggcaccggcctggttgctcgatctggaacggctgcaaccgcagacgcgggtgccggttaaggagcttctggagcagttgcagcaactgccggcccagggcgaggcgcggcgggtactgctcgacgtggcgttgcaggccggcgacggccatgccgtggccagccttggcggccgcctgcgggtgaagacctggagctggctcgacgaccatgacccgcaggcgcgccagggcggtttcgctggctggctggtcgatggaacgccgctctggctcggcggcccgggaaccagcaagatgattctggaccgctacgccgaggtgctcgggcgcttcctgccgagtccgtggccggccgatccgggccgttgcgtggaagtgaacctgttcagccgctatccgctgcgctcggtcagcgatccctccggccacccggccgccgaaggcctgctgcatggtccgcagcaagtgctcttcgccaacggcaatcgactggacatcgccagcgccggcgacctcttcctgcaacgggtggatggcgtgccgcgcctggtcgcgcgggtttcgcgcgaagagtacgtggcgcgggtgctggagcgcgaagcctcggcgcagccgaaggaagccgctcgcgcgctggcggtgaccattcgcacctatctattgcaaaacgccgcgccgcgcggcgaatgcctggccatcgatgacagcagccagcgccagcgcgtggcgccgcgcccggccagcgcgccgacgcggcggatcgctgcctggagcgccgacctggtgctggccggggcgaccgtcaactatcactccgaccagcctggtccggcgcgcctgtcctggaagcacgcggtggagcaagccgggcagggactgggctacgacagcatcctcgcccaggctttcccgcgcagcagcctgagccgctgggacaacccggtggccgcctgccagccgttgccggctgccgaagactggctgcgcaagcagcgccggcagtggcgcgagcgtctcgaccgagagcccggctacgaggagattccgagtttttccgtgtgccgcctggcttccgggcggccctatgtcgatcgcgagcgcgaacgcatcttcgtccgcggcctgtattccctacaggaacgcttggacctcacccacgaatacctgcacctggccttccgcgcccatcccagcggccaggacgaaaactatgtcgaaagcctggcccggcgcctgctactggaatga

SEQ ID NO: 342776 - DNA, 834 bp, Pseudomonas aeruginosa; identical to SEQ ID NO: 320846

SEQ ID NO: 342777 - DNA, 387 bp, Pseudomonas aeruginosa
atgagcgaacaaggcaagaccggcctggagatccgacgtgaagtcatgggcgacgccttcgtcgagcgcgccatgggcaacgccaccgccttcacccagccattgcaggacttcgtcaacgagcatgcctggggctcggtctgggcccgcgaggcgctgccgcgcaagacccgcagcctgatcaccctggccgccctgaccgccctgaagtgcccgcaggaactcaaggggcacgtgcgcggtgcgctgaacaacggctgcacggtggaggaaatccgcgaggcactgctgcactgcgcggtctatgccggggtgccggcggcgatcgatgcgttccgtgcggcgcaggaagcgatcgatacctggcagggcgaacagcccgcctga

SEQ ID NO: 342778 - DNA, 378 bp, Pseudomonas aeruginosa
atgcccaccccatccgccgccgcgcgcctcgccctcgccgccctgcccctgttcctcgccggctgctccagcctcgccggcagcggttccgcggataccggcgaagcctcctactatggcagccgccacgcaggcctgcgtaccgctagcggcgagcgctacaaccccaacgcaatgaccgctgcccaccgcacgttgccgttcggtacccgcgtgcgggtaaccaacctcgacaaccgccgcagcgtggtggtgcggatcaacgatcgcgggccgttccgccgcgggcggatcatcgatgtatcgcgcaaggccgccgaaggcctgggtatgatccgcagcggcgtggcgccggttcggatagagtcgctggattga

SEQ ID NO: 342779 - DNA, 1446 bp, Pseudomonas aeruginosa
atgcaatgggaaaccgtgatcgggctggaaatccacgcacagctcgccacccaatcgaagatcttctccggcagctcgaccgccttcggcgccgcgccgaatacccaagccagcctggtcgacctggccatgccgggcaccctgccggtgctcaacgaggaggccgtacgcatggcctgcctgttcggcctggcgatcgacgcacggatcgaccggcagaacgtgttcgcccgcaagaactacttctaccccgacctgccgaagggctaccagaccagccagatggaccatcccatcgtcggcaagggccatctcgacatcaccctggaagacggcaccaccaagcgcatcggcatcacccgcgcgcacctggaggaggacgccggcaagagcctgcacgaagacttccagggcatgagcggcatcgacctgaaccgcgccggcacgccgttgctggagatcgtttccgagccggacatccgcagcgccaaggaagccgtggcctacgtcaaggcgatccacgccctggtgcgctacctgggcatctgcgacggcaacatggccgagggctcgctgcgctgcgactgcaacgtctcggtacgaccgaagggccaggccgaattcggcacccgcgccgagatcaagaacgtcaactccttccgcttcatcgagaaggcgatcaaccacgagatccagcgccagatcgagctgatcgaggacggcggcaaggtagtccaggaaacccgcctgtacgacccgaacaaggacgagacccgctccatgcgcggcaaggaagaagccaacgactaccgttacttcccctgtcccgacctgctgccggtggtcatcgagcccgagtacctggcgaagctgcgcgagcaactgccggaactgccggtgcagaagcgcgaacgcttcgagagccagtacggcctgtccgcctacgatgccagcgtgctgtccgccagccgcgagatggccgactacttcgagaaggtccagggcatctgcggcgacgccaagctggcggccaactgggtgatggtcgagctgggcagcctgctcaacaaggacggcctggagatcgagcagtccccggtgtccgccgagcaactgggcggcatgatcctgcgcatcaaggacaacaccatctccggcaagctcgccaagatggtcttcgaagccatggccaacggcgagggttccgccgaccagatcatcgaggccaagggcctgaagcaggtcaccgacagtggcgccatcgagaagatgctcgacgaggtgctggcggccaacgccgagcaggtcgagcagtaccgcgccgccgacgaggccaagcgcggcaagatgttcggcttcttcgtcggccaggcgatgaaggcctcgaaaggcaaggccaacccgcagcaggtgaacgagttgctgaagaaaaagctcgaagcgtga

SEQ ID NO: 342780 - DNA, 1455 bp, Pseudomonas aeruginosa
atgctgcatcaattgaccctcgccgagatcgcccgcgccctcgccgacaagcaattttccgccgaagagctgacccgcaccctgctcggtcgcatccggcagctggatccccagctcaacagtttcatcagcatcaccgacgacctggccatcgcccaggccaaggcagccgacgaacggcgcgccaacggcgagaacggcgccctgctcggcgcgccgatcgcccacaaggacctgttctgcacccagggcgtacgcaccagctgcggttcgaagatgctcgacaacttcgtctcgccctacgacgccaccgtggtcgagaagctcaccgccgccggcgccgttaccctcggcaagctgaacatggatgaattcgccatgggctcgtcgaaccagtccagccactacggcgcggtgaagaacccctggagcctcgaccgcgtgccgggcggctcctccggcggttccgccgcggcagtcgccgcgcgcctgctgccggccgccaccggcaccgatactggcggctcgatccgccaaccggcggcgctgaccaacctcaccgggatcaagccaacctacggccgggtttcccgctggggcatgatcgcctacgcctccagcctcgaccagggcggcccgctggcgcgcaccgccgaggactgcgcgctgatgctgggggtgatggccggattcgacccgaaggactcgaccagcgtcgaacagccggtggacgactacctggccgccctgcagaagccgcttagcggcctgcgcatcggcctgccgcgggaatacttcggcgccggcctcgacagccgcatcgccgacgcggtgctggccgtggtcgaggagctgaagacgctcggcgccacggtgaaggacatttccctgccgaacatgcagcacgccatcccggcctactacgtgatcgcgccggccgaggcgtcctccaacctgtcgcgcttcgacggcgtgcgctatggctatcgttgcgacgccccgcagaacctggaagacctgtacaagcgctcgcgcgcggaaggcttcggcagcgaagtgaagaaccgcatcatggtcggcacctacgcactgtcggccggctactacgatgcctattacctgcaggctcagaagattcgccggctgatcaagaacgacttcgtcagcgcctttgccgaagtggacgtgatcctcggcccgaccacgccgaacccggcctggaagatcggcgagaagaacgacgacccggtttcccagtacctggaagacatctacaccatcaccgccaacctcgccggcctgccggggctgtccatgcccgccggcttcgtcgacggcctgccggtgggtgtccagttgctcgcgccctacttccaggaaggccgcctgctcaacgtcgcgcaccagtaccagcaggtcagcgactggcacacccgcaccccggccggcttctaa

SEQ ID NO: 342781 - DNA, 291 bp, Pseudomonas aeruginosa; identical to SEQ ID NO: 320851

SEQ ID NO: 342782 - DNA, 1038 bp, Pseudomonas aeruginosa; identical to SEQ ID NO: 320852

SEQ ID NO: 342783 - DNA, 993 bp, Pseudomonas aeruginosa
gtgctggccgtgctgtcggtcagcctgatggtggtggacgcccggttcgactatctggagcccgtccgtagcaagctggggatggtgctcacgcctttctacggcctggcggaaatgccggtgcgcgcctgggaaggcgtgcgcgaccagttcagcagccgtagcgagctgatcgccgagaacgaacgcctcaaggccgagtccctgctgatgcagcgccgggtgcagaaactcgccgcgctcaccgagcagaacgtgcgcctgcgcgagctgctcaattccgccgcgctggtcgacgacaaggtactggtcagcgagctgatcggcgtcgatccgaaccccttcacccaacgcatcatgatcgacaagggcgagaacgacggcgtcttcgtcggccagccggtgctcgatgccagcggcctgatgggccaggtggtcgaggtgatgccctataccgcgcgggtcctgctgctcaccgacaccacccacagtatcccggtgcaggtcaatcgcaacggcctgcgcgccatcgccgtcggcaccggcaatcccgagcgcctggaattgcgctacgtcgccgacaccgccgacatcaaggaaggcgacctactggtcagctccggcctggggcaacgcttccccgccggctatccggtggccacggtcaaggaagtgatccacgattccggccagccgttcgccgtggtgcgcgcggtgccgaccgcgaagatgaaccgtagccgctacgtgctgctggtgttcagcgacagccgcaccccggaacagcgcgccaacgacgccgccgaggcccaggaagaggcggacaagaaagccgccgccggcgcccaggcgccccagcctgccgcgcaaccggccgccgcgccgtcgccggccaccccggcagcccagggcgctgcgcagcagcccgccgccgcgcccgcggcagctcccacgcagcctgccgctccggcggccaacggggggcgccgctga

SEQ ID NO: 342784 - DNA, 495 bp, Pseudomonas aeruginosa
atggctcgcgcgacccaggggtcgaacaatgtctgggtgatctggctgagcctgctggtcgggctggtgctggccgtagcgccgatgcctaccttcaccgagatcggccgcccgctgtggctggcgatgctgctgacctactgggtgttgctgctgcccgagcgcgtcgggatggtcaccgcctggctgctcggcctggcccaggacgtgctctacggcaacctgctcgggcagaacgcgctgatcctcggcctgatcaccttcctcgtgctgtccctgcaccagcgcttgcgcatgttcccggcctggcagcagtgcctggtgctggtggtggtctacggcctggcgcagctgctccagctctggctcaacgccctgaccggcaatcgcccgccgaccctgaccttcctgctcccggccctggtcagcgcgctgctctggccctgggtgtacgccctgctgcagttcgtccgcctgcgtctcaacgtgaggtag

SEQ ID NO: 342785 - DNA, 606 bp, Pseudomonas aeruginosa
atgccgtcgctgtatctcgcctccgcctcgccccgtcgccgtgaactgctgacccagatcggcgtgccgctgtccgtgctcgccaccgctatcgacgagtcccccttgccgaacgaagcgcccgccgcctacgtcgagcgcctggcgcgcggcaaggcggccgccgggctggctatgctggaagggcgtggcgaggacggttgtgtcctgggcgcggatacctcggtggtgatcgacgggcgaattctcggcaagcccgtggaccaggccgacgggctggccatgctggctgcgctgtccgggcgcgaacaccaggttctcaccgccgtggccctggccgccgctggtggcgtcgaggcgcgggtggtggagtgccgggtgcgcttccgccaggtcgctccggaagaagcgctgcgctactggcagagcggcgagccggcggacaaggcaggcggatatgcgatccagggcctcggggcgatattcgtcagtcgcatcgaaggcagttacagtgcggtggtcgggctgcctttgtgtgaaactgcggaactgttgagggaattcggcatcccttgctggcagcccgtgggtggcaacccgccgtaa

SEQ ID NO: 342786 - DNA, 1458 bp, Pseudomonas aeruginosa
atgagcgaagagatcctgatcaatatcacgccgatggagtcgcgcgtggcggtggtggaaaacggcgtcctgcaggaagtgcatgtcgaacgcacccagcggcgcggcatcgtcggcaatatctacaaggggcgggtggtacgggtactgccggggatgcaggcggcgttcgtcgacatcggcctggaacgtgcggcgttcatccatgccgccgagatatccaatcgcgaaggcagcgccgtggaaagcatcagtgccctggtccatgaggggcaggcgctggtggtgcaggtgaccaaggatccgatcggcaccaagggcgcacggctgaccacccacctgtcgattccttcgcgctatctggtgtacatgccgcgcaccagccatgtcgggatatccctgcggatcgaggacgaagtcgagcgcgagcgcctgaagaaggtggtggccgactgcgtggcggcggaaggcatcgagggacagggcggcttcatcctgcgcaccgccgcggaaggtgcgggcgaggacgagattctcgccgacatccgctaccttcgccggctatgggaccagatcgccgcgcagatccagaccgtcggcgcgccttcggtgatctacgaagacctgtccctggcgatccgtaccctgcgcgacctggtgaacccgcggatcgagaagatccgcatcgactcgcgagagaacttccagaagatcacttccttcgtcgaagaattgatgccggagatttccgatcgcctcgaacactacccgggcgagcgaccgatcttcgatctctacggcgtcgaggacgaaatccagaaagccctggagcgcaaggtactgctgaagtccggcggctacctgatcgtcgatccgaccgaggcgatgaccaccatcgacgtgaacaccggcgccttcgtcggccatcgcaacctcgaggaaaccatcttcaagaccaacctcgaggcggccaccgcgatcgcccgccagctgcgcctgcgtaacctgggcgggatcatcatcatcgacttcatcgacatggaggacgaggagcatcgccggcaggtcctgcgcaccctggagaagcaactggagcgcgaccacgcgaagaccaacatcatcggcatcaccgagttgggcctggtgcagatgacccgcaagcgcacccgcgaaagcctggtgcagatcctctgcgagccgtgcccctgctgccagggacgcggcatgctgaagactgcggaaaccacctgctacgagattttccgcgagattctccgcgaggcgcgtgcctaccaggccgactcctacctggtgctggccaaccagaaggtggtggaccggctgctcgacgaggagtcgggtaacgtcgccgatctcgaggcgttcatcggccgcaccatcaagttccaggtcgaggcgatgtactcgcaggagcaatatgacgtggtcctgctctga

SEQ ID NO: 342787 - DNA, 3831 bp, Pseudomonas aeruginosa
atggcggatgtgggaagcctcggaacgcgactgctacggatcgtcctgggtctgtgcgccctggtactggtgctgctggcgctgtacgtcagccttggccggcaactggtgccgctggtggccgaataccgccagcagctggaggacgaagctggcaagcaactcggcataccggtgcggattgccgaactgacgggctcctggcgcggcttcgagcctctggtggtagcgcgcgacattcaggtcggcgacggcgaacagagtctgcgcctggcgcgggtgcggctggcgccggacctgctcggcagcctgctggcgcgccaggtgcggatcggcagcctggagctggagggactcaagctgaccctgcgcgaaggcgaggatggccagtggagcctggatggcctgccgcacagcgacaagcccagcgatccccggaaactcctgcaattcctgctgcagacccaacgcatctcgctgctggacagtcaactggaggtggcgccgcggggaagcgcagcgctgtcgctcagcgcggtcggcgcgaccctgcgcagttcatcggtcggtgggcagagtctcgatgcccgcctgcaactgccggatggccaacccctggcgctgcacgccgaagggcggatcgacagcgaggactggccgcgcagcagcgccaggttctatctcagcctgccgcagagcgactgggcgcaatggttgccggccggtctgacccaggaatggaagatcgtccgggccaaggccggcggcgacttctggttcgactggcgcgacggcaaggcgcaacggctggtggcacggctgctggcgccgcagttgaaggcgtcgtatgccgcgcgcaagccggtggaaatcaacgacctgggcatgaacctgttcttcgatcgcgaagcgcagggctggaaggttcgggtcggcgacctggcggcgaatttcggcgagcagcgctggggcgaggtggagttgctgttgcgtcgcgaccagcagaacaacgagccacactggaagctgcaggccgaccgcgtcgacctgacgcccctggtgccggcgatagaagcgctggcgccgctgccggacgcggcggcggagtgggtggcgggcctgaagccgaagggcatcctgcacaacctgaacgccgatttctggccgcagcgagaggtgcccgagcgggtcagctacgcgaccaacctggaaaaggtcggtatctcggcgttccatgaggttccggcagtggaaaatgtcagcggcaccttgaccggcaccctggctggaggccagctcgacgcatcggcgcaggatttcatgctgcacctggccaaggtgtttcccgagccgtggcgctaccgcgaggcccgcacgcggatgttctggagcctggacgaccgcgccttcaccctcggcagccacctgatgcgggtcgagggcgaggagggccgcctggccggcgacatgctgatccgcctgatgcgcgatcccggcgctgaagactacatggacctgcaggtcggccttagcgacggcgacgcgcgcttcaccgccaagtacctgccgacccagttgccgggaatgaacaaaagcctggcgaactggttgaagacggcgatccgcagtggccatgtcgagcagggctacttccagtggcagggctcgctgaatcgcggcgcggcggccgaagcccacgtcatgaacctctacttcaaggtccgcgacggcgagctggcctaccagcccggctggcccgccttgagcaaaacggtcggcgaggtgttcgtcgaggattccggagtccgcgtgctggcctccagcgggaatctgctgaattcccgggtcagcgacgtcaaggtcgacattcccctcggccgtccgggacagacgccgcacctgtatgtggatggggccgtcgacagtaacctgaaggacggcatcaagctgcttcaggaagcgccgatcccgacccgcaagatcttcgccggctgggagggcgatgggcccttgcagggccacctgaagctggatattccgctggaccacgacgaggccggcaagaccggggtggtcgtggatttctccaccgtgggcgcgaccctgaagatgcccagtccgaagctggatatgagcgaagtgaagggcgacttccgtttcgacctggccaagggcctgagcgccccggcggtgcaggcccgggtgctgggcagcgaggtacgcgggcggatcgtcgccgaggggcgcggcgatgcgcgcacgcgcttgctgctcaacggccaggtggcggtcaagtcgctgagcgactggctcggcgctggccagcgtccgttgccggtctcgggacgcctgccgttccagctcaacctgctgctggatggcaaggacagccaattgcagatcgattcggatctcaagggcgccgtcgtcgacctgccggcgccgttcggcaagacggccgcccaggcgcggccgacccaatggcggatgaccctggatggcgccgaacgacgttactgggcgcgttacgacggcctcgccagcctggcctatgcggccccggcggacaagccgctgaacggacgcggcgccctgcgcctgggcggtgacccggcgttgctgccctcggcacaggggctgcgggtgcgcgggcgtctggcggaactggactgggacgcctggcaggccaccctgaagcgctacggcaacggcgaccaggccgccagtagcgctgcgggcctgctgcgcggcgccgacctgcgcatcgacagcttcaagggcttcggccaggagctgaagaacctgaccgtcgacctggcccgccaggagcgggcctggcaactggtgctggtcagcgacctcgcatcggggcgcctggtcctgccggatgccaggggcgcgccgatcgtggtcgatctggaccgcctgaacctgccgaagtcgacccttcccgacgagaacaaggtggaggactcggacccgctggccgccgtcgatccgcgcagcctgccggcggtagacgtgaagatcggccaggtcgccctcggtggccagccgctgggcgcctggagcctgaaggtacggccgggcagcaacggcgtggcgttcaacgacctggacctcgacctgcgtggcctgcacgtcaacggcagcctgcgttgggacggcagtccgggcaatacccgcagcacctatcagggccggatcgagggcaagaacctggcggatgtgctcaaggcctggaatttcgcgccgagtgccaccagcgaacgtttccgcatggatatcaacggccagtggccgggatcgccggcctacatggccctgaagcgcttcagcggcagcatggatgcatcgctgcgcaaggggcagttcgtcgaggtcgaaggcagcgcccaggcgctgcgagtgtttggcctgctcaatttcaacgcgatcaaccgccggctgcgcctggatttctcggacatcctcggcaagggactgagctatgaccgggtgaaggggggtctctccgccaccgacggcgtctacgtcacccgcgagccgctgaagctggaaggaccgtcgagcaacctggagttgaacggtaccctggacctggctcacgatcggatcgacgccaagctgctggtgaccttgccattgaccaacaacctgaccctggcggcactgatagtcggcggtccggcggtcggcggcgcggtcttcgtcgtcgacaagttgctcggcgaccgggtctcgcgcttcgccagcgtgcaatacagcgtcaagggcccctggcaggatccgaagatcagcttcgacaagccattcgagaagccccgctga

SEQ ID NO: 342788 - DNA, 849 bp, Pseudomonas aeruginosa
atgtccattgccgtgatccagatggtcagccaggacgacgtgacggccaacctggccgccgcccgtcgcctgctggaacaggccgccgagggcggggcgcggctcgccgtgctaccggaaaacttcgccgccatgggccggcgcgacctgaccgaactggggcgcgccgaggcgcgggggaacgggcctatcctgccgtggttgaattccgccgctcgcgacctcaggttgtggatagtcgccggaacgttgccgctgccgccggatgggcaacccgaggcgaaggcgaatgcctgttcgctgctgatcgacgagcacggagagcgggtcgcccgctacgacaagctgcacctgttcgatgtggatgtagccgatgcgcggggccgctatcgtgaatccgacgactatgctttcggtcagaagatcgtggtggcggatacgccggtcggccgcctcggcctgacggtctgctacgacctgcgttttccggagctctataccgccctgcgcgaggccggcgcggaactgatcacggcgccgtcggcgttcaccgcggtgaccggcgcggcgcactggcaggtactggtccgcgcccgtgccatcgagacccagtgctacctgctggcggccggacagggtggcgttcacccacggggccgggagacgttcggccattcggccatcgtcgatccctggggccgggtcctggccgagcggccgcagggcgaagcggtgctgctggcggtgcgcgacgccgcagaacaggcggatatccgccggcgcatgccggtggtggcgcacagacgatttttcccgccggccgaaccgcggccggcgcgtacggagtga

SEQ ID NO: 342789 - DNA, 1443 bp, Pseudomonas aeruginosa
atgagcgagttgttgtcatccgtcagccagcaattgctggcccccggtggtctggaactggacagcctgcccggcattcttcatgaactgaacggcccgggcatcgatgccgccgacctgtatttccagagtcaggtctccgagtcgtggatgctcgaggacggcatcgtcaaggaaggcagcttcaatctcgaccagggtgtcggggtacgcgcgcagtcgggcgagaagaccggcttcgcctatagcaatgcgatcaccgccgaggcgttgaaacaggccgcggtggcggcccgttcgatttcccgtgcgggacagaacggcagcgtgcaggcgttcaaggccgtggtgccggctcgcctgtacgccggcgagaacccgctggacgtgctcagccgtgccgagaaggtcgagttgctgaagcagatcgacgccgctacccgtgcgctcgatccccgcatccagcaggtcacggtgagcatggccggcgtctgggagcagatcctggtagcggccagcgacggttcgctggctgccgacattcgtccgctggtgcgtttcaacgtcagcgtgatcgtcgaacagaacggccgacgcgaacgcggcggccacggcggcggcggtcgcaccgactatcgctatttcctccaggaggatcgtgccatgggctacgcccgcgaggccctgcgccaggcactggtcaacctcgaggcgattcccgcgccggccggcaccctgccggtggtgatgggcgcgggttggtccggggtcctgctccacgaagcggtcggccacggcctggagggcgacttcaaccgcaagggcagctccgcctacagcggccgggtcggcgaaaaggtcgcctcgagcctgtgcaccatcgtcgacgacggcaccctggccgggcgtcgcggctcgctgagcgtggatgacgaaggcacgccgagcaactgcaacgtgctgatcgagaacggcgtgctcaagggctacatgcaggacaagctcaacgcccgcctgatgggcgtggcgcgcaccggtaacggccgccgcgagtcctacgcgcacctgccgatgccacgcatgaccaacacctacatgttggccggcgagagcgatccgcaggaaatcatcgcctcggtggagaagggtatctactgcgccaacctcggcggtggccaggtcgatatcaccagcggcaagttcgtgttctccaccagcgaggcctacctgatcgagaacggcaggatcaccaccccggtgaaaggcgccaccctgatcggcaacggtccggaagcgatgagccgggtgtccatggtcggcaacgacctggccctggacagtggcgtgggaacctgcgggaaggacggtcagtcggtgccggtcggcgtcggccagccgaccctgaagatcgatgcgatcaccgtcggcggcaccggcgcctga

SEQ ID NO: 342790 - DNA, 525 bp, Pseudomonas aeruginosa
atggctgaatttcacgacgacgactcgcaattcgaagagaagagcaagtcgcagatcaaacgcgagctgcatgccctgcaggacctcggcgagcgcctgaccaccctgcaaccgcagttgctggagcgcctgccgctcaccgacccgctacgcaaggcgctgctcgaggcgccgaagcacaaggcgcacatcgcccgcaaacggcatatccagtacatcggcaaactgatgcgcgaccaggacgtggacgccatcgtcgccctcatcgaccaggtggactcctccacccgccagtacaacgaacgtttccatgccctcgaacgttggcgcgaccagttgatcgccggcggcgacgcagcgctcgacgccttcgtcggggagttccccgagtgcgatcgccagcacctgcgcggcctggtccgccacgcccagcacgaggccgcgcacaacaaaccgccggccgccgcacgcaaagtgttcaagtacatccgcgagctggacgaaaccaagcgcggcctgcgctag

SEQ ID NO: 342791 - DNA, 1350 bp, Pseudomonas aeruginosa
atgagtctacatgccgcggcagtcggtccctccgtgcttccggaccttcgcgagcaggtcgagcagatcatcgccgaggcccgccgccagggcgccagtgcctgcgaagtggcggtgtcgctggagcagggcctgtccaccagcgtgcgccagggcgaggtggaaaccgtcgagttcaaccgtgaccaaggtttcggcatcaccctctacgcaggccagcgcaagggctcggcgagcacctcggcgaccggcgaggcggccatccgcgagacggtggcggcggcgctggcgatcgcccgccatacctccgaggacgaatgcgccggtctcgccgatgccgcgttgatggcccgcgagttgcccgagctggacctctatcatccatggagcctgagtcccgagcaggccgtggaacgtgccctggcttgcgaggcagcggcgttcgccgccgacaagcgggtgaccaaggccgacggcaccaccctgaatacccaccagggctgccgggtatacggtaacagccacggtttcatcggtggttacgccagcacccggcacagcctcagctgcgtgatgatcgccgagggcgaaggacagatgcagcgtgactattggtatgacgtcaaccgccgtggcgaggccttggccagcgccgagtcgatcggccggcgcgccgccgagcgcgccgccagccgactgggcgcgcggccggtgcagaccgccgaagtgccggtgctgttcgctccggaaatcgctgttggcctgttcggccatttcctcggggcgatctcaggcggcagcctgtatcgcaagtcatccttcctcgaaggcgcgctgggccagcgcctgtttcccgagtggctgagcatcgacgagcggccgcacctggtcggcgcgctcggcagcgccagcttcgatagcgacggcctggcgacctatgccaagccattcgtcgagaacggcgagctggtgtcctatgtcctgggcacctattccgggcgcaagctcggcctgccgagcacggccaacgccggcggcgtgcataacctgttcgtcagccatggcgacgaggaccaggccgctctcatacgcaggatggggcgtggcctgctggtcaccgagttgatggggcagggcgtcaacctggtgaccggcgattattcccgcggcgccgccggctactgggtcgagaacggcgagatccagttcccggtccaggaagtcaccatcgccgccaacctgcgcgacctgttccgccgtatcgtcgcggtcggcaaggacatcgaacggcgcggcaacctgcataccggttctgtactggtcgagtcgatgatggtggccgggcgctga

SEQ ID NO: 342792 - DNA, 396 bp, Pseudomonas aeruginosa; identical to SEQ ID NO: 320862

SEQ ID NO: 342793 - DNA, 1377 bp, Pseudomonas aeruginosa
atgactgacacccgcatcgaacgcgacagcatgggcgaactggcggtcccggcgaccgccctctatggcgcccagacccagcgcgcggtgaacaacttcccggtcagcggccaacgcatgccccaggccttcgtccgcgccctgctgctggccaaggccgcggcggcgcgggcgaacgtctccctgcagcaactggatgcaccgatgggcgaggcgatcgccgagacctgcctgcaactgctgcaggaggacttcatgcagcatttcccggtggatgtgttccagaccggctccggcaccagttccaacatgaacgccaacgaagtggtggcgaccctggccagtcgtcgcctgggcggcaaggtcaatccgaacgaccatgtgaactgcgggcagagcagcaacgacatcattccctcgaccatccacatcagtgccgccctcgagatcagcgaacgcctgctgccggcgctgcgccacctggagcagactatccagagcaaggccggcgaagtgcatgcctatgtgaagaccggccgcacccacctgatggatgcgatgccggtacgcatgagccaggtgctcggtggctgggcgcagcaggtgcgacaggccggcgtgcacatcgagagcgtacttcctgccttgcagcagttggcacagggcggcaccgcggtgggcaccgggatcaacgcccatcctcggttcgccgaacgtttcagccaggagctgaacgacctgaccgggctggcgttccgccccggcgacgacttcttcgccctgatcggttcgcaggacaccgcggtcgctgcgtccggccagttgaagaccctggccgtgaccctgatgaagctggccaacgacctgcgctggatgaactccgggccgcttgccgggctcggcgagatcgagctggaagcgctgcaaccaggctcctcgatcatgcccggcaaggtcaacccggtgatcccggaggccaccgcgatggtcgccgcccaggtgatcggcaatgacgccgccattgccgtcgctggccaatcgggcaacttcgaactgaacgtgatgctgccgctggtggcggacaacctgttgcacagcatccagttgctggccaacgtcagccggctgctggcggacaaggccatcgccagcttcaaggtcaaccagggcaagctcagcgaggcgttggcgcgcaacccgatcctggtcactgcgctgaacccgatcatcggctaccagaaggctgcggaaatcgccaagcaggcctatcgcgagggacggccgatcatcgatgtggcgctggaaaacaccgatctggaccgtgcgcgcctggaggtgttgctggatccggaaaaactcacggctggcggcctctga

SEQ ID NO: 342794 - DNA, 450 bp, Pseudomonas aeruginosa
atgcgtcattggcaacgaacgatcgaacagggcaaccgctgtttcgtcaccggcgcattgatcgatgcgcgtgagcactacctccatgccctggccctggcccaggtgctgctggaacgctggggcgacgccgacgaggcggtgatggcgttcgtgatttcccatcacaacctggccgacttgcacctgcaactggagcaaccggaggagaccgcagaatacctgtgcgcctgccacgagcgcctgttgcgggtcagcgccgaccagaagctgccgctggccctgcgccaggcggcccagcatcacagccggcgcacctatgtcgaactgctgtcgttcatcggcgaacacggtgcctatccgcgcaccgagcgcctgctcaagggaccgccgaacgcggaggtccgacccgagttcctcgctccgcccccctcacttcgctatcactga

SEQ ID NO: 342795 - DNA, 612 bp, Pseudomonas aeruginosa
atgccccacgccttgccgcccttgccctacgcctacgatgccctggaaccgcacatcgacgcgctgaccatggagatccaccacagcaagcaccaccagacctatgtgaacaacctgaacgccgcgctggaaggcacgccctatgccgagcagccggtggaaagcctgctgcggcaactggctggtctgccggagaagctgcgcaccccggttgtcaacaatggcggtgggcatgccaaccactcgctgttctggaccgtgatgtcgccccagggcggtggccgtcccgatggcgacctggggcgggccatcgatgagcagctcgggggcttcgaggcgttcaaggatgcgttcaccaaggctgcgctgacccgcttcggcagcggctgggcctggctcagcgtgactccccagggcagcttgctggtggagagcagcggcaaccaggacagcccgctgatgaacggcaatacgccgatcctcggcctggacgtatgggagcacgcctattacctgaagtaccagaaccgccgcccggaatacatcggcgctttctacaacgtgatcgactggcgggaggtcgcgcgtcgctatgcgcaagcccgggcctag

SEQ ID NO: 342796 - DNA, 903 bp, Pseudomonas aeruginosa
atgaaggcgttgctccatggcatcgccgaaggtaacgggcggacgctgcgcaacctgctgggcctgctgatcttcatcggcggcggctacctgctcggccgccacgcgctgttgctggccgaactcaacctgccggcgcccatcgtactggcattgaaaggcggcctgctctgcgccttcggtaccgctctcggggcgatgccggtgctggtggtgaagaccatgccggcgcgcctgtcggatgcgctgctgggcttcggtgccggcgtgatgctctcggcgacggccttctcgctgatcatgccggcgctatccgcggccggcgacctcggctactcgaagttcggcgcggggttcctggtcagcttcggcctggcggtcggcgtgatggggctgttcatcctcggccggctgatgccggacgtccatcccggttgcgagggcgcgccactgtccggtggcattcccccgcgcatcctgctgttcgtcacggccatcgtcctgcacaacatccccgaaggcatggcggttggcgtgtcggccggtgccggcctggacgaggcgaacggcctcgccctgggcatcgctctgcaggatgtgccggaaggtctggtggtggcgctggtgctggccggagtcggtatgtcgcgtttcaaggcgatgctggtcggtgccgcgtcgggcctggtcgagccgctgttcgcggtgctctgcgcctggctggtcggcctctccgcgctgctcctgccctgggggctggccgccgcggggggagcgatgctcttcgtggtcacccacgagatcattcccgagtcccaccgccagggacatgccgccgaggctacgctgggcctggtgttcggtttctgcctgatgatggtgctggataccgcgctgggctag

SEQ ID NO: 342797 - DNA, 273 bp, Pseudomonas aeruginosa; identical to SEQ ID NO: 320867

SEQ ID NO: 342798 - DNA, 861 bp, Pseudomonas aeruginosa
atgcgcctgatcatcgtcagtggccgctcgggctcgggcaagagcaccgccctgaacgtcctcgaagacaacggcttctattgcatcgacaaccttcccgccagcctgcttcccgacctggcgcagcgcgccctgttgcacacggagctactgcagccacaggtggcggtgtcgatcgacgcccgcaacctgcccagccagttgcagcgcttccccgaactgttgcaggaagtgcgggacaaccacatcaactgcgatgtgctgtatctcgacgccgacgacgagacgctgctcaaacgattctcggaaacccgccggcgccacccgctgaccaccgacacccgttcgctggcggaggcgattggcgacgagagccaattgctcggaccgatcgccgacctcgccgacctgaagctggacaccaccagcctcaacctctatcagctgcgcgacaccatcaaactgcgcctgttgaacaagccggagcccggcaccgcgttcctcgtcgaatcctttggcttcaagcgcggcatgccagtcgacgccgacctggtgttcgatgtgcgctgcctgccgaacccctactggaagcccgagttgcgcgatcattcggggctggagccggaagtccgcgagtatctggccgcccagccggacgtcgaggaaatgtaccaggacatcgtcggctacctgaacaaatggctgccgcgcttcgccgccagtaaccgctcatatgtaacagttgcgataggctgtaccggcgggcaccatcgttcggtctacctcgccgagcggattggcgctgcactcagggattccctgaagaacgtgcagattcgccaccgcgatctcagcagctag

SEQ ID NO: 342799 - DNA, 465 bp, Pseudomonas aeruginosa
atgatccgacttgagcaaatcctgacccccggccgttccctcgtgaacgtgccgggcggcagcaagaaacgcgtactcgaacaaatcgccaacctggtagccagggagctgccggagttcgacgcccagaccatcttcgaaaacctggtggcccgggaaaaactcggttccaccggcttcggcaatggcatcgccattccgcactgccgcctgtctggctgccagagccccatcagcgccgtgctgcacctggatgctcccgtggacttcgacgcgctggacggcgcgccggtcgacctgctcttcgtcctgctggtaccggaggccgcgaccgaagaacatctcgaactgctccggcagatcgccgccatgctcgaccgtgccgacgtacgcgaccgcctgcgcagcgctcccaccgccgaagcgctttatcagatcgtggtagacgtacagaacgggcaatga

SEQ ID NO: 342800 - DNA, 309 bp, Pseudomonas aeruginosa; identical to SEQ ID NO: 320870

SEQ ID NO: 342801 - DNA, 1494 bp, Pseudomonas aeruginosa
atgaaaccatcgctagtcctcaagatgggccagcagctgacgatgacgccgcagctgcaacaggccatacgcctcctccagctatccaccctggacctccagcaggaaatccaggaagcgctggaatccaatcccatgctcgaacgccaggaagacggcgacgatttcgacaacagcgaccctctcgccgatggcgccgaacaggcggccagcgcgccccaggagagccccctccaggaaagcgccacgcccagcgtcgaaagcctcgacgacgaccagtggagcgaacgcatacccagcgagttgccggtggataccgcctgggaagacatctaccagaccagcgccagcagcctgcccagcaacgacgatgacgagtgggacttcaccgcgcgcaccagcagcggcgagagcctgcacagccacctgctctggcaggtcaacctggcaccgatgtcggacaccgatcggatgatcgcggtgaccatcatcgatagcatcaacaacgatggctacctcgaagagtccctcgaagaaatcctcgccgccatcgatccggaactggacgtcgagctcgacgaagtggaagtcgtgctgcgccgcatccagcaactggaacccgccggcatcggcgcccgcaacctgcgcgagtgcctgctgctgcaactgcgccagttgccgtccaccacgccctggctgaacgaagcgctgcgcctggtatccgactacctcgacctgctcggcggccgcgactacagccaattgatgcggcgcatgaagctcaaggaagacgaactgcgccaggtcatcgagctgatccagtgcctgcatccccggcccggttcgcagatcgaatcgagcgaagccgaatacatcgtccccgacgtcatcgtgcgcaaggacaacgagcgctggctggtcgagctgaaccaggaggcgatgccacgcctgcgcgtcaacgccacctacgccggcatggtccgccgcgccgacagcagcgccgacaataccttcatgcgcaaccagttgcaggaagcccgctggttcatcaagagcctgcagagccgcaacgaaacgctgatgaaggtcgccacccagatcgtcgagcaccagcgcggcttcctcgactacggcgaagaagccatgaagccgctggtcctgcacgacatcgccgaagcggtgggcatgcacgaatcgaccatttcgcgggtcaccacgcagaaatacatgcatacgccgcgcggcattttcgagctgaaatatttcttttcaagtcacgtcagtaccgccgaaggcggggaatgctcgtccaccgcgatccgcgcgatcatcaagaaactggtggccgcggaaaatgcgaaaaagccattgagcgacagcaagatcgctggtttactggaggcacagggcattcaagtggctcgccgcaccgtcgccaaataccgcgaatccctgggcatagccccttcgagcgagcgcaagcgactggtgtga

SEQ ID NO: 342802 - DNA, 726 bp, Pseudomonas aeruginosa
atggcaacgctcaaagcccagcacctggccaaaagctataaaggccggcaagtcgtccgcgacgtcagcatgtccatcgatagcgggcagatcgtcggcctgctcggtccgaacggtgccggcaagaccacctgcttctacatgatcgtcggcctggtccaggccgaccagggcgtggtccgcatcgacgagcagaacgtcacccacctgccgatgcacgggcgcgcccgggccggcatcggctacctgccgcaggaagcctcgatcttccgcaagctgtcggtatccgacaacatcatggcgatcctcgagacccgcagcgacctcgatcgcaacggtcgcaaggaagccctggaaggcctgctgcaggaattccacatccaccacatccgcgacaacctcggcatgagcctgtccggcggcgaacgacgccgggtggaaatcgcccgcgcactggccagcgcgccgaaattcatcctcctcgacgagcccttcgccggcgtggacccgatctcggtcggcgacatcaagcagatcatccatcacctcaaagcgaagggtatcggcatcctcatcaccgaccacaacgtccgcgagaccctggacatctgtgaaacggcgtatatcgtcaatgatgggcagttgatcgcggaaggggatgccgagagcatcctcgccaacgacctggtcaaggaagtctacctggggcacgagttccgcctctga

SEQ ID NO: 342803 - DNA, 528 bp, Pseudomonas aeruginosa
atgaggttcgttaataccctcccccttattttcggtctgactgccgccctcggcagctccatggccttggccctgccttcggaccgcgaacaaccgatccgcgtccaggccgacagcgccgaactggacgacaagcagggcgtcgcggtctaccgcggcgacgtcgtggtgacccagggcagcaccaagctgaccggcaacaccgtgaccctgaagcaggacaagaacggcgacatcgaggtcgtgacctcggtcggcaagcctgcctactacgagcagaaacccgctccggacaaggacgtgaccaaggcctatggcctgaccatccagtacttcgtcacgcagaaccgggtcgtgctgatcgaccaggccaaggtgatccaggaaggcaacaccttcgaaggcgagaagatcgtctacgacacccagcgccagatcgtcaacgcgggtcgtgccaccggctcccaggtgaccagcccgcgcccgcgcatcgacatggtcatccagccgaagaaaaaggcccagtaa

SEQ ID NO: 342804 - DNA, 573 bp, Pseudomonas aeruginosa
atgccgaagacactacgccagaaactgctgctcgccctgatcgccctgttgctgatcgtcgcgggctactactggaacgtcgggctcgagctgttcaacgaacagccgacccgtcccggccaggacaataccatcgactactatgccgagaatgcccatagcctccagtaccaggaggacggcagcctcgactacgagatgaccgcggtgaagctggagcaccagaaagccacggacatcactttcgtcaccacccccgacctgctgctcttccgtggcaacgtgcaaccctggcacatccagagcgcccgcgccgaagtcggaccgaaaggcaaggaggtcgaactcatcgacgacgtgcgcgtcgcacgtaccgatgccaagggccaaccaagcatcctgaccaccactcggctgaccgtattccccgacaagaattatgcacagaccgagcaagccgttaaaatcgacgcggccaatggagtgacgacggctgttggaatgaaagcgtatctgaaagacagccggatgcacctgctgtccaacgtaagaggtcagcatgaggttcgttaa

SEQ ID NO: 342805 - DNA, 540 bp, Pseudomonas aeruginosa
atgagcgatacccattcggccgcggaactcccggtccgggccagccggatacgcctggcgatcttcgacgtcgacggcgtgctgaccgacggcaagctgtatttcctcgtcgacggcagcgagttcaagaccttcaacaccctggacggacatggcatcaagatgctcatcgcctccggcgtgcgcaccgccatcatcaccggccgcgacactccggtggtcgaacggcgcgcgcgcaacctgggcatccagcatctctatcagggccgggaagacaagctcgccgtcctcgacgaacttctcggcgaactcggactaggctatgagcaagtcgcctaccttggcgacgacctgcccgatctgccggtgatccgccgcgtcggtctgggcatggcggtagccagtgccgacccgttcgtgcgccagcatgcccatggcgtcaccgcggcccgcggcggcgaaggcgccgcccgcgagttctgcgaactgatcatgcgcgcccagggtacgctcgaagccgcccagggcgcctatctgtag

SEQ ID NO: 342806 - DNA, 975 bp, Pseudomonas aeruginosa
atgagccagaacctcgatttcatccattccgcccagcgcaccatcggcctcgagcgcgacgcggtagacagcctgctggcgcggattggcgacgatttcgtcaaggcctgcgaactgctgctggccggcaagggccgggtcgtcgtcgtcggcatgggcaagtccggtcacatcggcaagaagatcgccgctaccctggccagcaccggcaccccctccttcttcgtgcatccggccgaggccagccatggcgacatgggcatgatcaccaaggacgacgtggtcctcgccctgtccaactccggctcgactgccgaaatcgtcaccctgttgcctctgatcaagcgcctgggcatcaccctgatcagcatgaccggtaaccccgagtcgcccctggccaaggctgcggaagtgaacctggacgccagtgtcggccaggaagcctgcccactgaacctggccccgacctcctccaccaccgtaaccctggtcctcggcgacgccctggcgatcgccctgctcgaagcccgcggctttaccgcggaagacttcgccttctcgcacccgggcggtgcgctgggccgccgactgctgctgaaggtggaagacgtcatgcacgtcggcgaagggctgccgcaggtgctgctcggcacctcgctgaccggcgcgctgatggaaatgacccgcaagggcctgggcatgaccgtagtgctcgacgaacatggcaagcttgccggcattttcaccgatggcgacctgcgtcgcgccctggatcggggcatcgacgtccgccaggtcaccatcgaccaggtgatgaccgtccacggcaagaccgtccgcgccgagatcctcgccgcggaagccctgaagatcatggaagacaacaagatcggcgcactggtggtggtcgacgcggatgaccgtccggtcggcgccctgaacatgcacgacctgttgcgcgcaggagtgatgtaa

SEQ ID NO: 342807 - DNA, 810 bp, Pseudomonas aeruginosa
atgagcaccgatagtgcctacgcggtcgagttgaagggcctgaccttcaagcgcggatcgcgggcgattttcgacaacatcgatgtgcgtatcccgcgcggaaaggtgaccggcatcatgggcccgtccggttgcggcaagaccacgttgctgcggctgatcgcctcccagttgcgtccttcgaagggggaggtctgggtcaacgggcagaacctgccgcagctttcgcgcggcgacctgttcgacatgcgcaagcagttcggcgtgctgttccagagcggggcgctgttcaccgatctcgacgtcttcgagaacgtcgcgtttccgctgcgtgtgcatacccagctgccggaagagatgatccgcgacatcgtcctgatgaagcttcaggccgtcggcctgcgcggcgccgtggaactgatgccggacgagctttccggcggcatgaagcgccgcgtcgccctggcccgggcgatcgccctggacccgcagatcctgctctacgacgagccgttcgtggggcaggatccgatcgccatgggcgtcctggtgcgcctgatccgcctgctcaacgatgccctcggcatcaccagcatcgtggtttcccatgacctggccgagaccgccagcatcgccgactacatctatatcgtcggcgacggccgggtacttggccacgggacgccggacgtcctcaaggaaaccgacgatcctcgtatccgccagttcgtcaagggaatcccggatggtcccgttccgttccattatccggcccgcgactaccgggccgacctgctgggagagcgctga

SEQ ID NO: 342808 - DNA, 798 bp, Pseudomonas aeruginosa
atgcgtagagtctctcccctcgaacgtatccggctgttcggccgcgccggcctggacgtggtcgccgcgctcggccgctcgaccctgttcctcggccacgccctgctcggccggcgcacgccaggcaccggtttgcacctgctggtgaagcaactctactcggtaggcgtgctgtcgctggcgatcatcgtcgtctcgggcctgttcattggcatggtgctggccctgcagggctacaacatcctgatttcctatggttccgagcaggcggtcgggcagatggtggccctgaccctgctgcgcgaactggggccggtggtgaccggcctgctgttcgccggccgtgccggctctgcgcttaccgcggaaatcggcaacatgaaggccaccgaacagctttccagcctggaaatgatcggtgtcgacccgctcaagtacatcgtcgcgccgcgcctgtgggccggtttcatctccatgccgctgctcgccgcgatcttcagcgtggtcggcatctggggtggggcgatggtcgcggtcgactggctgggcgtatacgaggggtcgttctgggcgaacatgcagaacagcgtgcagttcaccgaggatgtgctcaacggcgtgatcaaaagtatcgtattcgccttcgtggtgacctggatcgcggtctaccaaggctacgactgcgagccgacctcggaaggaatcagccgggcgacgacccggaccgtggtctatgcctccctggcggtgctggggctcgacttcattctgactgctttgatgtttggagatttctga

SEQ ID NO: 342809 - DNA, 474 bp, Pseudomonas aeruginosa
atgcaaacccgcaccctggaaatcggtgtcggcctgttcctcctggccggcctgctggccctgttgctgctggccctgcgggtcagcggcctgagcgtgggcaacgccggtgatacctacaaggtctacgcctacttcgacaacatcgccggtgttaccgtgcgcggcaaggtcaccctggccggcgtgacgatcggcaaggtgacggcggtcgacctggatcgcgacagctacactggtcgcgtgaccatggagatcaaccagaacgtgaacaacctgccggtcgattccacggcgtcgatcctgaccgccggcctgctgggcgagaaatacatcggcatcagcgtcggcggcgacgaggacgttctgaaggacggcagcaccatccacgacacccagtcggcgctggtgctggaagacctgatcggcaagttcctgctgaactcggttaacaaagacgaagccaaaaagtga

SEQ ID NO: 342810 - DNA, 648 bp, Pseudomonas aeruginosa
atgctgactcttctgcgtcgcggcctgctggtgttcctggcggctttcccgctgctttccatggcggcgccgaccccgcaacaggtggtgcagggcacggtcgacgaactgctttccgacatcaaggccaacaaggccgcctacaaggccgatccgcaaaagctctacgccactctcgatcgtatccttgggccggtggtcgatgccgaaggcatcgccaagagcgtgatgaccgtcaagtactcgcgccaggcctcacccgagcaaatcaagcgcttcgaggaagtgttcaagaacagcctgatgcagttctacggcaacgcgctgctcgaatacgacaaccaggacatccgcgtgctgcctagttcggccaagccgagcgacgatcgcgccagcgtcaacatggagatccgtgacagcaagggcacggtctatccggtctcctacaccatgaccaacctggccggtggctggaaggtccgcaacgtgatcatcaacggcatcaacatcggcaagctgttccgcgaccagttcgccgacaccatgcagaagaaccgcaacgacctcgagaagaccatcgccggctggggcgaggtggtcgccaaggccaaggaaaccgcgaaagcggaagaggccggggcgaaatga

SEQ ID NO: 342811 - DNA, 309 bp, Pseudomonas aeruginosa
atgagccaggccagcctgcgcgaaggcgcggccggcgaactgcagctcgccggcgtgctcgactacagcagcgggccggcgttgcgcgagcagggcggtcggctgattcgcgccagccaggcggcggaactggtcgtcgactgctcggcggtggagcgctccagcagcgtgggcatttccctgttgctggccttcatgcgcgacgcacgcaaggccggcaaggtcctgagcgtcagggcgttgccggacgacatgcgggagattgccaaggtcagcagccttctggagatcctgcctttgcaggaatga

SEQ ID NO: 342812 - DNA, 240 bp, Pseudomonas aeruginosa; identical to SEQ ID NO: 320882

SEQ ID NO: 342813 - DNA, 1266 bp, Pseudomonas aeruginosa
atggataaactgattattaccggcggtaaccgcctcgatggcgaaatccgcatttccggcgcgaagaactcggcgctgccgatcctggccgcgaccctgctggccgatactccggtcaccgtctgcaacctgccgcacctgcacgacattaccaccatgatcgaactgttcggccgcatgggcgtgcagccgatcatcgacgagaagctcaacgtcgaagtcgatgccagcagcatcaagaccctggtcgcgccgtatgaactggtgaagaccatgcgtgcctcgatcctggtgctgggcccgatgctggcgcgcttcggcgaggccgaagtggccctgccgggcggttgcgcgatcggttcgcgtccggtcgacctgcatatccgcggtctcgaggccatgggcgcgcagatcgaggtcgaaggcggctacatcaaggccaaggcgccggccggcggcctgcgtggcggtcacttcttcttcgataccgtcagcgtgaccggcaccgagaacctgatgatggccgccgcgctggccaacggccgtaccgtgctgcagaacgccgctcgcgagccggaggtggtcgacctggccaactgcctgaacgccatgggcgccaacgtccagggcgctggctccgataccatcgtcatcgaaggcgtgaagcgcctcggcggtgctcgctacgacgtactgcccgaccgtatcgagaccggcacctacctggtggccgcggccgcgaccggtggccgggtgaagctgaaggataccgacccgaccatcctcgaggcggtcctgcagaagctggaagaggccggtgcccacatcagcaccggcagcaactggatcgagctggacatgaagggcaaccggccgaaggcggtcaacgtgcgtaccgcgccgtacccggcgttccccaccgacatgcaggcccagttcatctccatgaacgcggtagccgaaggcaccggcgcggtcatcgagacggtcttcgagaaccgcttcatgcatgtttacgaaatgaaccgcatgggcgcgcaaatcctcgtcgaaggcaacaccgccatcgtcaccggcgtacccaagctcaagggcgctccggtcatggcgaccgacctgcgcgcatccgcgagcctggtgatcgccggcctggtggccgaaggcgacaccctgatcgatcgcatctaccacatcgaccgtggctacgagtgcatcgaagagaaactccagctgctcggcgccaagatccgccgcgtaccgggctag

SEQ ID NO: 342814 - DNA, 636 bp, Pseudomonas aeruginosa
atgctgaccatcgccttgtccaagggccggattctcgacgataccctgccgctgctcgcagcggcgggcatcgtaccgtcggagaacccggacaagagccgcaagctgatcatcccgacgtccctgtccgatgtgcgcctgctcatcgtgcgcgccaccgacgtgccgacctatgtcgagcatggcgccgccgatctcggcgtggccggcaaggacgtgctgatggagtacggcggccagggactctacgaaccgctggacctgcgtatcgccaactgcaagctgatgaccgccggcgccattggcgcgcctgaacccaagggacgcctgcgggtggccaccaagttcgtcaatgtcgccaagcgctactacgccgagcagggccgccaggtcgacgtgatcaagctgtacggctcgatggagctggcgccgctggtcggtctcgccgacaagatcattgacgtcgtggataccggcaataccctgcgcgccaacggcctggagccccaggaactgatcgccacgatcagctcgcgcctggtggtcaacaaggcctcgatgaagatgcagcacggtcgcatccagtcgctgatcgataccctgcgcgacgccgtcgaggcgcgacaccgtcactga

SEQ ID NO: 342815 - DNA, 1323 bp, Pseudomonas aeruginosa
atgaccgctcccttcgctatccgtcgactcaatgccgctgatccggacttcgggcgtcatctggatcatctgctgagctgggaaagtgtctccgacgattcggtcaaccagcgcgtcctcgacatcatcgccgccgtacgcagccgtggcgacgccgccgtggtcgagttcacccagcgcttcgacggtctccaggccgcctcgatggccgacctgatcctgccgcgcgagcgcctggagctggctctcacccgtatcaccgtagcccagcgcgaagccctggaagtcgccgccgagcgcgtgcgcagctaccacgagaagcagaagcagggttcctggcgctacaccgaggccgacggcacggtgctcggccagcaggtcaccccgctggaccgcgccgggctctatgtgccgggcggcaaggcgtcctacccgtcctcggtgctgatgaatgcgatcccggccaaggtcgccggggtgtccgaagtggtcatggtcgtaccgaccccgcgcggcgagatcaacgagatcgtcctcgccgccgcctgcatcgccggcgtcgaccgtgtcttcaccatcggcggggcacaggccgtggccgcgttggcctacggcaccgaaagcgtgccgcgggtggacaagatcgtcggtcccggcaacatctacgtggccaccgccaagcgtcacgtgttcggccaggtcggcatcgacatgatcgccggtccctcggaaatcctcgtggtctgcgacggccagaccgatcccgactggatcgccatggacctgttctcccaggccgaacacgacgaagacgcccagtcgatcctggtcagtccggacgcggcgttcctggaccgcgtcgcggacagcatcgctcgcctgctgccgaccatggagcgcgccgagatcatccgcacctccctggaggggcgcggcgcgctgatccaggtcgccgaccaggcccaggcctgtgcggtcgccaaccgcatcgccccggaacacctggagctgtcggtggccgatccggaaagctggctgccggagatccgccatgccggcgcgatcttcatgggccgctacactgccgaggccctgggcgactattgcgccggcccgaaccacgtgctgccgacctccggtaccgcgcgtttctcttcgccgctgggggtatatgacttccagaagcgttcgtcgatcatcaactgctcggccgagggcgcttcggtcctcggtcgtaccgcctcggtgctggctcgcggcgagtcgttgaccgcccacgcgcgtagtgccgaataccgcatcctcgacgagaaggaggcctga

SEQ ID NO: 342816 - DNA, 1056 bp, Pseudomonas aeruginosa
atgagcaaattctggagtcccttcgtcaaggacctggtgccttatgtgccgggcgagcagccgaagctgtcgcggctggtcaagctgaacaccaacgagaatccctacggtccgtcgccacaggcgctcgccgcgatgcaggcggaactcaacgacgacctgcgcctgtatcccgatcccaacggcgagcggttgaagcaggcggtcgccgcgcactacggcgtacaggccaaccaggtgttcgtcggcaacggctccgacgaggtgctcgcgcacattttccatggcctcttccaacacgacctgccgctgctgtttccggacgtgacctacagcttctatccggtctattgcggcctgtacgggatcgcgcacgagaagatcgcgctggatgaaaggttccgcatccgcgtcgaagactacgcgcggcccaacggcggaatcatcttccccaatccgaacgcgccgaccggctgcctgctgccgctggacgccatcgaagcgatgctgaaggcgtcgccggattcggtggtggtagtcgacgaggcctatgtcgacttcggcggcgagagcgccatcgccctggtcgatcgctacccgaacctgctggtcacccagacgctgtccaagtcgcgctccctggccggcctgcgggtcggcctggcggtcggccatgccgatctggtcgaggcgctggagcggatcaagaacagcttcaattcctacccgctggatcgcctggcgatcgccggcgcggcggcggctttcgaggacgacgcttatttccgtcggacctgccaggcagtgatcgatagccgcgaggcgttgagcgcctctttgcaggcgctgggcttcgaggtactaccgtcggccgccaacttcgtcttcgcccgtcatccgcggcacgatgccgggcagattgcctcgaccctgcgcgagcagggagtgatcgtccgccatttcaagcaggcgcggatcgaccagttcctgcgtatcaccatcggcagtccggagcagaaccaggcgctactggacgccctgcacttcctcaagtga

SEQ ID NO: 342817 - DNA, 1170 bp, Pseudomonas aeruginosa
atgcccaaggccctgcgtttcctcggctggcccgtgctggtcggcgtgctgctggccctgctgatcatccagcacaaccccgagctggtcggcctgccacgccaggaggtgcacgtcgagcaggcgcctctgctcagccgcctgcaggaaggcccggtgtcctatgccaacgcggtgagtcgagcggctccggcagtggccaacctgtacaccaccaagatggtcagcaagccctcccaccccctgttcgacgacccgatgttccgccgcttcttcggcgacaacctgccgcaacagaagcgcatggagtcgagcctcggctcggcggtgatcatgagcgcggaaggctacctgctgaccaacaaccacgtgaccgctggcgccgaccagatcatcgtggccttgcgcgacggccgcgaaaccatcgcccagttggtcggcagcgacccggaaaccgacctggccgtgctgaagatcgaccttaagaacctgccggcgatgaccctcggccgctccgacggcattcgcaccggcgacgtctgcctcgccatcggcaacccgttcggcgtcggccagaccgtgaccatgggcatcatcagcgccaccggacgcaaccagctcggcctgaacacctacgaagacttcatccagaccgacgcggcgatcaaccccggcaactccggcggcgcgctggtggacgctgccggcaacctgatcggcatcaacacggcgatcttctccaagtccggcggctcccagggtatcggcttcgccatcccgaccaagctggccctggaggtcatgcagtcgatcatcgagcacggccaggtgatccgcggctggctcggcgtcgaggtcaaggcgctgaccccggaactggcggagtcgctgggcctcggcgaaaccgccgggatcgtcgtcgccggcgtctatcgcgacggcccggcggcgcgcggcggcctgctgccgggcgacgtgatcctgaccatcgacaagcaggaagccagcgacggccgccgctcgatgaaccaggtggcgcgcacccgtccgggacagaagatcagcatcgtggtgctgcgcaacggacagaaggtcaacctgaccgccgaggtcggcctgcgtccgccgccggcaccggctccacagcagaaacaggacggcggcgagtga

SEQ ID NO: 342818 - DNA, 759 bp, Pseudomonas aeruginosa; identical to SEQ ID NO: 321458

SEQ ID NO: 342819 - DNA, 1104 bp, Pseudomonas aeruginosa
atgcgccgtaccgccctcgccctgcccctgttccttctggtctcagcatgcagcagcgaaccgacgccaccaccgaaacccgccgccaaaccccaggctcgcaccgtcatttcaccccgccccgtacgccagtcggtgcaaccgatactgccgctgcgcggcgattacgcgaacaatccggcggcacagcgcttcatcgacaggatggtcagccagcacggcttcaaccgccagcaactgcacgatctgttcgcccagacccagcgcctggactgggtgatccgcctgatggaccggcaagccccgacctatacccaaccaagcggaccgaacggcgcctggctgcgctaccggaagaagttcgtcacgccaggcaacgtacagaacggcgtgctgttctgggaccaatacgaaaccgacctgcaacgggcatcgcgcgtctacggcgtgccgccggagatcatcgtcggcatcatcggcgtggaaacccgctgggggcgtgtgatgggcaagacgcggatcatcgatgcgctgtccaccctgtccttctcctaccctcgccgcgcggaattcttcagcggcgaactggagcaattcctcctccaggcgcgcaaggaaggcaccgacccgctggccctgcgcggttcctatgccggcgccatgggctacggccagttcatgccgtcttcattcaccaagtacgcggtggacttcgatggcgatgggcatatcgacctgtggaatccgcgtgacgccatcggcagcgtcgccaactatttcaagcagcacggctgggtcagcggcgatcgcgtggcggttcccgccagtggccgggctccctcgctggaagatggcttcaagacgctgtacccgctggacgtgctcgcttccgccggattacgcccgcagggtccgctcggcggccaccggcaagccagcctgctgcgcctggacatgggcaggaactaccagtactggtacggcctgccgaacttctacgtgatcacccgctataaccacagcacccactacgcgatggccgtctgggaactgggcaaggaagtcgaccgggtgcgtcaccgctccgtcgtcaggcaggattag

SEQ ID NO: 342820 - DNA, 918 bp, Pseudomonas aeruginosa
atggtcgacaaactgacgcacctgaaacagctggaggcggaaagcatccacatcatccgcgaggtggccgccgagttcgataacccggtgatgctgtactcgatcggcaaggattccgcggtcatgctgcacctggcccgcaaggccttcttccccggcaagctgcccttcccggtgatgcacgtggacacccgctggaaattccaggagatgtacaggttccgcgatcggatggtcgaggaaatgggcctggacctgatcacccacgtcaacccggacggcgtcgcccagggcatcaacccgttcacccacggcagcgccaagcacaccgacgtgatgaagaccgagggactcaagcaggccctggacaagtacggtttcgacgctgccttcggcggcgcgcgccgcgacgaggagaagtcgcgggccaaggaacgggtctattcgttccgcgacagcaagcaccgctgggacccgaagaaccagcgtcccgagttgtggaacatctacaacggcaaggtgaagaagggcgagtcgatccgcgtcttcccgctgtccaactggaccgagctggacatctggcaatacatctacctggaaggcatcccgatcgtcccgctgtacttcgccgccgagcgcgaggtcatcgagaagaacggcacgctgatcatgatcgacgacgagcgcatcctcgagcatctctctgacgaagagaaagcccgcatcgagaagcgcatggtgcgcttccgtaccctcggctgctacccgctcaccggcgcggtcgagtccagcgccaccacgctgccggaaatcatccaggaaatgctcctgacgcgtacttccgaacgccagggtcgggtcatcgaccatgaccaggccggttcgatggaagaaaagaaacgtcagggctatttctga

SEQ ID NO: 342821 - DNA, 1902 bp, Pseudomonas aeruginosa
atgtctcatcaatccgatctgatcagcgaggacatcctcgcctacctggggcagcacgaacgcaaggaactgctgcgcttccttacctgcggcaacgtcgatgacggcaagagcaccctgatcgggcgcctgctgcacgactccaagatgatctacgaggatcacctggaggccatcacccgcgactcgaagaaagtcggcaccacgggcgacgacgtcgacctggcgctgctggtcgatggcctgcaggccgagcgcgagcagggcatcactatcgatgtggcgtaccgctacttcagcaccgccaagcgcaagttcatcatcgccgacacgcccggccatgagcagtacacccgcaacatggctaccggtgcctcgacctgcgacctggcgatcatcctgatcgatgcccgctacggtgtgcagacccaaacccgccggcacagtttcatcgcgtccctgctgggtatccggcatatcgtggtcgccatcaacaagatggacctgaaggacttcgaccagggtgtcttcgaacagatcaaggccgactacctggcctttgccgagaagatcggtctgaagaccagttcgctgcacttcgtgccgatgtcggcgctcaagggcgacaacgtggtcaacaagtccgagcgttcgccctggtacgccggccagtcgctgatggaaatcctcgaaaccgtcgagatcgccgccgaccgcaacctcgatgacatgcgcttcccggtgcagtacgtgaaccggccgaacctgaacttccgcggtttcgccggcaccctggccagcggcgtggtgcgcaagggcgacgaagtggtggcattgccgtcgggcaagggcagcaaggtgaaatccatcgtcaccttcgagggcgaactggagcaggccggtcccggccaggccgtcaccctgaccctggaagacgagatcgacgtttcccgcggcgacatgctggtgcatgccgacaatcgcccgctggtcaccgacggcttcgatgccatgctggtgtggatggccgaggagccgatgcttccgggcaagaagtacgatatcaagcgcgctaccagctatgtgccgggttcgattccgagcatcgtccacaaggtggacgtgaatactctggagcggaccccgggcagcgagctgaagctgaacgagatcgccagggtcaaggtcagcctggacgcgcccatcgcgctcgatggctatgagcagaaccgcaccaccggcgccttcatcgtcatcgatcgcctgaccaacggcaccgttggcgccggcatgatcatctccgctccgtcggcggcccatggcagcagcgctcatcacagttcgaatgcccatgtgacgcgcgaggagcgtgccggccgcttcggccagcagccggcgaccatactgttcagcggcctctccggcgccggcaagagcaccctggcctacgccgtggagcgcaagctgttcgatatgggccgcgcggtctacgtgctggacgggcagaacctgcgccacgacctgaacaaggggttgccgcaggaccgcgccggacgcaccgagaactggctgcgcaccgcccatgtcgccaagcagttcaacgaggccgggttgatcagcctctgcgccttcgtcgcgccgagcgcggaagggcgcgagcaggccagggcgctgatcggcgccgagcgcctgatcaccgtctatgtgcaggcgtcgccgcaggtttgccgcgaacgcgatccacaggggctgtatgcggcgggcgaggacaatatccccggcgagtccttcccctacgacgtgccgctggatgccgacctggtgatcgatacccaggcgctgagcgtcgaggacggcgtgaagcaggtgctcgacctgttgcgcgagcgccaggcgatctga

SEQ ID NO: 342822 - DNA, 447 bp, Pseudomonas aeruginosa
gtggaacagtcgctcaccgcctggctgctgccggccctcgccctggtcgccggggtcgccatcggttttctgatcgcccgcctgctgcccaacgccgcgccgaataaggtgcaacgccagatggacgacctgcaggaccgcttcgacagctatcagcgcgaagtcgtgacccatttcaacaccaccgccagcctcgtgaagaagctgacccagagctaccaggacgtgcaggagcacctctccgacggcgcccagcgcctggccctggacgaacagacccgccagcgcctgctggctgcgctgcatgccgacgaggcctatccggccgagcgccgcgagcgcctgactccgccggcctccggcgaagtgccgaaggactatgcgccgaaaagcccggacagccccggcaccctcgacgccacctacggcctgaaaggcaagtactga

SEQ ID NO: 342823 - DNA, 630 bp, Pseudomonas aeruginosa; identical to SEQ ID NO: 321453

SEQ ID NO: 342824 - DNA, 1347 bp, Pseudomonas aeruginosa
atgactactcgtatcctgaccggcatcactcctaccggcactccgcacctgggcaactacgccggcgccatccgcccggcgatcctcgccagccgtcggagcgacgtggattcgttctacttcctggcggactaccacgccttgatcaagtgcgacgatcccgctcgtatccagcgctcgcgcctggaaatcgccgcgacctggctggccggcggcctggacgtcgagcgtgcgaccttctaccggcagtcggacatccccgagattcccgagctgacctggttgctcacctgcgtcagtgccaagggcctgctcaaccgcgcgcatgcctacaaggccgcggtggaccgcaatgtcgaggccggcgaagacccggacgccggcgtgaccatgggcctctacagctatccggtgctgatggccgcggacatcctgatgttcaacgcgcacaagatcccggttggccgcgaccaggtgcagcacgtggagatggcccgcgacattggccagcgtttcaaccacctgttcggcaacggccgcgagttcttcgtcctgcccgaagcggtgatcgaggaaaacgtcgccaccctgccgggcctggacgggcgcaagatgtccaagagctacgacaacaccatcccgctgttcagcccgtccaggcagctcaaggacgccatcgcacgcatcgtcaccgactcgcgcgcgccgggcgagccgaaagacccggacagttcgcacctgttccttctttactcggccttcgccagcgccgaacaggtcgccgcgttccgccaggaactgctcgacggcctggcctggggcgaagccaagcagcgcctgttccagttgctcgacaacgaactgggcgaggctcgcgagcgttaccaggcgctgatcgccaagcccgacgatatcgaggacattctcctcgccggcgccgccaaggcgcgccgcatcgccaccccattcatcgccgagttgcgcgaggcagtcggcctgcgctccctgcgcgagccgctgaaaagtgccgagagcggcacgaagaaggccgccaaggctgcgcgcctggtcagcttccgcgacgacgacggcagcttccgcttccgcctgctggacgccgccggcgaacagctactgctgtcccgcgccttcgccgatggcaaggccgccggtgcggtgagcaagcgcctgctggctggcgagactgccgacctgcgggccgagggcaatgcctttggcctgtggctggatggcgaggcggtggcgcagagcccggccttcgccgacgccgccgcccgtgacgccgccatcgagcgcacccgcgaagcgctggcaccgcaggagtag

SEQ ID NO: 342825 - DNA, 1095 bp, Pseudomonas aeruginosa
atgacgcccctcgagcgctaccaggccgatctccaacgccccgatttcttccacgatgccgcacaggcgaatgccgtgaagcatctgcaacgcctctacgatgacctggtcgccgccgaccacgccaagcccggcctgttcggcaagctgctcggcaggaagtccggcgggccggtgaagggcctgtatttctggggcggcgtcggccgtggcaagacctacctggtggacactttcttcgagtcgctgccgttcgagcagaaggtgcgcacgcacttccaccgcttcatgaagcgggtgcacgaagaactgaagaccctcaagggcgagaagaacccgttgaccatcatcggcaagcgcttcgccgacgaggcgcgggtgatctgtttcgacgagttcttcgtctccgacatcaccgacgcgatgatcctcgccaccctgctggaagagctgttcaagaacggcgtgagcctggtggcgacctccaacatcgtgccggacggcctgtacaaggacggcctgcaacgcgcccgtttcctgccggcgatcgccctgctcaaggagcataccgagatcgtcaacgtcgatagcggcgtcgactatcgcctgcgcgcgctggagcaggccgagctgttccactggccgctcagcgaacaggtcgaggaggagatggcgcgcagcttcaaggccctgaccccggactgtgccaaggcccagcgcgacgaggcgctgatgatcgagaaccgcgagatccgcgcgcgcctgacctgcgacgacgtggcctggttcgaattccgtgagctgtgcgacggcccgcgcagccagaacgactacatcgaactggcgaagattttccacgccgtgctgatctccaacgtcgagcagatgggcgtcaccaaggacgacatggcgcggcgtttcatcaacctggtggatgagttctacgaccgcagcgtcaagctgatcatctccgccgaggtcgagctaaaggatctctacagcggcggccggctggagttcgaattccagcgcaccctcagtcgtctgctggaaatgcagtcccacgaatacctgacgcgtccgcaccggccctga

SEQ ID NO: 342826 - DNA, 963 bp, Pseudomonas aeruginosa
atgcgcctttatctgctcgccttcctggccctcttcggtatgaatgctatggccgccgacaactggaaagccttcccctacgaccagagcgcctatgactatccaggcgacaagttgaaggaagcctggccgcgcctgacccgcggcttcggcgactatccctatccggacgccgactgggtggtgaacatggcgaccgcccatccggatgccctggaaaagaccgtaaaggccggcaccggcttcaccggcaagccggaagaggccgcgcaatatgcggcacgactgcaggatgtctggcgcctgctgttccgcggcgactacgccaaggccaaggagcagggactggccctgggagtcggcggccaggtaccggcgatgttcgcccaggtgctctacgccatgttcctggctcccgaccaggcggagaaacagcgcctgctcgaagaagtcatcgactacaccgaacaggccggcccgctggtcaaggccgatatcgtcgcccagttcggcagcgtctacgccaaggcgcgcctggccgaggagctatcggtaccggtagtgctcaagcgcggctataccagcgaaatacccaaggaactggacgctctcctggccaggcaacccaaccagccgttcgccctggcgctctacggcggctacgaggcgggagtgatccgcaaggtcggcaagctggtcggcaagatgacctacggggtcagcgccgacaagatggagcagtacttcgcccgctccttccgccaggccaacgacctgccgatcggccactacgagtacgccaacgcgctgacctacgtatacggcgacaacgagcgggagaaggccatcgcccaactgaagcaggccgtggcgatcaagccgatcaacgccatggaagccctcgaagtggcccatgcgaagaagctcctcgccggcttcgagcagaacaccgcgcagcgctga

SEQ ID NO: 342827 - DNA, 999 bp, Pseudomonas aeruginosa
atgcgcgctcaatccgctccggtgctgaaacatgtcggcatcgtcgccatcgacggcgtcttcgcctcgaccctgatgcaggccaaggacttcttccacatggccagcctgcgccacggcaagcagcagggcctcggtctccagccggccttccgcacccgcatcctcagccccgacggccagccggtacgcagcttcagcggcgacagcatcgccgtcgacggtcccctcgccgcctgcgatatcgtggtcctgcccgccttctggggcgatttcgacgcgctcgaacggcgctatccgcaaatcgttccctggttgcgccgcagccatgccgagggaaccgccctctgcggcgaggcgaccggggtcttctggctggcccaggcaggtctgctggatggcaaggaagcgaccacctactggcgcttctatcgagaattcgccgaacgcttcccgaacgtgctgctcaatcaggagaagcacctgaccgatgccgacgacctgttctgcgccagcggcgtcacctccgcctgcgacctctacatctatctgatcgagcgtttctgcggcggatcggtggcccaggcggtggcccgggataccctctacgaagtacagcgcagctacaccccagggcgcatcggcttcggcggacagaagctgcaccatgacccgacgatcctgcagatccagcaatggctggaagaccacttcgccgacaagttccgtttcgaggacgtcgcccgcgaccacggcatgagcatccgcaacttcatgcggcgcttccaggccgctaccggcgacaagccgctgcactatctgcagcgactgcggatcgagaccgccaagggcatgctctcgagcacgcgcaagagcatcaagacgatcagctacgaggtcggctacgacgacgccagcttcttcgcccgcctgttccgccagcacaccgaactctctccccaccattaccgtcgccagttcatgcagaaggaaagctga

SEQ ID NO: 342828 - DNA, 1137 bp, Pseudomonas aeruginosa
atgataccgagaaccctgttcagctccgaccacgaactgtttcgcgacagcgtgcgcaagttcctcgaacaggaagccgtgcctttccatcaccaatgggaaaaggatgggcatgtcgaccgcgcgctctggaacaaggccggcgaggccggaatgctctgttcgcacctgccggaagagtatggcgggatgggcgcggacttcctctacagcgccgtggtcatcgaagagatcggtcgggccggcctgaccgggatcggtttctccctgcattcggacatcgctgcaccctacatcctccactacggcagcgaggcgctgaagcgcaagtacctgccgaagctggtatccggcgagatggtcgcggccatcgccatgaccgagccgggggctggttccgacctgcaaggggtgaagaccactgcggtactggatggcgacgagtacgtcatcaatggctcgaagaccttcatcaccaacggcttcctcgccgacctggtgatcgtggtggcgaagaccgatccgaaggctggcgccaagggcataagcctgttcgtggtcgaggcgggtacgccgggcttcagcaagggcaagcgcctggagaaggtcgggatgaaggcccaggacacctccgagctgttcttccaggatgtgcggattccccgggagaacctgctcggcaaggacggccagggattcatctacctgatgcaggagctgccgcaggagcgcctgaccgtcggtatcggcgcgctggcgtcggccgaggcggccctgcaatggacgctcgactacactcgcgagcgcaaggcgttcggcaagtcggtggcggacttccagaatacccgcttcaagcttgccgagatggctaccgagatccaggtcggccgggtcttcgtcgatcgctgtatggagcagcatctccagggcaagctggacgtacccaccgccgccatgtgcaagtactggacgacggacctgcaatgcaaggtgctcgacgaatgcgtgcagttgcacggcggctacggcttcatgtgggaatatccggtggcgcgggcctgggccgatgcccgggtgcagcggatctacgccggtaccaacgagatcatgaaggagatcatcgcgcgggccctgtga

SEQ ID NO: 342829 - DNA, 1038 bp, Pseudomonas aeruginosa; identical to SEQ ID NO: 321447

SEQ ID NO: 342830 - DNA, 429 bp, Pseudomonas aeruginosa; identical to SEQ ID NO: 321446

SEQ ID NO: 342831 - DNA, 393 bp, Pseudomonas aeruginosa; identical to SEQ ID NO: 321445

SEQ ID NO: 342832 - DNA, 594 bp, Pseudomonas aeruginosa; identical to SEQ ID NO: 321444

SEQ ID NO: 342833 - DNA, 1212 bp, Pseudomonas aeruginosa; identical to SEQ ID NO: 321443

SEQ ID NO: 342834 - DNA, 783 bp, Pseudomonas aeruginosa; identical to SEQ ID NO: 321442

SEQ ID NO: 342835 - DNA, 618 bp, Pseudomonas aeruginosa
atggcttcaatcaacaagctgacctgctattccgaccctgccgatcattactgccatcgcatccgcctggtcctggccgagaagaacgtggcggtagaggtgatcgatatcgaggcgggccgctgtccgccgatgctggcggaggtcaacccctacggcagcgtaccgaccctggtcgatcgcgacctggcgctgtacgagccgacggtggtcatggaatacctcgacgaacgctatccgcatccgccgctgctgcccgattatccggtgaagcgtgccaacagccgcctgttgatccatcgtatccagcgggactggtgttccctggtggaccggatcctggatgcgcgcagcaaggaggccgagcgggtccaggcgcgcaaggagttgcgcgagagcctgaccggggtttccccgctgttcgccgacaaggcatatttcctcagcgaggatttcagcctggtggattgctgcctgttgccgatcctctggcgtctgccgttgctgggcatcgagttgccgcggcaggccaagccgttgctcgactacatggagcgcggattcgcccgggaaagcttccgggccagcctgtcttccgttgaacgagatatgcgttaa

SEQ ID NO: 342836 - DNA, 408 bp, Pseudomonas aeruginosa; identical to SEQ ID NO: 321440

SEQ ID NO: 342837 - DNA, 579 bp, Pseudomonas aeruginosa
atgagccgtaccgccttcgtcgccgccaccctggccctgagcctggccctgggaggctgcagcagtttcctcagcgccacccgggacaaaccgatcgacgacgatcgcgggacccgaaccatcggcagcaagatcgacgactcgctgatcgagaccaaggccgcggtgaacatcgccaaggccgatccggccctggacaaggactctcacatcgtcgtggtcagctacaacggcatcgttctgatcgccggccagaccccgcgcgccgacctcaagagcaaggccgaacaggccgcgcgcacggtgcagaaggtcaagaacgtgcataacgaactgcaggtgacctcgccctcctccctgctcgcccgcaacaacgacgcctggatcaccaccaagctgaagacccagatgctcagcgatcccaacgtgccctcgtcgcggatcaaggtggtcaccgagaacggcatcgtctacatgatgggcctggtcaaccagcaggaagccgcccaggctgtccgcgtcgcccagggcgtcgacggggtgcagaagatcgtcaagctgttcgaatacataaactga

SEQ ID NO: 342838 - DNA, 594 bp, Pseudomonas aeruginosa; identical to SEQ ID NO: 321438

SEQ ID NO: 342839 - DNA, 246 bp, Pseudomonas aeruginosa; identical to SEQ ID NO: 321437

SEQ ID NO: 342840 - DNA, 1815 bp, Pseudomonas aeruginosa
atgatcgcttgcctgcgtccgctttctgctctgatcctggccggtctgctgaccgcctgcgcgacctcgtccaattccggactgggcgaacttccccgtacgccgaatgccagcatcgagcagttgttgcaacaggccagccagagcaagcccgaggacgcggcgctgctgcgcctctcggcagcggaccttgcctaccagcagagggacctcgccaggtccaccgccatcctgggacagattccgctggaaagcctgaagccggcccagcaggtcttcgccagcaccctgaacgccgaactggccctcgcccgcagcaagcccaaggccgccctgcaggcattgcagcatccgagcatgcagcatctcagcgaactgccggtgacccagcaggttcgtacccagcgcgccaaggcccaggccctcgccgccgacggccaggtccttgccgcagccaaggagcgcatctacttcgcaccgctgctcgagggcccggcggtgatcgagaaccaggaaaagatctggaccctggtcagcagcctgccggtcgaccagttgcaaccgagcgccaacgaaggcgacctcagcggctggctgaccctggcacgcatcaccaagacctcgccgaccctgcagcaacagcaggccagcatcgagagctggcaacagcagaaccccgagcacccggcggccaagcacttgccggcggcgctggagaaactcaagacgctgtcccagcagccgctgacccgcatcgccctcctgctaccccagcaggggcagttggccaacgtcgcccgggccctgcaggacggcttcctcgccgcccacttccaggcccagcaggccggccagaatcctccttcgatcaagctctacgacagtacccaggtgcgctcgctagatgacttctaccgccaggcccaggccgatggcgtcgaactggtcgtcggtccactggagaagccgctggtcaagcaactcgctagccgcgagcaactgccgatcaccaccctcgcactcaactacagcgacaacagccaggaaggcccggcgcagctgttccagttcggcctcgccgccgaggacgaagcgcgcgcggtggccagccgggcctggggcgacggcatgcgccgggccgtggcgctggtgccgcgcggcgaatggggcgaccgcgtgttggccgccttcagccagagctggcagtccgcgggcggcagcctgatcgccgccgagcatgtcgaccagccggtacaactggcgcaacagatcgccgacctgctgcaactgcgccagagcgaaggccgcgcccagcgcctgcagggcgccctcggcagccagatcgccacccagccgtcgcgccgccaggacatcgacttcgtgttcctcgccgccaccccgcagcaggcccgccagatcaagccgaccctggccttccagtacgccggcgaccttccggtctacgccacttcgcacctctacaccgggaccaacaacccgacccaggaccaggatctcaacggcatccgcttctgcgagaccccgtggctgctcaaccccagcgacccgacccgccagcaggtcgccgcccaatggccccaggccaacggcagcatgggccgcctctacgccatgggcgtcgacgcctaccgcctcgctccgcgtctgcctgaactgaaggccgtgccgagcctgcagatcgacggcctgaccggtaccctgagcctgaatccgacccaacgtatcgaacgccagttgcaatgggccgagttccgcaatggccaggtccagccgctggggaccagcagcttttga

SEQ ID NO: 342841 - DNA, 849 bp, Pseudomonas aeruginosa
gtgtcagcaggcactctgttcgtagtggcgaccccgatcggcaatctcgacgacatcagcccgcgcgccctgcgggtgctgcgggaggtggccctggtggctgcggaggatacccgccattcgatccggctgttccagcacttcggcatcgagacgccattggcggcctgtcacgagcacaacgagcgcgaggagggcgggcgcttcatctcccggctgcagggtggggaggacgtcgcgctgatctcggacgccggtaccccgctgatttccgatcccggcttccacctggtgcgccaggcacaggcgctgggtatccgggtggtcccggtgccgggctcctgcgcgctgatcgcggcgctgtcggcggcgggattgccgtcggaccggttcatcttcgaaggtttcctgcccgccaaggctgcgggacgacgcagccgcctccaggcggtacaggaagagccgcgcacgctgattttctacgaggcgccccatcgtctgctggaaagcctggcggacatgcgcgacgtgttcggcggggagcgccgtgcggtgctggcgcgggagctgagcaagaccttcgagaccattcgcagcctgccgttggccgaactgcacgattgggtcgcgtcggacagcaaccagcagcgcggcgagtgcgttgtgctggtggcggggtggcaggcgccggaaggcgaggagtcgatcggtgcggaggcgctcagggtgctcgacctgctgcttgccgagctgccgttgaagaaagccgcggcgctggcggcggaaattaccggggtgcgaaaaaaccttttgtatcaacaggctttgcaacgccaagggaagagttga

SEQ ID NO: 342842 - DNA, 405 bp, Pseudomonas aeruginosa; identical to SEQ ID NO: 321434

SEQ ID NO: 342843 - DNA, 942 bp, Pseudomonas aeruginosa
atgaatgccacctaccgccatatcaccgttctgctcgaggaggccgtttccgcactggccccgcgggaggacggctgctatctggacggtaccttcggaagagggggccatagtcgagccttgctcgagaaactgggcgccgggggacgcctgctcggattcgacaaagatccccaggccatccagacaggaaaagcattggcggccgaagacggccgcttcgtcattgtgcagcgctcgttcgccgaactgggcgatgaggtgcgcgcacgcggtctcgaagggcgggtcgatggcgtcctgctcgaccttggcgtgtcgtcgccgcaactcgacgatcccgagcgcggcttcagcttcctcaacgatggtccgctggacatgcgcatgaatcccggccagggcatcagcgcagcggagttcatcgccaatgccgccgaagaggaaatcgcccgggttttcaaggaatatggcgaagagcgcttcgccaagcggatggctcgcgccatcgtgcagcgccgccaggagcggccgttcgaacgaactgccgatctcgccgaagtgatcacggttgccaaccccgcctgggagaagggcaagaatccggcgacccgcgcattccagggcctgcgcatccatgtgaacaatgagctgggcgatctcgagcgtggccttgacgccgcgctcgaatcgctggccgtcggcggccggctggtggtgatcagtttccattccctggaagaccgcatcgtcaagctgttcatgcgcaagcacgccaagggcgaggcggacaacttgccgcgcgacctgccgatccgttccaaggtcttcgagccgcgcctgaagctgctgggcaagccgcagtacgcttcggaagaagaactcaaggccaacccgcgctcgcgcagcgcggtcatgcgcgtggcggagaagctgagatga

SEQ ID NO: 342844 - DNA, 294 bp, Pseudomonas aeruginosa
atgagccgtctcttcgtcaagcgcctgcctaccggcagctttctcatgttgctgctttatataggtctgctgctctcggcgattgccgtggcctacagcacctactggaaccggcaactgctcaactcgctgtattccgagctgagcgtgcgcgacaaggcgcaggccgagtggggccggttgattctcgagcagagcacctggaccgcccatagccgcatcgaaagcctggcggtggaacagttgcgcatgcgcgttcccgacccggccgaggtcaggatggtggcgccatga

SEQ ID NO: 342845 - DNA, 1740 bp, Pseudomonas aeruginosa
atgaaactgaattatttccagggcgccctctacccatggcggttctgcgtgatcgtcggcctgctgctggcgatggtcggcgccatcgtctggcgaatcgtcgacctgcacgtgatcgaccatgacttcctcaagggccagggcgacgcgcgtagcgtgcggcatatcgccatccctgcgcaccggggcctgatcactgaccgcaacggcgaaccgctggcggtgagcaccccggtcaccaccctgtgggccaaccccaaggagctgatgaccgccaaggaacgctggccgcaactggcggcggcgctcgggcaggataccaagctgttcgccgaccgcatcgagcagaacgccgagcgcgagttcatctatctggtccgtgggctgaccccggagcagggcgaaggcgtgatcgccctgaaggtgcccggcgtgtactccatcgaggagtttcggcgtttctacccggctggcgaagtggtggcccatgcggtcggctttaccgatgtcgacgaccgcggtcgcgaaggtatcgagctggctttcgacgaatggctggccggcgtgccgggcaagcgccaggtgctcaaggatcgccgtggccgcgtgatcaaggacgtgcaggtcaccaagaatgccaaaccgggcaagacccttgcgctgtccatcgacctgcgcctgcagtacctggctcatcgcgaactgcgcaacgctctgctggaaaacggcgccaaggccggcagcttggtgatcatggacgtgaagaccggggagatcctggccatgaccaaccagcccacctacaacccgaacaatcgtcgtaacctgcagccggcggccatgcgcaaccgggcgatgatcgacgtgttcgagccgggctcgacggtcaagccgttctcgatgagcgcggcgctggccagcgggcgctggaaacccagcgatatcgtcgacgtctacccgggcaccctgcagatcggccgctacaccattcgcgacgtatcgcgcaattcgcggcaactcgatctcaccggcatcctgatcaagtcgagcaacgtcggcatcagcaagatcgccttcgacatcggcgccgaatccatctactcggtcatgcaacaggtcggccttgggcaggacacggggttgggcttccccggcgagcgcgtcggcaacctgcccaaccaccgcaagtggccgaaggcggaaaccgcgaccctagcctacggctacggtctctcggtaaccgcgatccagttggcgcatgcctatgcggccctggccaacgacggcaagagcgtgccgctgagcatgacccgagtcgaccgcgtgccggatggcgtgcaggtgatctcgcctgaagtggcttccaccgtgcagggcatgctgcaacaagtggtcgaggcccagggcggggtgttccgcgcccaggtgccgggttaccacgccgccggcaagagcgggaccgcgcgcaaggtctcggtcggcaccaagggctaccgggaaaacgcctatcgctcgctgttcgccggtttcgccccggccaccgatccgcgcatcgcgatggtcgtggtgatcgacgagccgagcaaggcgggctacttcggcggcctggtgtcggcgccggtgttcagcaaggtcatggctggcgcgctgcgcctgatgaacgtgccgccggataacctgccgacggccaccgaacagcagcaggtcaatgctgcgcccgcaaaaggagggcgtggctga

SEQ ID NO: 342846 - DNA, 1464 bp, Pseudomonas aeruginosa
atgcctatgagcctgaaccaactgtttccccaggccgagcgcgatctgctgatccgcgagctgaccctggatagccgcggcgttcgtccgggcgacctgttcctggcggtgccgggcgggcgccaggatggtcgtgcgcacatcgccgatgccctggccaagggcgcggctgccgtggcttacgaggcggaaggcgccggagagctgccgcccagcgatgcgccgctgatcgcggtgaaggggctggccgcgcaactgtcggcggtcgccgggcgtttctacggcgagccgagccgcgggctggacctgatcggtgtcaccggcaccaacggcaagaccagcgtcagccaactggtggcccaggccctggatctgctcggcgagcgctgcggcatcgtcggcaccctcggcaccggtttctacggcgccctggagagcggccggcacaccacgccggacccgctcgcggtgcaggccacgctggccacgctgaagcaggccggcgcccgcgcggtagcgatggaagtgtcttcccacggcctcgaccagggccgcgtggcggcgctcggtttcgatatcgcggtgttcaccaatctgtcccgcgaccacctggactatcacggttcgatggaagcctatgccgccgccaaggccaagctgttcgcctggccgggcctgcgctgccgggtgatcaacctggacgacgatttcggccgtcgactggccggcgaggagcaggactcggagctgatcacctacagcctcaccgacagctcggcgttcctctattgccgcgaagcgcgcttcggcgacgccggcatcgaggcggcgctggtcactccgcacggcgagggcctgctgcgcagcccattgctcggccgcttcaacctgagcaacctgctggcggcggtcggtgcgttgcttggcctgggttatcccctgggcgatatcctccgcaccttgccgcaactgcaggggccggtcggccgcatgcagcgcctgggaggcggcgacaagccgctggtggtggtggactacgcgcatactcccgacgccctggaaaaagtcctggaggccctgcgtccgcacgcggccgcgcgcctgctgtgcctgttcggctgcggtggcgatcgcgatgccggcaagcgtccgctgatggctgcgatcgccgaacgcctggcggatggggtgctggtcaccgacgacaacccgcgcaccgaggccagtgcggcgatcatcgccgatatccgcaaaggcttcgctgccgctgacaaggttaccttcctgccgtcgcgcggtgaggcgatcgcccatctgatcgcttccgctgcggtggatgacgtggtgctcctggctggcaagggtcacgaggattatcaggagatcgacggcgtacgccatccgttctccgacatcgagcaggccgagcgcgccctggccgcctgggaggtgccgcatgcttga

SEQ ID NO: 342847 - DNA, 1377 bp, Pseudomonas aeruginosa
atgcttgagcctcttcgcctcagccagttgacggtcgcgctggacgcccgcctgatcggcgaggacgccgtcttttcggcggtttccaccgacagtcgcgccatcgggcccggccaactgttcattgccctgagtgggccgcgtttcgacggccacgactatctcgccgaggttgccgccaagggcgcggtggctgcgctggtggagcgcgaagtcgccgacgcgcccctgccgcaattgctggtgcgcgatacccgtgcggccctggggcgactgggcgcgctgaaccggcgcaagttcaccggcccgctggcggccatgacgggctccagcggcaagaccacggtcaaggagatgctcgccagcatcctgcgtacccaggccggcgatgccgagtcggtgctggctacccgtggcaatctgaacaacgacctcggcgtaccgctgaccctgctgcaactggcgccgcagcaccgtagcgcagtgatcgaactgggcgcctcgcgcatcggcgagatcgcctacacggttgagctgacccgcccgcacgtggcgatcatcaccaatgccggaaccgcccatgtcggcgagttcggcggaccggagaagatcgtcgaggcgaagggcgagatactcgaagggctggccgccgacggcaccgccgtgctgaacctggacgacaaggccttcgacacctggaaggcccgtgccagcggccgtccgttgctgactttctccctcgaccggccccaggccgatttccgcgccgccgatctgcagcgcgatgcgcgcggctgcatgggcttcaggctgcagggcgtagcgggtgaagcgcaggtccagctcaacctgctggggcggcacaatgtcgccaatgccctggctgccgccgctgccgcccatgcactgggcgtaccgctgggtgggatcgtcgccgggctgcaggcgctgcagccggtcaagggccgcgcggtagcgcaactgaccgccagcgggctgcgtgtgatagacgacagctacaacgccaaccccgcgtcaatgctggcggcgattgatatactgagcggcttttccgggcgcaccgtcctggtcctcggagacatgggcgaactcggttcctgggccgagcaggcccaccgcgaggtgggcgcctacgccgctggcaaggtgtccgcgctctatgcggtcggaccgctgatggcccacgccgtacaggcgttcggcgccacgggccggcacttcgccgaccaggccagcctgatcggggcgctggccaccgaacaaccgacaaccaccattttgatcaagggttcccgcagtgcggcgatggacaaagtcgtcgcggcgctgtgcggttcctccgaggagagtcactaa

SEQ ID NO: 342848 - DNA, 1083 bp, Pseudomonas aeruginosa
atgctcctgctgctggccgaatacctgcaacagttctacaagggcttcggcgtcttccagtacctgaccctgcgcggcattctcagcgtgctcaccgcgctgtcgctgtcgctgtggctggggccctggatgatccgtaccttgcagatccgccagatcggccaggccgtgcgcaacgacggtccgcagtcgcacctgtcgaagaagggcaccccgaccatgggcggcgccctgatccttaccgccatagccatcagcacgctgctgtgggcggatctttccaaccgctacgtgtgggtagtgctggtcgttaccctgctgttcggtgccatcggctgggtggacgactaccgcaaggtgatcgagaagaactcccgtggcctgccgagccgctggaagtacttctggcagtcggtgttcggcatcggcgccgccgtgttcctctacatgactgccgaaaccccgatcgagaccaccctgatcgtgccgatgctgaagagcgtcgagatccagttgggcatcttcttcgtggtcctgacttacttcgtcatcgtcggttcgagcaatgcagtgaacctcaccgacggtctcgacggcctggcgatcatgccgacggtaatggttgccggcgcgctgggcatcttctgctacctgtcgggcaacgtgaagttcgccgagtacctgttgattcccaacgtaccgggcgccggcgagctgatcgtgttctgcgccgcgctggtcggcgccggcctcggcttcctctggttcaacacctatccggcgcaggtcttcatgggcgacgtcggcgcgttggcgctgggcgccgcgctgggcaccatcgcggtgatcgtgcgccaggaaatcgtgctgttcatcatgggtggggtgttcgtcatggaaaccctctcggtgatgatccaggtcgcttccttcaagctgaccggacgccgcgtcttccgcatggcgccgatccatcaccatttcgaactgaaaggctggccggagccgcgcgtgatcgtgcgcttctggatcatcaccgtgatcctggtgctgatcggcctcgccaccttgaagctgcgttga

SEQ ID NO: 342849 - DNA, 1347 bp, Pseudomonas aeruginosa; identical to SEQ ID NO: 321427

SEQ ID NO: 342850 - DNA, 1200 bp, Pseudomonas aeruginosa
atgctgtcggtgttgcgccccttcccgtcgccgctgttgagccggcacggcatcgacctggacttcccgctgctggcgggttgcctggcgctgctcggcctcggcctggtgatggtgacttccgcctcttccgaggtggcggcggcgcagtcgggcaacccgctgtacttctccgtccgtcacctgatctacctggtgatcggcctgatttcctgcggcctgaccatgatggtcccgatggccacctggcagcgttggggctggaagctgttgctggtcgccttcggcctgctggtgctggtgatcacccccggtatcggccgcgaggtgaacggctcgatgcgctggatcggcttcggcctgttcaacatccagccttcggagatcgccaaggtctgcgtggtgatcttcatggccggctacctgatccgccgccagcaggaggtccgggaaagctggatgggcttcttcaagcccttcgtggtgttgctgccgatggccggcctgctgctgcgcgagccggacttcggcgccaccgtggtaatgatgggcgctgccgcggccatgctgttcctcggcggggtggggctgttccgcttcggcctgatggtgctgctggcggtcggcgcggtggtcctgctgatccagacccagccctaccggatggcacgcctgaccaacttcaccgacccctgggccgaccagttcggcgccggctatcagttgagccaggcgctgatcgccttcggccgcggcggctggttgggcatgggactgggcaacagcatccagaagcagttctacctgccggaggcgcacaccgacttcgtcttcgccgtgcttgcagaggagctgggcatcgtcggcgccctggcgaccgtcgccctgttcgtgttcgtcagcctgcgcgcgctgtacatcggcatctgggccgagcaggccaagcagttcttctccgcctacgtggcctacggcctggccttcctctggatcggccagttcctgatcaacatcggggtgaacgtcggcctgctgccgaccaagggcctgaccctgccgttcctcagctacggcggcagttcgctggtgatctgctgtgcctgtctggggatgttgctgcgcatcgaatgggaacggcgaacccacctgggtagcgaggaatatgagttcaacgaagaggactttgccgatgaaaggtaa

SEQ ID NO: 342851 - DNA, 1074 bp, Pseudomonas aeruginosa
atgaaaggtaatgtcctgatcatggcgggtggcaccggcggacacgtgttcccggcgctcgcctgtgcgcgggagttccaggcgcgcggctatgccgtgcactggctggggacgccgcgcggcatcgagaatgacctggtacccaaggccggcctgccgttgcacctgattcaggtcagcgggctgcgcggcaagggcctgaagtcgctggtcaaggcgccgctggaactgctcaagtcgctgttccaggcgctgcgggtgatccgccagctgaggccggtctgcgtgctcggcctgggtggctatgtcaccggcccgggcggcctggctgcgcgcctcaacggcgtgccgctggtgatccacgagcagaacgccgtggccggcaccgccaaccgcagcctggcgccgatcgccaggcgcgtctgcgaggcattcccggataccttcccggccagtgacaagcgtctgaccaccggcaatccggtgcgcggcgagctattcctcgacgcgcacgcccgcgcgccgctgaccggccgtcgggtcaatctgctggtgctcggcggcagccttggcgcggaaccgctgaacaagctgttgccagaggccctggcgcaggtgccgctggaaatccgtccggcaatccgccatcaggccggtcgtcagcatgccgagattaccgccgagcgttatcgcacagtggcggtcgaagcggacgtcgcgcccttcatcagcgacatggccgcggcctatgcctgggccgacctggtgatctgtcgcgccggcgcgctgaccgtcagcgagctgacggcggcgggattgcccgccttcctggtgccgttgcctcacgcgatcgacgatcaccagacccgcaatgccgaattcctggtacgcagcggcgccggccgcctgctgccgcaaaagtctaccggcgcggccgaactggccgcgcagctgtccgaggtcctgatgcatcccgaaaccctgcgctccatggcagaccaggcacgcagcctggcgaaacccgaggctacccggacggtggtcgatgcctgcctggaggtggcccgtggttaa

SEQ ID NO: 342852 - DNA, 1443 bp, Pseudomonas aeruginosa
gtggttaaagaaccgaatggcgtcacccggaccatgcgccgtatccgccgcatccatttcgtcggcatcggcggcgccggtatgtgcgggatcgccgaagtgctgctgaacctcggctacgaggtatccggctcggacctcaaggcctcggcggtgaccgagcgcctggagaagttcggcgcgcagatcttcatcggccaccaggcggaaaacgccgacggcgccgacgtgctggtggtgtccagtgccatcaaccgggccaacccggaagtggcatcggccctggaacggcggattccggtggtgccgcgtgcggagatgctcgccgagctgatgcgctaccggcacggcatcgcggtagccggcacccacggcaagaccaccactaccagcctgatctcctcggtgttcgccgccggcggcctggacccgaccttcgtcatcggcggccggctgaacgccgccgggaccaacgcccagctcggcgccagccgctacctggtggccgaggccgacgagagcgacgccagcttcctgcacctgcaaccgatggtcgcggtggtcaccaatatcgacgccgaccacatggcgacctacggcggcgacttcaacaagctgaagaagaccttcgtcgagttcctccacaacctgccgttctacggactggcggtgatgtgcgtggatgatccggttgtgcgtgagatcctcccgcagatcgcccgcccgaccgtgacctacggcctcagcgaagacgccgacgtgcgcgcgatcaacatccgccaggaaggcatgcgcacctggttcaccgtgttgcgcccggagcgcgagccgctggacgtctcggtgaacatgcccggcctgcacaacgtgctgaattccctggcgaccatcgtcatcgctaccgacgagggcatctccgacgaagccatcgtccaggggctgtccggcttccagggcgtaggccggcgcttccaggtctacggcgagctgcaggtcgagggtggcagcgtgatgctggtggacgattacggccaccatccgcgcgaagtcgccgcggtgatcaaggcgatccgtggcggttggccggagcgtcgcctggtgatggtctaccagccgcatcgctatacccgtacccgcgacctgtacgaagacttcgtgcaggtgctgggcgaagccaacgtgctgctgttgatggaggtctatccggccggcgaagagccgatcccgggagccgacagccgccagctgtgccacagcatccgccagcgcggccagcttgacccgatctacttcgagcgcgacgccgacctggcgccgctggtcaagccgctgctgcgcgctggcgacatcctgctttgccagggcgctggcgatgtcggcggcctggccccgcaactgatcaagaacccgctgttcgccggcaagggagggaagggcgcatga

SEQ ID NO: 342853 - DNA, 960 bp, Pseudomonas aeruginosa
atgaacctttgcctcgatagcctgctgaacggcacccaggatcccaaggcgttcggccgtgtcgccgtgctgttcggcggcaagagcgccgagcgcgaggtgtcgctgaagtccggcgcgatggtcctgcaatccctgctggccgccggggtcgatgccttcggcatcgatgtcggcgaagacctgctgcaacgcctggtcgaggagaagatcgaccgtgccttcatcattctccacggtcgtggcggcgaggatggcagcatgcagggcctgctcgagtgcgcgggcattccctacaccggcagcggcgtgctggcctcggcgctggcgatggacaagctgcggaccaagcgggtctggctcagcctcggcctgccgaccccggactacgcggtgctggccagcgaggatgactgccgcgaagcggcgcagcgactgggtttcccgctgatcgtcaagccggctcacgaaggctcgagcatcggcatggccaaggtcggcgggctcgacgaattgatcgcggcgtggcgcgaagcggcccgctacgactcgcaggtgctggtcgagcagtggatcagcggcccggaattcaccgtggcgaccttgcgcgggcaggtgctgccggcgatccgcctgggcacgccgcacaccttctacgactacgacgccaagtacctggccagcgatacccgctaccaggtgccctgcggtctcgacgaggccaaggaacgcgagctgaaggaactcaccgcgcgcgcctgcgacgccctgggcatccagggttgggggcgggcggacgtgatgcaggacgccaaagggcgtttctggctgcttgaagtcaacaccgcaccgggcatgaccgaccacagcctggtgcctatggccgcgcgggccgccggcctggatttccagcaactggtgctggcgatcctggccgatagccgcgaggcgaggggataa

SEQ ID NO: 342854 - DNA, 864 bp, Pseudomonas aeruginosa
atgaatggcgtactgctccgtcatcagcaacccggtggactcggccgcgctccgcgcaagccgatgccgcgcggcgccagccgtctggtggccaaggaaccgctgagcgtgcgcctgccgaaagccgacttcagtttcctcaagtacctggcctggccgctgttgctggccgttctcggctatggcgcctatcgcggcgccgagtacatcctgccgtacgccgaccggccgatcgccaaggtcagtgtcgagggcgacctcagctacatcagccagcgcgcggtgcagcagcggatctccccgtacctggcggcgagcttcttcaccatcgacctggcgggcatgcgcgggcaactggaacagatgccctggatcgcccacgccgaggtgcgccgggtgtggccggaccaggtggtgatccgcctggacgagcaactgccgatcgcgcggtggggcgacgaagcgctgctgaacaaccagggacaggcttttacgccaaaggaactggcgaattatgaacatctgccccgcttgcatggtccacagcgggcgcaacagcaggtgatgcagcaataccagttgctcagccagttgctgcgtcccctcgggttctccatcgcccgcctggaaatgagcgatcgcggcggttgggcgctgaccacggcccagggcgtcgagatccagatcgggcgcgaccacgtggtagacaagattcgccgcttcgtaagcatctacgacaaggcactcaaagatcagatttcgaacattgcgcggatcgacctgcgttaccccaacggcctcgccgttgcgtggcgcgagccggtcacgcccgcgacggtggccacggccagcgccgtgcagtga

SEQ ID NO: 342855 - DNA, 1254 bp, Pseudomonas aeruginosa
atggcaagcgtgcagagcggcaagatgatcgtcggcctcgacatcggtacctccaaggtggtggcgctggtgggcgaggtgacggccgatggccagctggaggtcgttggcatcggtactcatccgtcccgcggcctgaagaagggcgtggtggtgaacatcgagtccaccgtgcagtcgatccagcgcgccatcgacgaggcccagcagatggccggttgccgtatccactcggcgttcgtcggcatcgccggcaaccacatccgcagcctcaattcccacggcatcgtggcgatccgcgatcgcgaggtgaacccggcggatatcgaacgggtactggatgccgcccaggcggtggcgatcccggcggaccagcgggtgctgcataccctggcccaggattacgtgatcgataaccaggaaggcgtgcgcgagccgctgggcatgtccggggtgcgcctggaagccaaggtgcacgtggtgacctgcgcggtgaatgcttcgcagaacatcgagaagtgcgtgcgccgctgcggcctcgaggtcgacgacatcatcctcgagcagttggcctcggcctattcggtgctgaccgaggacgagaaggaactgggcgtgtgcctggtggatatcggcggcggcaccaccgatatcgcgatcttcaccgaaggcgcgatccgccataccgcggtgatcccgatcgccggcgaccaggtcaccaatgacatcgccatggccctgcgtacgccgacccagtacgcggaagagatcaagatccgctacgcctgcgccctggccaagctggccggtgccggcgagaccatcaaggtgcccagcgtcggcgaccggccgccgcgcgaactgtcgcgccaggccctggccgaagtggtcgagcctcgttacgacgagctgttcaccctggtccaggccgagctgcgccgcagcggctacgaggacctgatcccggcagggatcgtcctcaccggcggcacctcgaagatggaaggcgcggtcgagctggccgaggaaatcttccacatgccggtacgcctcggcgtgccgtatagcgtgaagggcctcaccgacgtggtgcgcaacccgatctattcgacgggcgtcggcctgctgatgtacggactgcagaagcagtccgatggcatgtcgatgtctgtgtcaggcagcagctacagcagcgacgaacccaaggcacctgtcctggagcggctcaaacgctgggtccagggcaatttctga

SEQ ID NO: 342856 - DNA, 1185 bp, Pseudomonas aeruginosa
atgtttgaactggtcgataacatcgcacaaaccgccgtcataaaagtgatcggtgtaggtggtggtggcggcaacgccgtcaatcacatggccaagaacaacgtcgagggcgtcgagttcatctgcgccaacaccgacgcacaagcgctgaagaacatcgcggcgcgcaccgttctgcaactcggcccgggcgtcaccaaggggctgggtgccggcgccaatccggaagtcggtcgtcaggcggctctggaagatcgcgagcgcatttccgaagtgctggaaggcgccgacatggtcttcatcaccaccggcatgggtggcggcaccggtaccggcgccgcgccgatcatcgccgaagtggcgaaggaaatgggcatcctcaccgtcgcggtggtgacccgcccgttcccgttcgaaggtcgcaagcgcatgcagatcgccgacgagggcatccgtgcgctggccgagagcgtcgattcgctgatcaccatcccgaacgagaagctgctgaccatcctcggcaaggacgccagcctgctggccgccttcgccaaggccgatgacgtgctggccggtgccgtgcgcggtatctccgacatcatcaagcgtccgggcatgatcaacgtcgacttcgccgacgtgaagaccgtcatgagcgaaatgggcatggcgatgatgggtaccggctgcgccagcggtccgaaccgtgcccgcgaggccaccgaggcggcaatccgcaacccgctgctggaagacgtcaacctgcagggcgcgcgcggcatcctggtgaacatcaccgcgggtccggacctgtccctgggcgagtactccgatgtcggcaacatcatcgaacagttcgcttccgagcacgccactgtgaaggtgggcaccgtgatcgacgcggacatgcgcgatgaactgcacgtcaccgtagtcgccaccggcctgggcgcgcgcctggagaagccggtgaaggtcgtcgacaacaccgtgcagggcagtgcaacccaggcagccgctccggcccagcgcgagcagcagtcggtgaactaccgcgacctcgaccgtcctaccgtgatgcgcaaccagtctcacggcagcgcggcgaccgcggccaagctgaacccgcaggatgacctggattacctggatatcccggcgttcctgcgtcgtcaggccgattga

SEQ ID NO: 342857 - DNA, 912 bp, Pseudomonas aeruginosa
atgatcaaacaacgcaccttgaagaacatcatccgggctactggcgtcggtctgcactcgggggaaaaggtttacctgaccctgaaaccggcgccggtggacaccggtatcgtgttctgccgcaccgacctggatccggtcgtggaaatcccggcccgggccgagaacgtcggcgaaaccaccatgtcgaccaccctggtcaagggtgacgtcaaagtggatacggtggagcaccttctctcggccatggccggcctgggtatcgacaacgcctacgtcgagctgtccgcttcggaagtgccgatcatggatggcagcgctggtccgttcgtattcctgatccagtccgccggattgcaagagcaggaagctgccaagaagttcatccgcatcaagcgcgaagtcagcgtggaagagggcgacaagcgcgccgtcttcgttccgttcgacggcttcaaggtcagcttcgagatcgatttcgatcatccggtcttccgtggtcgcacccagcaggcctcggtcgatttctccagtacttccttcgtcaaggaggtcagccgcgcccgtaccttcgggttcatgcgcgacatcgagtacctgcgttcgcagaacctggcactcggcggtagcgtggagaacgcgatcgtggtcgacgagaaccgcgtgctcaacgaagacggcctgcgttacgaggacgagttcgtcaagcacaagatcctggatgccatcggcgacctgtatctgctcggcaacagtcttatcggcgagttccgtggcttcaagtccggccatgccctgaacaaccaactgctgcgtacgttgatcgcagacaaggatgcttgggaagtggtgaccttcgaagacgcgcgtaccgcgcctatttcctatatgcgcccggcggcggcagtgtag

SEQ ID NO: 342858 - DNA, 462 bp, Pseudomonas aeruginosa; identical to SEQ ID NO: 321418

SEQ ID NO: 342859 - DNA, 924 bp, Pseudomonas aeruginosa
atgcacatcatttttctgagccggcaccatggggccgctcgctccgtccatctgcagccgcggttgctgatgctggccggggcctgcgtggtcggtgccagcctgttggccgggggcttcatgggcgcctggctgttccgcgcgccggctccggtggccggcatcgaagtcgatgccgcgctgcaggcgcagagcgccgagatcagcagcgcccgcgaggacgcgcagcggcagatggacgcactgagcgtgcatctcggcgaactgcaggcgcgcctggttcggctggatgccctcggcgaacgtctcaccgagctggccgacgtcgaccccgacgagttcgacttctccctgagcgtcggccagggtggcgtcgacgaaccgctggagggcagcgcctatgccccgccgtcgttcatggcgacgctagacgaactggcggcacgcctggatacccgcgagcagcagctcgaggtgctggagcaactgctcgccgacaggcacatcagccagtcgacctacctggccggccagccggtgcgccagggctacatctcctcgccgttcgggcgccgggtcaatccggtgagcggccgcctgagcatgcacaagggcatcgacttcgccgcgccggccggcagcgacgtggtggccgtggcggcgggggtggtgacctggtccgggcgcaagaacggctatggcaacgtggtcgaggtcgggcacgccgatggctacaccacgttgtatgcccataaccagaagaacctggtcgaggtcggtgacctggtcaagcgcggccaggtgctggccaaggtcggcagcaccggacgctccaccggctaccacgtacatttcgaagtgatgaaggatggccgggtaatgaatccgcaaagcttcatcgcacgcgcgtctgtttccgagtga

SEQ ID NO: 342860 - DNA, 2751 bp, Pseudomonas aeruginosa
atgtttgcgcctttgttgaagaaactctttggaagcaagaacgagcgtgatgtaaagcgcatggccaaggctgtacaggccatcaatgcgctcgagccccagatggtggcgctctccgacgagcagttgaaggcgaaaacggctgaattccagcagcgctacgccaagggcgaaacgctcgaccaattgctgcccgaagccttcgccgtggttcgcgaggctggcaagcgggtgatgggcatgcgccacttcgatgtccagctgatcggtggcatgaccctgcacgacggcaagatcgccgaaatgcgtaccggcgagggcaagaccctggtgggcaccctgccggtctacctcaacgcgctgtccggcaagggcgtgcacgtggtcacggtgaacgactacctggcgcgccgcgacgccaactggatgcgcccgctgtacgagttcctcggcctcagcgtcggcgtggtcactcccttccagccgccggaagacaagcgcgccgcctacgccgccgacatcacctacggcaccaacaacgaattcggcttcgattacctgcgcgacaacatggccttcagcctggacgacaagttccagcgcgagctgaacttcgccgtggtcgacgaagtggactcgatcctcatcgacgaggcgcgtaccccgctgatcatctccggccaggccgaagacagctccgagctgtacatcaagatcaacaagctgatcccgcgtctcaagcgccaggtcgaagaggtcgagggcaagccgatcgaggaaggccactacagcatcgacgagaagacccgccaggtcgaactcaacgagcagggccaccagttcatcgaggacctgctgagccagaacggcctgctcggcgaaggcgagagcctctactcggcgcacaacctgagcctgctgacccacgtttacgcagcgctgcgcgcgcacaccctgttccaccgcaacgtcgagtacatcgtccagggcgaccagatcctcctgatcgacgagcacaccggccgcaccatgcctggccgtcgcctgtccgagggcctgcaccaggccatcgaggcgaaggaaggcctgccgatccaggccgagagccagaccctggcctccaccaccttccagaactatttccgcctgtacaacaagctggccggcatgaccggcaccgccgataccgaggccttcgagttccgccagatctacggtctcgacgtggtggtgatcccgacccaccggccgatcgcgcgcaaggacttcaacgacctggtctacctgacccaggaagagaagtacgcggcgatcatcaccgacatcaagcagtgccaggccctcggccggccgatcctggtcggcaccgcgtcgatcgagagttccgagtacgtttccaagctgttgcaagaggcaggcatcgagcacaaggtgctcaacgccaagtaccacgagaaggaagccgagatcatcgcccaggctggcgcgcccggctcggtgaccatcgccaccaacatggccggccgcggtaccgacatcctcctcggcggcaactgggaagtcgaagtcgcggccctggagaaccccaccgaggagcagatcgcccagatcaaggccgaatggcagaagcgccaccagcaggtgatcgaggcgggcggcctgcacgtgatcgcctccgagcgccacgaatcccgccggatcgacaaccagttgcgcggccgtgccggtcgtcagggcgacccgggttccagccgcttctacctgtcgctggaagacaacctgatgcggatcttcgcctccgaccgggtgaagaacttcatgaaggcgctgggcatgcagtccggcgaggcgatcgagcaccgcatggtgaccaacgccatcgagaaggcccagcgcaaggtcgaagggcgcaacttcgacatccgcaagcaactgctggaattcgatgacgtagccaacgagcagcgcaaggtgatctaccacatgcgcaataccctgctgtcggcagaggacgtgggcgagaccatcaaggaattccgcgaggaaaccctcagcgccaccatcaaccagcacattccgccgcagtcgctgcccgagcagtgggacatcgaaggcctggaggctgcgctgtacagcgacttcgccgtgcgcctgccgatccagcagtggctggacgaagacgacaagctgtacgaggaaaccctgcgtagcaagatcctcgagcagatcgtcgccgcctactacgagaaggaagagctggccggcgccgaagccctgcgcgccttcgagaagcagatgctgctgcgggtgctggacgacctgtggaaggaccacctgtcgaccatggaccacctgcggcacggcatccacctgcgtggctacgcgcagaagaatccgaagcaggaatacaagcgcgagtccttcaccctgttccaggagctgctggactcgatcaagcgcgacaccatccgcgtgctgtcccacgtccaggtccgtcgcgaagacccggccgaagaggaggcccgcctgcgtcgcgaggcggaggaactggccaagcgcatgcagttccagcacgccgaggctccctcgatggagcaggccgtggccggcgaggaagaagagcttcccgagggcccggctccggtcgtgccgctcgagcctgtgcgcaacgagcagaagatcggccgcaacgagccttgcccgtgcggttccggcaagaaatacaagcactgccacgggcagctggactaa

SEQ ID NO: 342861 - DNA, 1218 bp, Pseudomonas aeruginosa
atggctgtcggtcttggccccctgtccaccctgcacccggtccccggtttcgaactcggcatcgcttccgccggcatcaagcgaccggggcgcaaagacgtggtggtcatgcgctgcgccgaaggctccagcgtggccggggtgttcaccctgaacgcgttctgtgccgcgccggtgaccctggccaaacagcgtttcctcggtgaggtgcgctacctgctgaccaataccggcaacgccaacgccggtaccggcgaggccggcctcgccgccgctgcgcaaacctgcgccaagctcgccgaactggccggggtcgccgagacttcggtgctgccatattccaccggggtgatcggcgagcccctgccggtggccaagatcgaggcggcgttgcctgcggccctggccgacctggccgaggaccactgggccgaagctgccgcggggatcatgaccaccgataccctgcccaagggcgccagccgccagttcgtgcacgatggcgtgaccgtgaccgtcaccgggatcagcaagggcgccgggatgatcaagccgaacatggcgaccatgctcggttatatcgccaccgacgccaaggtcgcccagggcgtgctgcaggatctgttgcgcgacgccgccaacaagtccttcaaccgcatcaccatcgacggcgatacctccaccaacgactgctgcatgctgatcgccaccggtcgcgcggcgctgccggaagtcacccaggccagcggcgcgctgttcgccgcgttgaagcaagcggtactggaggtttccatggagctggcccaggccatcgttcgcgacggcgagggcgcgaccaagttcgtcactgttcaggtcaacggcggcgccacccaccaggagtgcctggatgtcggctatgccgtggcccactcgccgctgatcaagaccgcgctgttcgcctccgacccgaactggggacgcattctcgccgcggtcggacgtgccggcgtggccaatctggacgtgagcaagatcgacgtgttccttggcgacgtctgtatcgccagccgtggcggccgggcggccagttacaccgaggaacagggcgcggcggtgatggcccaggccgagatcggcatccgcatcgaactgggacgcggcacctgcagcgagaccatctggaccaccgacctgtcccacgaatacgtgaagatcaacgcagagtaccgcacctga

SEQ ID NO: 342862 - DNA, 636 bp, Pseudomonas aeruginosa
atggccctgaccatcgtgattggcaatcgcaatgactcgtcctggtcgctgcggggctggctggccctgcgcatgagcggggcggcgttcgacgagatcctcgtcccgctggggcggcccgatacccgggagcggatcctgcaatattcgccgaccggcaaggtgcccttgctgaaaagcgaggatggcgacatctgggattccctggccatcgccgagtacctcgccgagcgcttccccgaggcccacctgtggccgcgcggcgaggcggcgcgggcgctggcccgttcggtttgcgcggaaatgcacagcggtttcgccgcgttgcgcggcgagctgccgatggacctgcggcgccagcagccattggtggaattgtccgaggcgacacgacaggatattcaacgtatctgcgaagcctgggcggattgccggcggcgcttcggccaggacggtccgttcctgttcggccacgccagcctggcggatgcgttctacgcaccggtggcggcgcgtttccgcagttatgcggtggagttgccggatatcgcccggacctatgtcgagacgatttatcagtggcctgcgttccgcgcctggtacgacgcggcattgcgcgagcaggccggtagttga

SEQ ID NO: 342863 - DNA, 948 bp, Pseudomonas aeruginosa
gtgaaacgagtacatgtcgccgcggccgtgattcgtggctccgatggccgggtgctgatcgcccggcggccggaagacaagcaccagggcggcctgtgggagtttcccgggggcaaggtggaggacggcgagccggtgcgcgcggcgttggcccgtgagctggaagaggaactgggcatccgtgtcgagcgggcccggccgctgatccaggtccggcacgactatgccgacaagcacgtcctgctcgatgtctgggaggtcgacgggttttccggcgaagcccacggcgccgagggccaaccgctggcctgggtggagccgcgcgagctggccgactacgagttccccgccgccaacgcgccgatcgtccaggccgcgcgcctgccggcgcactacctgatcaccccggacggattggagccgggcgagctgatcagcggcgtacgcaaggcggtggaggcgggcatccgcctgatccagttgcgcgcgccgaacatgttcagtcccgaataccgcgatctcgccatcgatatccagggactctgcgccggcaaggcgcaactgatgctgaaaggcccgctggagtggctgggcgacttcccggctgccggttggcacctgacctccgctcaactgcgcaaatacgccagcgccggtcggccgttccccgaagggcgcctgctggccgcctcctgccacgacgcggatgaactggccctggctgcctcgatgggagtggagttcgtcactctttcgccggtacagccgaccgagagccatcccggcgagccggcgctgggttgggacaaggccgccgaactgatcgccggcttcaaccagccggtctacctgctgggtggcctcggtccgcagcaagccgagcaggcttgggagcatggagcccaaggcgtggcgggtatccgtgcgttctggccgggcggcctttga

SEQ ID NO: 342864 - DNA, 579 bp, Pseudomonas aeruginosa
atgggcaatcgattgtcgaagatctacacccgtaccggcgaccgcggcgagaccggcctggccggcggacgccgggtgcccaagagccatccacgcatcgaggcgatcggcgcggtggacgaattgaacagccagttgggcctgctccttgccgagctgctggaagcgcgtggcgcacatcccggcctggaggagatcgtccaggcgctggcgccggtgcaacaccgcctgttcgacctcggcggggagctggcgatgccggagtatcgggccctggacgagacggaagtggcacgcctggaaagctgcatcgaccgctggaacgacgagctgggcccgctgaagaatttcatcctccccggcggttcccgcctggtcgcccaggcccatgtctgccgcagcctggcgcgcagtgccgaacggcgctgccaggcgctggaccaggaggaaacgctggagggcgtcggcctgtgctacctgaaccggctctccgacctgctgttcgtcgccgcccgcgccatcgcccggcgccagggcgtggcggagattctctgggaggcggcggcaaaaccggactga

SEQ ID NO: 342865 - DNA, 2097 bp, Pseudomonas aeruginosa
atgaacctgcgccagcgcctcgacaacctgcccgtagggcagaaactgctcgccgccctgctgatcctgctggccaccgtgctgctggtggccaacctggcgttcatcagcgccgcctactggatttcccaggagagcgtcgccccccaggcgatgcagaccatcggccggctgatcgccaacccggcgctcagccagccggcactcagttcgccgcagaccgccgaggtcctgctgcgccagctcaacgattaccagccgttgcgcgccgcggccctgtacgacagcaatgggctgatgctggccgacctgcaacgcggcgacaccctcaagctgccggcccgcctggaccgcctggagcactggaggcgcggcgagtaccgcctcaacgcgctgatcgaactgccccaggaaaacgcccgtcccggctacctgctgctggtggccagcggtgaactgccgagcgcgttctacaccggaaccctcaccgccagcctggcgatcctcggcgtcagcgtgctgctctggctgctggtggcgcagcagatacgccgcctgatcacccggccgatccgcgatctcgaggaactgtcgcggcaggtcacccgcgaggagaactacgccctccgcgcccagcgcggcaacggcgacgagatcggccgcctggccgacgcgttcaacaccatgctgacccgcatcgaggcccgcgagcagcagctcaagcgcgcccgcgacgatgcccaggaagcggtcgagcaggcccagagcctggccgaggaaacccgccgctcgaaccgcaagctggaactggaagtgcaggtgcgcagcaagatcgagaagaagctcaccggtttccagcactacctcaacagcatcatcgactccatgccttcggcgctgatcgcggtggacgagcaactctacgtcacgcagtggaaccaggaggccagccagctttccggcaccagcctggacgatgcggtcaaccagccggtgttcctcgcctttccctcgctcaagccgttccttccgcagctcacccgggctgccgagaagcacagcgtggagcgtgtcgaacgggtcacctgggcgctgatcgacacgccacgccactacgccctgaccttctacccgctgatgggcggcaccggccgcggcgcggtgatccgcatcgacgacatcacccagcggctgagcctggaagaagtgatggtgcaatcggagaagatgctctcggtcggcagcctcgccgccggcatggcccacgagatcaacaacccgctcggcgcgatcctgcacaacgtgcagaacatcaagcggcgcctgtccccggagctggcgaagaacgtcgagctggcggccgaggtcggagtgccgctggaagacatcaatcactacctcgacggccgcgacatcccgcgcctgctggaaggcatccagcacgccggctcgcgggcagcgaagatcgtcacccacatgctcgccttcagccgccgcagccaccggcagatgaccgcttgcgaactgcccgcactgctcgaacaggcggtggaaatcgccggtaacgacttcgacctggccgaaggcttcgacttcaagtcgttgcagatcgtccacgagttcgaccccaacctcggcccggtgccggtgatcgccaacgaggtcgagcaggtcctgctcaacctgctgaagaacgccgcccaggccatccaccagcgcgacgacgaagaggaaggcgaacagggccggatcgtcctgcgcacgcgcctgacgccgccctgggcggaagtccaggtggaagacaacggcagcggcatgcccgaactggtgcgcaagcgtatcttcgagccgttcttcaccaccaaggaagtcggccagggcaccggtctcggcctgtccgtctcgtatttcatcatcaccaacaatcacaagggccagatggaagtacgctcggaactgggccgcggcacctgcttcagcatccgcctgccgctggaaagctccgaagcggtcgcccccgcacaagccaaggccctgccgcccgctctgccgcaacccggtagcagcctgcggcggggcgacgaagaggaaggttga

SEQ ID NO: 342866 - DNA, 912 bp, Pseudomonas aeruginosa
atgacctggcatatcctcggcgccggtagcctcggcagcctctgggccgcgcgcctcgggcgcgccggcctgcccgtccgcctgatcctgcgcgaccgccagcgcctgcgccgctaccaacaggccggcggactgagcctggtggaagacggccaggccagcctctacccgatcgccgcggaaaccccggacggcgggcaacccatccagcgcctgctgctggcctgcaaggcctacgacgcggaggaagccgcctccagcgtggcccatcgcctggccggcaacgccgaactgctgttgctgcagaacggcctgggcagccagcaggcggtcgccgcccgcctgccgcgcagccgctgcctgttcgcctccagcaccgaaggcgcgttccgcgatggcgatttccgcgtggtcttcgccggccgtgggcacacctggctcggcgatccgcgcgacacaagcgcccccgcctggctggcgcagctgtcccaggccaggatcccgcacagctggagcgacgacatcctcgaacgcctgtggcgcaagctggccctgaactgcgcgatcaacccgctgaccgtcctccacgattgccgcaacggcggcctgcggcagcacccggaagagatcgccgcgctttgcgacgaactcggccagttgctccacgccagcggctacgacgccgccgccaggagcctgctggaggatgtccgggcggtgatcgacgccaccgcggccaactattcctcgatgcatcaggacgtcacccgcggccggcgcacggaaatcggctatctgctcggctacgcctgccagcatgggcagcgcctgggactaccgctgccgcgcctgggaaccttgctcgcccgcctccaggcccatctgcgccagcgcggtttgcccgaccgctaa

SEQ ID NO: 342867 - DNA, 1101 bp, Pseudomonas aeruginosa
atgcccgccggtgtggcggagaccgacgatttcttcccgatggcgcgcgcgaccgcggccgggacccggcctcccgcgacgaaccgggcccttgccggcagcgtaccggcgcccatcctcttctcgagtccgttcatgcccaaccccgatctcagcatcctggtcgtcgacgacgccaagttttccagcgccatgatcggccgcgccctcagccaggccggctaccaggacatccgcttcgccagcagcgccagcgaggccctgcagcagctcgaacaacgcccggtcagcgtgctcctggccgactggctgatgccggagatggacggcctggaactgaccgcccgggtccgccaactggacgaaagcatcaaccactacacctacatcgtcctgctcaccggcaaggaaggcgagaacgtcctcggcgaggccttcgaccgcggcgtcgacgacttcgtcagcaaggccgcaatgaacgagcaactggtgccgcgcatctacgcagccgaccgcctgtgcaacaccctgcaacggttgctggtggaaaaccgcctgctcaccgaaaacatcgcgcggatggaagaacgcaacctggtggataccctcaccggcctcggcaatccccgctacctgcgccagaagctggccgacagcctgcgccaggtggaaacccgcggtggagcgctgtgctacctgctggtcggcatgcccgaggcaccggtcctgcgccagcggcacggcgaggccttccatcgcgagctgctgctcggcgtggccaggcgcctgcaacagctggtccggccgctggacgtgctggtgcgcctggacgagcagcatttcgccctgatcaccctggtggaggacctgcacgaatgctcgtcgagcagcttcaagcggctgcacgacgggctcaacctgaaggccttcaagaccagcgaaggcttcatcagcctgaaagccggcatcgccatgctcggcctcgacagcggggcattgccgctgggcatcgacgaactgctgcagcgcaccgaggccctgttgcccgatgcctatgccagcggcaggatcgcaacctgccggctaccggcactgcgctag

SEQ ID NO: 342868 - DNA, 480 bp, Pseudomonas aeruginosa
atgccttcgttcgacgtggtgtccgaactggacaaacacgagttgaccaacgccgtggacaacgccatcaaggaactggatcgccgtttcgacctgaaaggcaaatgcagtttcgaagccaaggacaagtcggtgaccctcaccgccgaagccgatttcatgctcgagcagatgctcgacatcctgcgttccaacctggtcaagcgcaaggtcgacagccagtgcatggagatcaaggatgcctacccgtcgggcaaggtggtcaagcaggaagtgaacttccgcgagggcatcgacaaggacctggcgaagaagatcgtcggcctgatcaaggagcgcaagctcaaggtccaggccgccatccagggcgagcaggtgcgcgtcaccggcaagaagcgcgacgatctgcaggaggccatcgccctgctgcgcggcgaatccctcggcatgccgctgcagttcaccaacttccgcgattga

SEQ ID NO: 342869 - DNA, 837 bp, Pseudomonas aeruginosa
atggaattgaactacgaccgactggtgcagcagaccgagtcctggctgccgatcgtgctggagtacagcggcaaggtcgccctggcgctgctgaccctggcgatcggctggtggctgatcaacaccctgaccggccgggtcggcggcctgctcgccaggcgcagcgtcgaccgcaccctgcagggcttcgtcggcagcctggtgagcatcgtcctgaagatcctgctggtggtcagcgtggcttccatgatcggcatccagactaccagcttcgtcgccgccatcggcgccgccggcctggccatcggcctggccctgcagggcagcctggctaacttcgctggcggcgtgttgatcctgctgttccgcccgttcaaggtcggcgactggatcgaggcgcagggcgtggccggtaccgtggattcgatcctgatcttccacaccgtgctgcgtagcggcgacaacaagcggatcatcgtgcccaacggggcgctgtccaacggaacggtgaccaactactccgccgagccgctgcgcaaggtgatcttcgacgtcggcatcgactacgacgccgacctgaagaatgcgcagaacattctcctggccatggccgacgacccgcgggttctgaaggacccggcaccggtggcggtggtttccaatctcggcgaaagcgcgattaccctgtccctgcgggtctgggtgaagaacgccgactactgggacgtgatgttcatgttcaacgaaaaggcccgcgacgcgctgggcaaggaaggtatcggcattcccttcccgcagcgggtggtcaaggttgtgcagggcgcgatggccgactga

SEQ ID NO: 342870 - DNA, 1785 bp, Pseudomonas aeruginosa
atgactcagcaatcctggcgagaggccctggtcgcctacaagtctcccgccagcctggccctcctgctgctcggcttcgccgccggcctgccgaccatgctggtgttcaacaccctgtcggtgtggctgcgcgaagccggcgtggcgcgggataccatcggtttcgccagttggctggggctggtgtacgccttcaagtgggtctggtcgccgatgctcgaccagtggcgcctgcccttcatcggccgtctcggccggcgccgttcctggctggtgttctcgcaggtgctgatcgccctgggactgctcggcatggccctgtgcaatccgcagagccacctgccctggctgatcggcctggccctgctggtggcgttcgcctccgccacccaggacatcgcgatcgacgcctaccgcctggaaatcgccgaggatagccgccaggccgccctcgctgcctgctacatgaccggctaccgcgcggcgatcctgctggccagcgccggcgcgctgattctcgccgaatggttcggctccaccagcctcaactacagccagtcggcctggggcctgacctatgcgttgttcgccctgctgatcctgcctgggctggtcaccagcctgctgatccgcgagccggcggtggacgtgccgatccacgtcaacccgtcgcgtttcgacttcaaccaccaactgctctcggtgctcctgctgctgatcctgctgatctcgctgccagcgatgatcaccgccctcctcgaccgcgcctggccgcgcgccggcctctacgcgctgctcatggggatctgcctgtcgccgtggggacgccagcagatccgcccggtccgcgaactgctcgccaccgtgcgcaggccgctgctggtggcggcgcgcggcaaggaagtgccgctgttcgatttcgtccaccaggcggtctcggtgatggtgctgatcatcctcctcgtcaccgtcaccgccatgtgccgcgcctactactccggcgcctggccgcgcggcacgctgttcctgctgatcgccgcgtcctgcctgtcggcacccggacgcctgctgatggccccggtgctgacgccgatcaccgagttcgtccagcgctatcgctggcaggccctgctgctgctcggcctgatctccacctatcgcctgtcggacacggtgatgggggtgatggccggggtcttctacatcgacatgggcttctccaaggaagtcatcgccagtgtcagcaaggtcttcggcgtactcatgaccctgatcggcgccgccgccggcggggtgctgatcgcccgcttcagcatcctctccatcctgttcatcggcggtgccgcttcggctgccaccaacctgctgttcgccatgctcgcccagctcggcccgctgcacgccgaggccctgcccagccatgacgtgatcagcctggtgatggcgctcgagccgcacgtgctgatgctggtgatgaccatcaccctcgacaacttcagcggcggcctcgccgcctcggccttcgtcgcctacctgtcgagcctgaccaacctgaagttctccgccacccagtacgccatgctcagctcgaccatgctcctgctgccgcgcttcatcggcggctactccggaaccatggtcgagagcctcggctacgagcacttcttctacgtcaccgcggtgatgggcattcccaccctgctgctgatcggctggttgtggctgcgccgcgcgccgtccagcgagacgccggcgccgggtcaccagaacgccgagcagcactga

SEQ ID NO: 342871 - DNA, 384 bp, Pseudomonas aeruginosa
atgggcgttcacaaggcggacaggaaagggaaaaccgatgagcatgcatgggccggcagcgacccggcaagtgcccaggcgcgccgcgaggccctgtacctggtgctggcgcaggtgccgccggggcaggtggtcagctacgggcaactggccgaactggccggcctaggccgcgccgcccgctgggtcggcaggacgctcagccagttgccggtggatacccgcctgccctggcatcgggttctcggcgccggcggtcgcatcagcctgccggcggacagtcccggcggtcgcgaacaacgcgcacgcttgcgcgaggaaggcgttctcctgcacaacgacagggtggacatacgtcggcatggctggcttacagcgaagtag

SEQ ID NO: 342872 - DNA, 969 bp, Pseudomonas aeruginosa
atgctcctggccggccccgcgctggccgacaccgtatggctggacaacggcgaccgcctgtccggcgagatcgtgctgatggacggcggcaagctggcgctgaagacccgttatgccggccaggtgctgatcgattggaaggatatcgacaccatcagttccgacaaacccctgctgatcaagcagcagggcgtatccgggcagcgtagccgaaccctggaggcggcgggcaagggcatggtgcggatcgtcgatggcggcagccataccgtcccgctggccagtattcgccagatggtgccgccgcgaccgctggtggaggacctggtctgggagggcaatctcgacgtcaagctggatagcaagcgcaacgacagcgacaaggacgaatggaagctcaagggcgatacccggcttcgccacggtgcctggcgccacgtgctggcgggggaagtggagcgggaaaagaaggacgggcgcaaggtcgaggacaactgggagctggactacgacctcgatcgcttcttcgacgaacactggttctggcgcggcagctattcgcagaagcacgatgcgatcgacaacctggagcgccagagcgcgctgggatccggccccggctaccagttctgggacgacgaactcgggcgtttcgacctggtcgccgagatcagtcgctggcaactggagtggcgcgatcagccgcgcgaggatttcacctcctattcgctggagtgggactacaagcggctgctcgccggcacccggctggagctgtacagcaaggggaccgtgctggttcccggcatcgagcggatcgactacctgctcgacagcgaatacggcctgcgctatcgcctgaacagttgggcgcgtctttcgttcctctatgaactggaccagttgcgcaccgaggggggcacccagtccgaccggcattacctgatcggggtcggcgtcggctggtga

SEQ ID NO: 342873 - DNA, 930 bp, Pseudomonas aeruginosa; identical to SEQ ID NO: 321403

SEQ ID NO: 342874 - DNA, 759 bp, Pseudomonas aeruginosa; identical to SEQ ID NO: 321402

SEQ ID NO: 342875 - DNA, 735 bp, Pseudomonas aeruginosa; identical to SEQ ID NO: 330032

SEQ ID NO: 342876 - DNA, 540 bp, Pseudomonas aeruginosa
ttgaattcttccccggctggcgccaactactggtggtaccgggggcaaacgggccccgccaaggactctgaaatgcgcgctttcctctttctgctgttgctcttcccgctggtcgagctggccgtcctgatcaaggtcggcagtgtcatcggggtcggctggaccctgttcctgatcgtcgccagcgccttcatcggtgctgcattgttgcgcgtggccggcgtggccaccgcctggcgcgcccgcgaacgactggcccgtggcgaactgccggagcaggaaatgcttgaaggcctgttgatcgccgtcggcggcggcctgctgatgctgccgggtttcatcagcgacatcttcggcatcctctgcctgattcctttcacccgtcgcctgatgctcggcggcctgcgccgccgcgtcgaacagcaggcgctgcgccggcgcgccttcgccgacgacctgaacgcccgctacggacagggtccgtcgcggccgaacgtcatcgagggcgagtacgagcgccgcgacgattcgcgcaactga

SEQ ID NO: 342877 - DNA, 294 bp, Pseudomonas aeruginosa; identical to SEQ ID NO: 321399

SEQ ID NO: 342878 - DNA, 1644 bp, Pseudomonas aeruginosa
atggctgccaaagaagttaagttcggcgattccgctcgcaagaaaatgctggtcggcgtgaacgtgctggccgatgccgtcaaggccaccctcggcccgaaaggccgcaacgtggttctggacaagtccttcggcgctccgaccatcaccaaggacggcgtttccgtcgccaaggaaatcgagctgaaagacaagttcgagaacatgggcgcgcaactggtgaaagacgttgcctccaaggccaacgacgctgccggtgacggcaccaccaccgcgaccgtcctggcccaggccatcgtcaacgaaggcctgaaggccgttgccgccggcatgaacccgatggacctgaagcgtggcatcgacaaggccaccgtggccatcgtcgcccagctgaaagagctggccaagccctgcgccgacaccaaggccatcgcccaggtaggcaccatctccgccaactccgacgagtccatcggccagatcattgccgaagccatggaaaaagtcggtaaagaaggcgtgatcaccgtcgaggaaggctcgggcctggaaaacgaactgtccgtcgtcgaaggcatgcagttcgatcgcggctacctgtccccctacttcgtgaacaagccggacaccatggctgccgagctggatagcccgctgctgctgctggtcgacaagaagatctccaacatccgcgaaatgctgccggtgctggaagccgtcgccaaggccggccgtccgctgctgatcgtcgccgaggacgtcgagggcgaagccctggccaccctggtggtgaacaacatgcgtggcatcgtcaaggtcgcggctgtcaaggctccgggcttcggcgatcgccgcaaggccatgctgcaggacatcgccatcctcaccggcggtaccgtgatcagcgaagaagtcggcctgagcctggaaggcgctaccctggagcacctgggcaacgccaagcgcgtcgtgatcaacaaggaaaacaccaccatcatcgatggcgccggtgtgcaggctgatatcgaagcccgcgtcctgcagatccgcaagcagatcgaggaaaccacttccgactacgaccgcgagaagctgcaagagcgcctggccaagctggccggcggtgttgccgtgatcaaggtaggcgctgccaccgaagtcgagatgaaagagaagaaagcccgcgtcgaagacgccctgcacgctacccgtgcagcggtggaagagggcgtggttcccggcggcggcgtagccctggttcgtgccctgcaagccatcgaaggcctgaagggtgacaacgaggagcagaacgtcggtatcgccctgctgcgtcgcgccgtcgaatcgccgctgcgccagatcgtggccaacgccggcgacgagccgagcgtagtggtcgacaaggtcaagcagggttccggcaactacggcttcaacgctgctaccggcgtgtacggcgacatgatcgagatgggcatcctggacccggccaaggtcactcgttccgctctgcaggctgcggcctccatcggcggtctgatgatcaccaccgaagccatggttgccgagatcgtggaagacaagccggccatgggcggcatgcctgacatgggcggcatgggcggcatgggcggcatgatgtaa

SEQ ID NO: 342879 - DNA, 687 bp, Pseudomonas aeruginosa
atgcgcccagtcctgctgctttgttgcctgttcctgtccgccaccgcccaggccgaggattgctcgccgcaaacctccgtcggtagctggtgcgagctgccgctcgcggctctccacccgacccagcagaatgtcggcctgctgcaggtcgaggatgaccaggccaagctcgccgggaagaagcccaaggctctcgagcgctacttgcgcaagaaggagattccggtggtgatcggccccggcggccgcttctacctcaccgatcgccatcacctgagtagcgcgctctggcgcctggacccgaaacagggcgtgccggtgaaggtgatcggccggctaccccaggccagcgacttctgggagaagatgcaggaaaaccactgggtctggctgcacgatgcgcgtggcgcggagatcccgcccgaggccctgccgaacgctctcgccgggcttggcgacgatccctaccgcgccctggccggctacgccgaggacgagaacgccttcgacaaggatcggcagagctatttcatcgaattccactgggcgcgctatttcggcgaacgcatgcactggcggccgatcagccgcgccactctgcccgacgacctgaagcaggcactgcgcctggcctgcgaaccggcggcaagggagctgccgggctaccgccaggactgcccgcactga

SEQ ID NO: 342880 - DNA, 384 bp, Pseudomonas aeruginosa; identical to SEQ ID NO: 321396

SEQ ID NO: 342881 - DNA, 330 bp, Pseudomonas aeruginosa
atgcaaggctatcaactgaccttcatcacccagcaggggcgccgccaccagggccagccgatctgcgactggctgctggaagaggcgcgccgcctgggcgtgcgcggtgccaccgcgctggctgccagcgaaggcttcggccagagcggccggctgcattcgatgcacttcttcgagctggccgaccagccgcaggaaatcctcatggcggtcgatcccgagcagtcagaacggctgttcgagtcgatccgccaggccggcgtgcggctgttctacatgaaggtgcccatcgagttcggcgtgctgggagcggacgaatcgacttcctga

SEQ ID NO: 342882 - DNA, 795 bp, Pseudomonas aeruginosa
atgacccaggccgccgtccattccccttcccgtccattcaacccctggctgttcctcgccctgccgctgggcctggcggcactgctgctggccttcgagccggtgaccctcgacctcgccctggccaacctgatgtacgacccgggcgccggcttcatcggccggcacagttggttcctggagaacatcctgcacgaccgggtcaagcaactggtgatcgccatcagcgtcctcggcctgctggtctccatcgccggactgttccaccggccatggcgcgcactgagcaggccgctggcctatgtgttcctcgccatgagccttgcagccagcatagtcactccgctcaaggcgctcaccgccgtgcagtgcccctggagcctggcgcagttcggcggcgaggaaacctatagttcgctgctcagcccacggccgccgaccgagcaccccggacgctgctggccgggcgggcacgcatcgtccggattcgtcctgttcgcgctgttcttcgccctgcgcgaccgcaagcccaggctggcgcgctacgccctggccttcgccttcgccatgggctgtctgctatcgctgtcgcgcatgctgcaaggtgcgcacttcctctcgcacaacctgtggacgatgctgttcgactggctgatctgcctcggcctgtaccgcctgatgctctaccgaccggagacgcggggacagcgcaacggcggcgccgacgaaaaccgcgttcaggaagtcgattcgtccgctcccagcacgccgaactcgatgggcaccttcatgtag

SEQ ID NO: 342883 - DNA, 684 bp, Pseudomonas aeruginosa
atgcgaatactggtggtcgaagacaaccgcgacatcctggccaacctggccgattacctgtcgctcaagggctataccgtggattgcgcgcaggacgggctgtccggcctgcacctggcggccaccgagcactacgacctgatcgtgctcgacgtgatgctgccgggaatcgacggctatgccctgtgccggcgcctgcgcgaagacgcacggcgcgacaccccggtgatcatgctcaccgcccgcgaccagttggacgatcgcctgcaggggtttcgttccggagccgacgattacctggtcaagcccttcgccctttccgaactttccgcacgcatcgaggcggtgctgcgtcgcgcccagggtggcggccgccgcgagctgagcgtggccgatctcagctatgacctggacaccctggaggtcaagcgcgcgggcaagtcgctcaagctcaacccgatcggcctcaagctgctcgcagtgctgatgcagaagagcccccatgtggtgcgccgggatgccctggaagaagcggtctggggcgacgactgcccggacagtgacagcctgcgcagccacgtccatcaactccgtcaggtgatcgacaagccattctccgtggccttgctgcatacggtgcatggcgtcggctaccgcctggcggaggagccgaatggagtataa

SEQ ID NO: 342884 - DNA, 1281 bp, Pseudomonas aeruginosa
atggagtataagcagagcctcgcccgccggatcgtcatcgccttcatgctgatgacggtcgccgtggggggactgttctccgccggcatcgtcggcgtggtccacatcatcgaggagcgcctgatttcccgcgacctgggcggcgagctggagcgcatcctgcgcgacgacctggcccagggacgcaacccggtgctcgatcccggcatgcgcttcttcatcagcgacggccagggctcctacgccatgccgccggcgctggaccaactggatgtcggtttccacgaagtgttcgagggcgacttgtcgttccatgcgctggtgcgcgacatcgatggtcgccgcttcgtcctgctgcaggaccagagcgatttcgaagcgcgcgagcaggtgctctacgcctcggtgctgaccggctacgtgctgagcatcgccctggccggcctgcttggctggatgctcgcgcgcaaggtgatggagccggtggtgcgcctggcgcgccaggtgcggcatcgcgaacagttgctcggtctggcgccgccgttggcgccggactacgccaacgacgaggtcggcgagctggccgcttccttcgacgagacccttggccgcctgcgcgacgcgctcaagcgcgagcaattgttcaccagcgacgtcagtcatgagttgcgtacgccgttgatggtcatcgccacctcatgcgaactgctggccgaagaacccagcctcggcccgcgcgcccgtggccaactggagcggatgaccaaggccaccgaggagatgcgcgacctggtgcaaaccttcctgttgctggcgcgtgcgcagaagggcgaggaaagcctggcgccccacggtagcctggagagcatcgccgacgacctggtccaggtctggcgcgaacaggtcgaggcgcgaggactgaccctgcactaccgcaacgaaggcgcctgcgccggccagttcaacgcgccgctgctgcgcgcggtgatgggcaacctgttgcgcaacgcgacccactacaccgatgccgggagcatcacgctgaccctcgacgagcatggtttcagcgtcgaggacaccggggcgggcgtcccggaagaacaacgcgaacgcattttcatgcccttcgttcgcggcagttccagctccgggcgcggcgaaggccttggcctcgggctctcgctggtgaagcggatctgcgcggccgagggctggagcgtaaccctcagcgcggtggagccgcacggctgccggttcgaagttttactcgatgttgcttga

SEQ ID NO: 342885 - DNA, 684 bp, Pseudomonas aeruginosa
atgaacaatccgcctgtcgacctcgacttttctcacaagtatgatcgcgagcatgctgaggcctacctgaagaagcatcaggacggcctcgcccggaaactttcccaccggcgcgacgtccaactcgcccggcacgcgctgaagctcgcggggcagcccaacctggtgctcgacctgccctgcggcgccggacgcttctggccgctgctggcggaaaaggacaaccgggtgatcatcggcgccgacaattccgcggacatgctggcggtcgcctgcgccggccagccggacggtgtagtgaaacgggtacggcccttgcagacttccgctttcgccatcgacctgccggacagctcggtggacaatatcttctgcatgcggctgctccaccacatcggcgaggcggacgatcgacgcgtcctgctccgcgagtttcaccgggtcacgcgggacagcgtgattctttccctctgggtcgatggcaatttcaaggcctggaagcgtaggcgcatggaggcacggcgggtagcgaacggggaacagaccggctaccagaaccgcttcgtgttaccagccgaaacggtcgagcgcgagttccgcgacgccggcttcgtcgtccagaagcatctcgatttcatcccgctgtatcacatgtggcgggtctatatcttgcgaaaggaataa

SEQ ID NO: 342886 - DNA, 705 bp, Pseudomonas aeruginosa
atggctcccgatctggcatccctgcaacgtatctccggcgactccgccatcgaccagtggttgcaggtacccggcagctgggtcgaggagcccaacgagcggcgcggcggggcgagcggcgtgcagcgggtgtacaccggcgatggacggctgctctatcgcaagcagcagaccggccacgtctaccgcgactggcagcgccctttcggctatcccaccgccatgcgcgagcgcgatgcgctacgggccttcgagtcgctcggtatacgcgtgccgcgcctgatctattccggctgccgcaaggtcgacgggcaatggcaggcgctgctggtgaccgaagccctggagggtttctccagcctcgacgagtgctatgcgcgcggtgaccaggaccgctggggcgaagcgaagcaccaaagaattctgcaacaaatcggcgctaccattgcccggatgaatctcgcccactggcagcacggttgtctctatccgaagcacatcttcgtccgcgtcgagggtgaggccatcgaagtagcgctgatcgacctggagaagagccgccgccgccttacggtgaacaaggcgtcccagcacgacctgaagcagttgaagcgccgttcgtcgtggactggcgcgcagtggcaagccttcatctatggttaccagacggcgtttggcagcgccatcaaagggttgcagacatga

SEQ ID NO: 342887 - DNA, 243 bp, Pseudomonas aeruginosa
atgaaattagaaatcactcgaggtttgttgctggtcggcgctctcgccgtggctacagccgcggctgccgcctggcacgaacccgcgccgaacgtggtgcagatgagcggcggtcatgagtactgcccgacgccttcggcgctcaaggccgagcggccgacgcgccaggaggtccagccgaacaaggacatcctgctgctgatgttcggtctttcccaggggggagccagcctgtcgcgctga

SEQ ID NO: 342888 - DNA, 1197 bp, Pseudomonas aeruginosa
atggccgagagcgctttttccgaacgtatcgtgcagaacctgctggataccgacttctacaagctgaccatgatgcaggcggtgctgcacaactatcccaacgccgaggtggagtgggagttccgctgccgcaaccaggaagacctgcgcctatacctgccggccatccgcgaacagctggaatacctggcgggcctggcgatcagcgacgagcaactggccttcctcgaacggattcccttcctggcgccggacttcatccgcttcctcgggttgttccgcttcaacccgcgctacgtgcagaccggcatcgagaacgacgaattcttcctgcgcctgaaaggtccctggctgcacgtgatcctcttcgaagtgccgctgctggcgatgatcagcgaggtgcgcaaccgcgcccgctacccggccgccaccgtcgagcaggcgcgcgaacgcctgcaggaaaagttcgattggctgcgccgggaggccagcgccgaggaactggccggcttcaagatggccgacttcggtacccgccgccgcttctcctatcgggtccacgaggcggtggtgagcggtctgaaggaggactttccgggctgcttcgtcggcaccagcaacgtccacctggcacgcaagctcgacctcaagcccctcggcaccatggcccacgaatggctgatggcccaccagcagctcggtccgcgcctgatcgacagccagagtgccgcgttggactgctgggtccgcgaataccgtgggctgctcggcatcgcgctgaccgactgcatcaccaccgatgccttcctgcgcgacttcgacctctatttcgccaagctcttcgacggcctccgccacgactcgggcgacccattgctgtgggcggaaaagaccatcgcccactacctcaagctgggcatcgacccgctgaccaagaccctggtgttctccgacggcctcgacctgccgcgggccctgaagatctatcgcgcgctgcagggccggatcaacgtcagcttcggcataggcacgcatttcacctgcgacctgccgggcgtcgagccgatgaacatcgtggtgaagatgagcgcctgcaacggccatccggtggcgaagatctccgatacgtccggcaaggcgcaatgccgggaccctgacttcatccactacctcaagcacgtgttccaggtcgcctag

SEQ ID NO: 342889 - DNA, 3057 bp, Pseudomonas aeruginosa
atggcttttaccgatccgttcatccgtcgtccggtcctggcgagcgtggtcagcctgctgatcgtcctgctcggcatgcaggccttcagcaagctggtgatccgcgagtatccgcaaatggagaacgcgctgatcacggtgaccacgctctacgccggtgccaacgcggaaaccatccagggctacatcacccagccgctgcagcagagcctggccagcgccgaaggcatcgactacatgacctcggtgagccggcagaactattcgaccatctccatctacgcgcggatcggcgccaataccgatcgcctggtcaccgagctgctggccaagtccaacgaagtgaagagccagctgccgccggacgccgaggacccggtgctgcagaaggaggccgcggacgcctcggcgctgatgtacatcagcttctacagcgagcagatgaacaacccgcagatcaccgactacctgtcgcgggtgatccagcccaagctggcgaccctgcccggtatcgccgaggcggagatcctcggcaaccaggtgttcgccatgcgcctgtggctggacccggtgaagatggccgcgttcggcgtcaccgccggcgagatcaaccaggcggtgcagcagtacaacttcctcgccgccgccggcgaggtgaagggccagttggtggtcaccagcgtcaatgcttccaccgacctcaagtcgccccaggccttcgccgccatcccggtgaagaccgacggcgaccgccgggtgctgatgggtgatgtcgcacgggtcgagctgggcgccgccagctacgacgcgatcagttcgttcaatgggattccctcggtctacatcggcatcaagggcacgcccagcgccaacccgctggacgtgatcaaggaagtgcgggcgaagatgcccgaactggaagagcaattgccgcccaacctcaaggtgtccatcgcctacgacgccacgcgcttcattcaggcctccatcgatgaagtggtgaagaccctcggcgaggcggtgctgatcgtcatcgtggtggtgttcctgttcctcggcgcgttccgttcggtactgatcccggtggtgaccattccgctgtcgatgatcggcgtattgttcttcatgcaggccatgggctactcgatcaacctgctgaccctgctggcgatggtcctggccatcggcctggtggtggacgacgcgatcgtggtggtggaaaacatccaccgccacatcgaggagggcaagccgcccttcgaggctgccctggagggcgcgcgggagatcgccgtaccggtggtcagcatgaccatcaccctcgccgcggtctacgcgccgatcggcttcctcaccggcctcaccggcgccctgttcaaggagttcgccttcaccctggccggcgcggtgatcatttccgggatcgtcgccctgaccctgtcgccgatgatgtgctcgcgcctgttgcgccacgaggagaatccctcgggcctggcgcatcgcctcgacctgatcttcgagggcctgaagcaacgctaccagcgcgccctccacggcaccctggacacccgtccggtggtcctggtgttcgccgtgctggtactggcgctgatcccggtgctgctgatgttcaccaagaaggagctggcgccggaagaggaccagggcatcgtgttcctcatgaccaactcgccgcagaccgccaacctcgactacctgaatcgctacaccgccgagttcgaaggcatcttccgcagcttcccggagtattactcggcgttccagatcaacggctacaacggcgtccaggccggcatcggcggcatgctgctcaagccctgggacgaacgcgaaaagagccagatggaattgctccatgtggtgcaggcgaagctcaacgagattcccggcgtgcagatcttcgccttcaacctgccgtcgctaccgggcaccggcgagggcctgccattccagttcgtgctcaacaccgccaacgactacgagtcgctgctgcaagtggcgcaacgggtgaagcagcgcgccagcgagtccggcaagttcgccttcctcgatctcgacctggcgttcgacaaacccgagctggtggtcgacatcgaccgcgagaaggccgcgcagatgggcgtctccatgcaggacctgggggtggcgctggccagcctgctcggcgagggcgagatcaaccgcttcaccatcgacgggcgcagctacaaggtcatcgcccaggtcgaacgcccctatcgcgacaatcccggctggctcggcagctactacgtgaagagccgcaacggcccactggtcgccctctcgaccctgatcgagacccacgaacgggcacggccacggcaactgaaccagttccagcagctcaactcggcgatcatctccggcttccccatcgtcagcatgggcgaggccatcgagacggttcagcagatcgcccgcgaggaagccccgcgtggcttcgccgtcgactacgccggcgcttcccggcaatacgtgcaggaaggcagcgcattgctggtcaccttcggactggccctggcgatcatcttcctggtcctcgccgcacagttcgaaagcttccgcgatccgctggtgatcatggtcaccgtgccgctgtcgatctgcggtgcgctgataccgctgttcctcggcgtgtcgagcctgaacatctatacccaggtcggcctggtgacactgatcggcctgatcagcaaacacggcatcctgatcgtcgagttcgccaaccagttgcgccacgaacaggggctggggcgtcgcgaggccatcgagcaggccgccgcgatccgcctgcggccagtactgatgaccaccgcggctatggtgctcggggtgatcccgctgatcctcgccaccggcgccggggcggtcagtcgcttcgacatcggcatcgtgatcgcgaccggcatgtcggtgggcaccctcttcaccctgttcgtcctgccgtgcatctacaccctggtggccaggccggatgccccgccaggcgtgacgcaagcggccaacgcacactga

SEQ ID NO: 342890 - DNA, 1131 bp, Pseudomonas aeruginosa
atgttgctccgccgcatgttgatcatgctcgccgcggtgatcgccgtggtggcgattctcgccggctacaaggtctactccatccgtcagcagatcgcccttttcagcgcaccgaaaccgccgatcagcgtgaccgccagcctggccgaaaagcgtccctggcagagccgcctgccagccatcggcagcctcaaggcattccagggcgtgaccctcaccgccgaagtctccggcacggtacgcgacgtactgttcctttccggcgaccaggtgaagctggaccaaccgctgatccagttggaaagcgacgtcgaggaagccaccctgcgcactgccgaggccgatctcggcctggccagggccgagtaccagcgcggccgcgaactgatcggcagcaaggccatctcgaaaagcgaattcgatcgtctcgccgcgcagtgggccaagaccagcgccaccgtcgccgagctgaaggcggcgctggcgaagaagcgcgtgctcgcgcccttcgccgggaccatcggcatccgccaggtggacgtcggcgactacgtctcgcccgggacgccgatcgccaccttgcaggacctttccaccctgctcctggatttccacctgcccgagcaggacttccccctgctcagccgcggccagctggtgaaggtccgggtcgccgcctaccccggccaggtgttcgacgccgagatcgccgccatcaaccccaaggtcgacaacgagacccgcaacctgcaggtccgcgctgccctggagaacccggacggcaagctgctgccgggcatgttcgccaacctcgaggtgatgttgcctggcgaggaacaacgcgtcgtggtgccggagacggcgatcaccttcaccctctacggcgactcgatctacgtcgtcgggcagaagaaggacgagcagggccaggtgtcgaaggatgacaagggccagccgcaacgggtcgtcgagcgccgcttcgtcaggatcggcgaacgccgcgaaggcctggcggtggtgctcgaaggcctggagggcggcgagcaggtagtgacttccgggcaactgaagctcgacaacggcgccgcggtggccatcgtcgccgagcgggacctccagcaagagcactga

SEQ ID NO: 342891 - DNA, 1095 bp, Pseudomonas aeruginosa
atgctgcgacgtcatgtgatcggcctgggcagcctgctgctcggcgccttgtccttcggcggctggagcttcagccgcctgggtagccaaccgctggtgctatcggcgcgcgacgacgccgatggccagcattacgcggtgggctaccgcctggacggcaagtgccagttcgccacccgcgtggcccagcgctgccacgacatcgtccagcacccgagcctgccgctggcgctgttcgtcgcccgccggccaggcaccgaaagctacctgatcgacctgaacgacggtcgcctgctgcagaccctggtctcgcagaaagaccgccacttctacggccacggcgtgttccaccagagcggcgagtggctctacgccaccgagaacgacactaccgatcccggtcgcggcgtgctcggcgtctaccgtttcgacggcgagcgactgcagcacagcggcgagatctccacccacggcctcgggccgcaccaggtttcctggatgcccgacggcgagaccctggtagtggccaatggcggcattcgcaccgaggcggaaagccgggtcgagatgaacctcgacgccatggagcccagcctggtgctgatgcgccgcgacggcaacctgctgtccaaggaaaccctggcgcagcagatgaacagcgtccgccacctggcgatcggtcgcgacggcaccatcgtcgccggccagcagttcatgggcgatgcccacgaacatgccgacctgctggcgatcaagcgccccggccgtcccttcgaagccttcccggtggccgaggagcagcgcctggcgatggcccagtacaccgccagcgtggcgatccacgacgacctgcgcctggtggccctgaccgccccgcgcggcaaccgtttcttcatctgggacctggacagcggtgccgtacgcctcgacgcgccgttgccggactgcgccggcgtgggcgcggtgaagaacggcttcgtcgtcacgtccggacagggccgttgccgcttctacgactgccagggcgagcgcatcgccgcgcaaccgctggagctgccttccggcctctgggacaaccacctgcacctggcctga

SEQ ID NO: 342892 - DNA, 1065 bp, Pseudomonas aeruginosa
atgttccgcccacgactgctcttgaccagcctcgccatcgccctcggcgcctgctcgccgcaagacccgcaggccgtcaccagtgccgccctggcgcaacaggtgatcctgccgacctacagccgctgggtggaggccgaccaggccctggccagcagcgccctggcctactgccagggcaaggaagacctggccaaggcccgcgacgcgttccacgccgcgcagaaggcctgggccgagctgcaaccgctgctgatcggcccgctggccgagggcaaccgcgcctggcaggtgcagttctggccggacaagaaggacctggtcgggcgccaggtcgaacagttgctgaagaacaacccgcaggtcgacgccacggccctggccaaggccagcgtggtggtgcaggggctctccgcctacgaatacatcctcttcgacagcaagatcgacctcgccgacgccgccaccaaggcccgctattgcccgttgctggaagccatcggcacccaccagcagcaactggcccaggacatcctggcgcgctggaagaacgacggcggcatgctcacccagatgagcaagttccccaacgaccgctacgccgacgcccacgaggcgatcgccgagctgctgcgggtccaggtcaccgccctggacatgctgaagaagaaactcggtactccgctgggccggcagagcaagggcattccccagccctaccaggccgaggcctggcgcagcaacgcctcgctggccagcctggacgccagcctgagcggcgcccaggcgctctgggaaggtatcgacggcaagggcctgaagaccctgctgccggccgaacagaaggacctggccggcaagatcgacgccgcctacgccgacagccacgcgaagctggcggcgctggaacagaaaccgctctccgaactgctcgccagcgaagacgggcgcaaccagctcaacgccctctatgacagcctgaacgtggtccaccgcctgcacgaaggcgatctggcccgcgccctcggcgtgcaactgggcttcaacgccaacgatggcgactga

SEQ ID NO: 342893 - DNA, 1422 bp, Pseudomonas aeruginosa
atgtcgttgccgtcaccttccatgccgctcgcctgtctcctgacggcgctccttctgggcggatgcggcgccgacgacgaaccgctgcgcgccgagcccggcgaacacctgtccgggggcgcgaccacggtgctgcaaagcgaccgcaacgccttctccctgccctccgccaacctcgccccgagccggcgcctggacttcagcgtgggcaacagtttcttccgcaacccctgggtcatcgccccttcctccaccaccgcgcgcgacggtctgggaccgctgttcaataccaacgcctgccagaactgccatgtgaaggacggccgcggccacccgccgggagcggacgcggtcagcgcggtgtcgatgctggtacgcctgtcgatcccggccggccctgcggacggcaagaccctgttgcaccagggggtgattcccgagccgacctacggcggccagttgcaggacgtcggcattcccggcgtcgccccggaaggcaaggtgcgggtggactacgagccgctgaaggtgaggttcgaggacggcaccgaggtcgaactgcgcaagccgatcctgcgtatcagccagctcggctatgggccgatgcatccgcagacgatgttttccgcccgcgtcgccccgccgatgatcgggctcggcctgctcgaggcgattcccgaagaggcgatcctggccaatgccgatccggacgaccgcaacggcgacggtatccgcgggcgcgccaaccaggtctgggatgccgcgcggcagcgcaccgcgctcggccgcttcggctggaaggccggccagccggatatcccgcagcagaacgcgcacgccttcgccaacgacatgggcctgaccagcagcctgctgccccacgacgactgcagcgccgcccaggtcgagtgccgccgggcgcccgacggcggcgagccggaagtcagcgacaacatcttcgcccaggtgctgttctacagccgcaacctggcggtcccggcgcggcgcaaggtggacgacccgcaggtgctggccggcaagcgtctgttcgcccaggccaactgcgtggcctgccacgttcccgccttcactaccggttccgacgccagcgagccggagctggccaaccagcggattcgtccctattccgacctgttgctgcatgacatgggcgacggcttggcggacaatcgcccggaatttctcgccagcgggcgggactggcgaaccccgccgctatggggcatcggcctgaccgaaacggtcaacggccacacccagttcctccacgacgggcgcgcccgcaatctgctggaggcgatcctctggcacggcggcgaagccgaagcggccaagcggcacgtgctcggcttcgacgccgaccagcgcagcgccctgctggccttcctgaattcactctga

SEQ ID NO: 342894 - DNA, 1341 bp, Pseudomonas aeruginosa
atgactcgtatgcccctggccaccgccagtctgctggccctcgccatctccctcgccggctgcggcgacgacaagaaagccgaagcgcccgcaacaccggcggccagcacgcagcccgccgcgcccgccgccgccccggccgccaaggtcgacgaggccgccgccaaggcggtgatcaagaactacgcggacctcgccgaagccaccttcgccgatgccctgagcaccgccaaggacctgcagaaagccatcgacgcgttcctcgccaagcctgacgcggagaccctgaaagccgccaaggaagcctggttcgccgctcgtaccccttactcccagagcgaagccttccgcttcggcaacgcgatcatcgacgactgggaaggacaggttaacgcctggccgctggacgaaggcctgatcgactatgtcgccaaggactaccagcacgccctggggaaccccggcgccaccgccaacatcgtcgccaacaccgagatccaggtcggcgaagacaagatcgacgtcaaggaaatcaccggcgagaaactggccagcctgaacgagctgggcggttccgaagccaacgtcgccaccggctaccacgccatcgagttcctcctctggggccaggacctgaacggcaccggtccgggcgccggcaaccgtcccgccaccgactatgcccagggcaaggactgcaccggcggccattgcgaccgtcgcgccgcctacctgaaggccgtcaccgacctgctggtcagcgacctcgaatacatggccggacagtggaaagccggcgtcgccgacaactaccgcgccaagctggaggccgaaccggtggataccggcctgcgcaagatgttcttcggcatgggcagcctgtccctcggcgaactggccggcgagcgcatgaaggtcgcgctggaggccaactccaccgaagacgagcacgactgcttcagcgacgacacccaccacaccctgttcttcaacggcaagagcatccgcaacatctacctcggcgagtacaagcgcatcgacggcagcgtggtcaagggcccgagcctggccgacctggtcgccaaggccgacgccgccgccaacgacaccctgaaggccgacctggccgacaccgaggccaagctgcaggccatcgtcgacagcgccgagaaggatggcgtgcacttcgaccagatgatcgctccggacaacaaggacggccagcagaagatccgcgacgccatcgccgccctggtcaagcagaccggcgccatcgagcaggccgctggcaagctgggtatccaggacctgaagccggacaacgccgaccacgagttctga

SEQ ID NO: 342895 - DNA, 573 bp, Pseudomonas aeruginosa
atgagtctgaccgctatcgctttctgggttgtcctgctgctgctcgccggctacgcggtggtgctctacaacggcctggtacggctgaagcacgccgtgggcaaggcctgggccaacatcgacgtgctcctcaagcagcgccatgacgagctgccgaagctggtcgaggcctgcaagcaatacatgcagcacgagcgtgccaccctggagcgggtcatcgccgcccgcaacgccgtcgccagcgcccgcgagcgcgccgacgtgaatgccctgggcaaggccgagagcggcctgcgcgccggcctggggcagctcttcgcgctggccgagaactacccgcagctcaaggccaacgaaagtttccagttcctttcccagcgcatcagcggcctggagaacgggatcgccgatcgccgcgagctgtacaacgaggcggtgaacctgaacaacgtgcgcatcgagcaatttcccgacctgctgatcgctcgtgtcgctggcttcaaggccgccgagctgttgcagttcagcgaggcggagaaggccgacgtcgatctcaaggccctgttcggctga

SEQ ID NO: 342896 - DNA, 903 bp, Pseudomonas aeruginosa
atggacttcgacctgcgctggctgttcatcgccgccagcctggggctctgcgcctgggccggctggcagttcgtgcaccgccttgcccgggcgcgtctgctcggcgacgtaccgacctcgcggatccgttcggcggcgcagggtttcgtcgaactctacggggtgctcgaggagggcccggaaggcccgctgcaggctcccttgaccggcaagccgtgcctgtggtggcgctaccgcatcgaagtcgaggaaaagcgcagtggccgcgagaaggcctggcgcaccgtcgacaaaggtgccagcgagtcgccattcggcttgcgcgatgccaccgatgcctgcctggtcgacccacgcggcgccgaggtgcgacccttgacccagcagcgctgggaggcttttcgcgaagcaccgatcgataccctgcgactgctggagagcttcggcaccctggtcggcggagagcggctctaccgctacaccgaggagcgcctgcatgccggcgagccgctctatgcgctgggcgaattccgcagcagcggtggcggtcgccagggactcgatgccgaacgggcgcagggtgcggtgatccgtgaatggaagggcgatttccacgggctgctggcgcgcttcgacagcgacggcaacggcgagctggacgagcgcgaatggaaccgggtgcgcctggcggcacggctggaggccgaggatcggcatcgggcaagcagcgccgcgccgacccgccaccggctcggcaagccgggggaggcgcatcccttcattctctccagccagggcgaggacgatctcgccgtgcaactgcgccgccaggcggcgggggccgcgttgctctgcctgggcagcgcgctattggcgggctggctgttcagccgcctgttctga

SEQ ID NO: 342897 - DNA, 1554 bp, Pseudomonas aeruginosa
atgggcctggtgctgttcctggtctaccactggatgctgaccaagccgctgtcgaagatcatcgagcacctggtcagcatcaatcccgaccgccccagccagcaccagttgccgctgctcaaggggcacgaacgcaacgagctggggctctgggtgaccaccgccaaccagttgctcgcctcgatcgaaagcaacagccacctgcgccgcgaggccgaggacaacctgctgcgcatttcccagtacgacttcctcaccggcctgccgaaccgccagttgctgcaacagcaactcgaccagatcctcgacggcgccggccgccagcagcgccgggtggcagtgctgtgcctgggcctcgacgatttcaaggggatcaacgagcagtacacctaccagctcggcgaccagctgctgatcgccctcgccgaccgcctgcgcggacacagcgcgcggctcggttcgctggcgcgcctgggcggcgaccagttcgccctggtccaggccgacatcgagcaaccctacgaggcggccgaactggcgcagagcatcctcgacggcctggaagcgccgttcgagatcgaccagcacgaggtgcgcctgcgcgccaccatcggtatcaccctgttccccgaggacggcgagaccacggagaaactgctgcagaaggccgagcagaccatgaccctggccaagacccgctcgcgcaaccgctaccagttctacatcgccagcgtggacagcgagatgcgtcgccgccgggaactggaaaaggacctgcgcgacgccctgcagcgccacgagctgcacctcgtctaccagccgcaggtggactaccgcgaccaccgcgtggtcggcgtcgaggcgctgctgcgctggcaacatccattgcacggcttcgtcccgccggacctgttcatcccgctggcggaacagaacggcagcatcttcagcatcggcgagtgggtgctcgaccaggcctgccggcagttgcgcgaatggcacgaccagggcttcgacgacctgcgcatggcggtcaatctttccaccgtgcagctccaccacaacgccctgccacgggtggtcagcaacctgctgcaggtctaccgcctgccggcgcgcagcctggagctggaagtcaccgagaccggcctgatggaggacatctccactgccgcccagcacctcctcagcctgcgccgcgccggcgcgctgatcgccatcgacgatttcggcaccggctattcctcgctgagctacctgaagagcctgccgctggacaagatcaagatcgacaagagtttcgtccaggacctgctgcaggacgaggacgacgcgaccatcgttcgcgccatcatccagctcggcaagagcctgggcatgcaggtgatcgccgagggcgtggaaaccgccgagcaggaggcgtacatcatcgccgaaggttgcaacgaaggtcagggctacctgtacagcaagccgctgccggccagggaactgacccagtacctcaagcaggcgcgacgcctgagccaggccaccagcagcgaacggccctga

SEQ ID NO: 342898 - DNA, 357 bp, Pseudomonas aeruginosa
ttgaaactggactcccgacacagcctctcgctcaagctgctgcgtgtcgtgctactggcggcgctagccgttggcgtagtgctcagttgcgcgcagatcgtcttcgacgcctacaaggccaagcaggcggtgagcagcgacgcccaacgcatcctcgcgatggtccgcgacccttccacccaggcggtctacagcctcgaccgggaaatggcgatgcaggtcctcgaaggcctgttccagcacgaggcggtgcgccaggcgagcatcggccatcccggcgagccgatgctggcggagaaatccaggccgctgctggacctgccgacgcgctggctaaccgacccgatcctcggctag

SEQ ID NO: 342899 - DNA, 582 bp, Pseudomonas aeruginosa; identical to SEQ ID NO: 321378

SEQ ID NO: 342900 - DNA, 603 bp, Pseudomonas aeruginosa
atgtggcagagctatctcaacggcatcctggtggctgccggcctgatcatcgccatcggcgcgcagaatgccttcgttctcgcgcagagcctgcgccgcgagcatcacctctcggtggccgcgctctgcgtattctgcgacgcggtgctggtcagcctcggcgtgttcggcctggccaagctgctgctggaaaacccgacgctgctggccatcgcccgctggggcgggatcgccttcctgacctggtacgggctcaaggcgctgcttcgcgccttgagcccggacgctctcggcaacgcagcggaaaccgggccacgctcgcgcaaggcggtgcttctggcggcactggcggtcaccctgctcaacccccacgtctatctcgataccgtacttctgatcggttcgctcggcgcccagcaggccgcgccgggcgcctatgccctcggcgcggccagcgcctcgctgatgtggttcttcgccctcgccctcggcgcggcgtggctggccccctggctggcgcgcccggccacctggcgcctgctcgacctgatggtggcggccatgatgctgggcatggccgcgcaactgctgttccggggataa

SEQ ID NO: 342901 - DNA, 402 bp, Pseudomonas aeruginosa
atggctggcgaaacctcgctgcgcaccctgctgcgcacgctcactcccgaactcaatcccggcgactatgtgttctgtacctgcgccgctggcgcgctgccgaacggcgccgagccgctcgccagcttccgcgagcgcgagggcctgaccctggtgctcgaacgccggcaggccgaacgcctgggcctgccctacgaatacgtggcggcctggatcaccctgacggtgcactcctcgttggcggcggtgggcctgaccgccgccttcgccacggcgctggccgaagccgggatcagttgcaacgtgatggccggctatttccacgaccacctgttcgtcgcccgcgacgagggccggcgcgccctcgccgtgctccagcggctggcggcggaggcacactga

SEQ ID NO: 342902 - DNA, 897 bp, Pseudomonas aeruginosa
ttgttcgactacaagttgctcgccgcgctggccgcagtggtggagcagggcggtttcgagcgcgccgcacaggcgctggggctgtcgcaatcggcggtatcgcagcggatcaagctgctcgaggcgcgggtcggccagccggtcctggtgcgcgagacgccgccgcatcccaccgatctcgggcgccgcctgctcaaccatgtgcagcaggtgcggctgctggagggcgacctgcagcgctgggtgccgaacctggatgaaggcggtgccccggaacgcctgcgcatcgctctcaacgccgatagcctggcgacctggtgggccgccgcggtgggcgatttctgcgccgagcggcgggtgctgctggaccttgtggtggaggaccaggaggtcgggctcaagcgcatgcgcgcgggcgaagtggcgggctgcgtctgcggtagcgcgcggccggtggccggcgcgcgttcgctgctgctcggagccatgcgttatcgcggcctggccagcccggatttcattgcccggcactttccccgcggggtcgaggcggccgccctggccggcgtgccggcgatcgtgttcggcccggacgacctgctgcaacaccgctttctcaaggacctcggcgtcgagggcggtttcatccaccacctctgcccgtcctcggaaggtttcgtccgcctcaccgccggcggtctcggctggggcctggtgccggagcgccaggtgcaaggcgagctggcgcgcggcgaactggtcgagctgctgcccggccaggtcatcgacgtaccgttgtactggcactactggcgcaatggtggcgaactgctcgcgtcgctcaccgagcacctgctcgcccgcgccggcgacggcttggtgcgggtgtcaggctga

SEQ ID NO: 342903 - DNA, 1059 bp, Pseudomonas aeruginosa
atggccagtcactggatgatctacggcgccaacggctacaccggccggctggtcgctgaacaggcgcagcgcgagggcctgacgccgctcctcggcggacgcaacccggccgccctgcacgcgctcggcagccagctcgggctggagtgccgggtcttcgacctgggggatccgcaggcctgccgcgaagccctggaccaggtgaaggtggtggcccattgcgccggtccgttctctgccaccagcacgccgatgatcgccgcctgccgcgccgccggcacccactacgtggatatcactggagagatcgcggtgttcgagcaggcccacgccggcgacgccgaggcccgcgaggccggcatcgtggtctgcccgggcgtcggcttcgatgtgatccccaccgattgcctggccgcctgcctgaaggaggcgctgccggacgcgcaacggctggcgctgggcttcgacaccggcagcgggctttcgacgggaaccgcgaagaccagcgtcgaaggcctcaagttcggcggcaagatccgcgagaatggccgcctgcgcgacgtgcccctgggctacaagcgccgcgacatcgatttcggccgcggcctgcggcacgccgtgacgattccctggggcgacgtggccaccgcctactacagcaccggcatcccggacatcgaggtctacctgccggcgccgccgctgctggccctgggcatgcgcctgatcgacccgctgcgtccgctgctcggtcggcaacgggtccaggactggctcaaggggcaggtcgacaaacgcatcgccggccccgaccaggcggcccgcgagcgcctgcgcacctgggtctggggcgaggcgcgcaacgcccgcggcgaacgccgcacggcgcgcctggagacggccaacgtgtacgacctgaccctgcacggcgtgctcctggcagtgcgccacctgctggactaccagggtcccggcggctacttcacgccatcgcggttgctcggcgcgcgctgcgtcgaatcgttgcccggctccggacgaatcaccgtcatcggctga

SEQ ID NO: 342904 - DNA, 990 bp, Pseudomonas aeruginosa; identical to SEQ ID NO: 323629

SEQ ID NO: 342905 - DNA, 264 bp, Pseudomonas aeruginosa; identical to SEQ ID NO: 323630

SEQ ID NO: 342906 - DNA, 837 bp, Pseudomonas aeruginosa
atgcgtaacgatgctttcgacgaactcgacgatgtgcccagcctgaccaccgatgctgccgaccgtgatgaattcggccaccacccgcggcacgtctacgaaccggagcagcgccgggtcgtcgacaccaaggagcgccgtccggcctctaccggcccgctctgggccctgctcggggcgatgctgatcgccctcgccggggtgggttggtggagccaccagcaaatcagcctgatggaacagcagttggtggcgacccaggaaagcttcgtaaggatcagcgaagaagccgccgggcgcctcgacgacattcgcggcaaggtggtcgccagcgagtccagcgtcaccagcgaacgcgaggcgctgcgcctgcaggtcaagcaactgcaggagaaactcggcagccaggaacgccagcaggccgatgtgagcaaccagttcggcggccagggcaaacgcctcgaccaactggccagcgatctcaaggcccagcaggaaagcgcggcgcaactggtcgcgcaactggacggcaagctgcagacactggccgccgaacaggagaagctgaaagccctgcaggtcgaactgggcaagaccaacgagcaactcaaggccctcggcggcgatgtcgcggcgctgaagaagcagggcaacccgagccagacgatcaagggtatccaggacgacctgctggtattgcgcagccagctcgacaaccgcccggcccagggcggcaataccgccgagttcgacgccttccgcacccaggtgatgcgcaacatcaacaccctccaggcccaggtgcagaacctgcagcagcagctcaatacccgctga

SEQ ID NO: 342907 - DNA, 228 bp, Pseudomonas aeruginosa
atgagcgcactgcaaccgtcccgttcctaccgcatcaccggttattcccccgccatcagcaacggctatcgccaacgcctgttctccatggggcttctgcccggcgcggcgctgcgcgtggtgcgcatcgccccgctgggcgacccgatccaggtcgagacccgccagaccagcctggcgctgcggcgcaaggacctcgccctgctgaccctcgtcccgctcgactga

SEQ ID NO: 342908 - DNA, 2301 bp, Pseudomonas aeruginosa; identical to SEQ ID NO: 338619

SEQ ID NO: 342909 - DNA, 243 bp, Pseudomonas aeruginosa
atggcgacactcatgcagctccgcgccgccctggaagacggccaggcgcgtgggctgaaacagctcagccgccaggtggacgcgccgccggcgctggtggaggcgatcctggagcggctgatcgcgctcggcaaggtcgagcgggtggctgcgcaaagctcgggcggttgcggcggcggttgcaagggctgcgcccagcgcgatccgtgcgcggagccggagccgtatttccgcctgcgctag

SEQ ID NO: 342910 - DNA, 1053 bp, Pseudomonas aeruginosa
atggctactctgttcgatcccatcgtgctcggcgacctcgagctgcccaaccgcatcgtcatggcgccgctgacccgctgccgcgccgatgaaggccgcgtgcccaacgccctgatggccgagtactacgcccagcgcgccgatgccggcctgatcctcagcgaggccaccgcggtcacgccgatgggcgtaggctatcccgacacccccggcatctggtccgatgaccaggtccgtggctggagcaacgtgaccaaggcggtgcacgccgccggcgggcgcatcttcctgcaactctggcacgtcgggcggatttccgatccgctctacctgaatggcgagctgccggtggcgccgagcgccatcgccgccgaggggcacgtcagcctggtgcgcccgaagcgtccctacgtcaccccgcgcgcgctggacaccgaggagatcgccgacatcgtcgaggcctaccgccagggcgccgagcgggccaaggccgccggcttcgacggcgtggagatccacggcgccaacggctacctgctcgaccagttcctccaggacagcaccaacaagcgcaccgaccgctacggcggctccatcgagaaccgcgcgcgcctgctgctggaagtcaccgacgcggcgatctccgtatggggcgcccagcgcgtcggcgtacacctggcaccgcgtgccgactcccacgacatgggcgattccaaccgcctggaaaccttcagccatgtcgcccgtgagctgggcaagcgcggcatcgccttcatctgcgcccgcgaagcgcaggccgacgacagcatcggcgtagccctgaagaaagccttcggcggaccctacatcgccaacgaaaagttcaccctcgacagcgccaacgccatcctggccaagggcgacgccgatgcggtggccttcggcgtccccttcatcgccaacccggacctggtcgaacgcctgcgccagggcgccgaactgaacccgccgcgcccggaaaccttctataccggcggtaccgaaggctacctggactatccgaccctggcctga

SEQ ID NO: 342911 - DNA, 1167 bp, Pseudomonas aeruginosa
atgccggcgtctcttctcgtcctcgctttatccgcctttgccatcggtaccaccgaattcgtcatcatgggcctgctgccgcaggtcgccggcgacctgcgggtatccattcccagcgccggctggctgatcagcggctacgccttcgccgtggccttcggcgccccgttgatggccatggccaccgcccgcctggaacgcaagaaagccctgctcgcgctgatgggcatcttcatcgtcggcaacctgctctgcgcggtggccgccaactacggcctgctgatgctggcgcggatcgtcaccgcgctctgccatggcgccttcttcggcatcggctcggtggtcgccgccagcctggtggcgccgaaccgccgcgcttccgccgtggccctgatgttcaccggcctgaccctggccaacgtgctcggcgtgccgctgggtaccgcgctcggccaggaagccggctggcgcgcgaccttctgggtggtgaccctgatcggcgtggtcgccttcgtcggcctggccagggtgctgccaaacgaccgcgaggaagagaaggtcgacctgcgccaggaaatgtccgcgctgaagaacccgtcgctgtggctggccctgggcaccaccgtgctgttcgccgcctcgatgttcgccctgttcacctacgtcgcgccgctgctcggcgaagtcaccggggtcagcccgcgcggcgtgacctggaccctgctgctgatcggcgtcggcctgaccgtcggcaacgtgatcggcggccgcctcgccgactggcgcctgggcaccaccatggccgcggtgttcgccgccatggcgctggtctcggcgctgttcagctggaccagccaggccctgctgccggcggaaatcaccctgttcttctgggccgccgccgccttcgccgcggtgcccgcactgcaggtcaacgtggtccgcgtcgggcatgccgcgccgaacctggtggcgaccctgaacatcggcgccttcaacgtcggcaacgcgctcggcgcctgggtcggcggcagcgtcatcgaccacggcctgggcctgacccgcgtgccgctggccgccgccgcgctggccgcgctggcgctgctggccaccctgatcgccttttccggaaacggccgcgcccaggcgcagccggtcctcgattga

SEQ ID NO: 342912 - DNA, 303 bp, Pseudomonas aeruginosa
atgccactggacatcgacgaaatcatcaaggctctctcccacccggtgcgacgcgacatgctgcgctggctgaaggaaccggagaagtacttcgtcgagcaggaccacccgttcgagatcggcgtctgcgccggcaagttcgaccagcgtaccggtctctcccagtccaccgtgtcggtacacctcgccaccctgcaacgcgccggtctggtgaccagccgccgggtcggccagtggaatttcttcaagcgcaacgaggagaccatccaggccttcctcgaccaactcggcgacgagctgtaa

SEQ ID NO: 342913 - DNA, 573 bp, Pseudomonas aeruginosa
atgaactacctcgcgcatctccacctcggcggcccgcaaccggcccaactgctcggcagcctgtacggcgacttcgtcaagggccgcctgcagggacaatggccgggcgagatcgagcgggccatccagttgcaccggcgcatcgacgccttcaccgacagccatccactggtgcatgcggccaagcggcgcttcccgctggagcgccggcgtttcgccggcgtcctgctggacgtgttcttcgaccactgcctggcgcgcgactggaacgactacgccgacgaaccgctgccgcagttcgtcgagcgggtctacggcactctgcgcaccgcctcgccgctgccggagcgcctggcgcgcatcgcgccgcggatggcggcccaggactggctgggcagctaccgcgagttcgcggtcttgcgcgaagtgctgggcggcatgtcgcggaggctgtcgcgaccgcacctgctggacggttcctgggaagaactggcccagcgctacgatgacctgagcgcggatttccgcgccttctacccgcaactccaggctttcgccctgagccagcgctga

SEQ ID NO: 342914 - DNA, 861 bp, Pseudomonas aeruginosa
atgaaacgaatcctggtggcgaccgacctgtcctcgcgttccgagctggcggtcatgcgcgccgcggcgctggccaaggcgaggaatgccgaactgaccgtgctgaacgtgctcgacgacgaccagccgccggtgctgatcgcgccgcaacggctggccatcgccaacctgctggaagtgaacggacaggccctgaaggagcgcctcggcgtcgagtccaaggcgatcgtgcgggtcggcgatccggtggtggtgatcaacgcggtggccgaggagatcggcgccgacctgctggtgatgggcgcgcaccggcacacgccgctgcgcgacctgttcatcggcaccaccctggagcgggtggtacgcaatgcgaagatcccggtgctgcgcgcggccggtgcgccggaagaggagtaccgccgggtgctgctggcgctggacttctcgccgacctcgacgcgcgcggtgcagatggccggccagctcggcttcctcgacgccgctagcctcaccgcgctgcatgccttcgagccgttcgccaaaggcatgatgcgttattcggggatcaaggaagaccgcgtcgagcattacgtcgaccaggaggaactcaaggccaacgtcgagctgcgcgactacgtcgccggcctggggctgggccgcgaggacatccagttgcgcgtcggcgaaggcttgccgatcaacgtgatcatgaccgaggtacgccgccaggcgccgcagttgacggtgctcggcacccagggcctgaccggcttccgccgcgcgctgatcggcagcgtggccgaggcggccctcggcgacctgccgtgcgacgtgctggcggtgccgcccaagcgcgactag

SEQ ID NO: 342915 - DNA, 777 bp, Pseudomonas aeruginosa
atggcgcggctgcgcctgctgctgcgcagcgcacgcctgctcgggctggtcgcgctcggactgggcctggccgcttgggtcagcctgcgcgagcggctgcccggcgccgacgtcacgccgctgcgccagcgcctgacccgctggtggctggcgcgcctctgcgcggccctgcccttcgaggtcagggtcagcggcgaagcgccccggcaacccatgctgtgggtagccaaccatgtgtcctggaccgatatcccgctgctcggcgccctggcgccgctgaccttcctgtccaaggccgaggtgcgtgcctggccgctggccggctggctggcggaaaaggccggcaccctgttcatccgccgcggctcgggcgacagccggctgatcaaccagcgcttggccgaacaactgcaccgtgggcgcaacctgctgatcttcccggaaggcaccaccaccaacggcgaaagcctgcgcaccttccacggtcgcctgatggccagcgccctggaagccggcgtggcggtgcagccggtggcgatcagctaccgccgcgacggcgtgcccgatgcgcaggcgccgttcatcggcgacgacgacttgctcagccacctcggccgcctgctgcgcggcgagcgcggcagcgtgcatatccagctgctggaaccgatccccagccagggcctggaccgcgccgaactggcccgccaggcccagcaggcggtgcgcctggcgctgttcggcactgccgccactacgcaaacccggcgcgccgcctag

SEQ ID NO: 342916 - DNA, 756 bp, Pseudomonas aeruginosa; identical to SEQ ID NO: 322601

SEQ ID NO: 342917 - DNA, 897 bp, Pseudomonas aeruginosa
atgtcctggcaacgcttgctcggcccgctcgaccgcctgcccaccgaaggctccctggaagactggcacgccgccgccctggcgcgcgccgacggtcttggcaccctggagcgggcggtgctcggcggacgattggccgcgagtccgggcctggccttcctcgccggctaccaggcggccctgcgcgcgctctggccggcggcgccggaaggtctcggcgcgctgtgcgtgaccgagaagcgcagcgtgcgcccggcggacctgcagacccgcctggaggggctggtcctgcatggacaaaaggatttcgtcaccgctggcgacagcgcctcctggtggctggtggccgcccgcgacgaggctccggggcagccgccgcgactgtcgatgacggtggtcctggccggcgccccgggggcgcgcctggaggcgttgccggcgctgccgctgatgccggatgtgccgcattcccgcctgttgctcgacggtgcccattgcgagcgcctgcccggcgatggttgggacgactacgtcaggccgttccgcctgctggaggatgtccatgtgctggcggcgctggtcggctggctctatggggtcggccatgaatgcggctggccctcgccgctgctgctgcgcctggccggcatcctcggcggctgcgccgaggtcgcgcggcatccggtcgcctgcgtcggcacccaggcggtactggctgggctgttcgaacagttctcggcgctggaggggcaactggatgccgccttcgccgccaacgcctcgacctgggaggcattgtggcaacgcgatcgcggcttgctggcgattgccaacggggcccgcaaagttcgcctggagaaggccttgacccgcctcgggcttgacccaggtcagtga

SEQ ID NO: 342918 - DNA, 786 bp, Pseudomonas aeruginosa; identical to SEQ ID NO: 322599

SEQ ID NO: 342919 - DNA, 1116 bp, Pseudomonas aeruginosa
atgcccgctttgccgttgtcccgccgcgccctcgccgcgctggccctggtattcgccctccctgccctggccgaagactggcccgacaccgactggccccgtgcccaacagcccgcggggccggcgctggaggcattcgagcgctatgccttcggtcgtcgcgacgatgttcgtcgtaaaggcatccgcaccgacgcggtagtggtgatccgcgacggtcgtctggtctatgagcgctacgccggcccgagccgtgcagagaccccgcaccttacctggtcggtgagcaagagcctgctcgccacgctgcttggcgtcgccgagggcgaagggcgcttccagctcgacgacccggtggcgcgctactacccgccgttcgcccgtcatcccgaggtgacgttgcgccacctgctgaactggtcttccgggctggactggcaggaggactacgagttcgcgccattgaaatcctccgtggtggcgatgctctacacccgtgggcgtgacgacatggccggcttcgtcgccgaaaccccgcaggcccggccgccgggccggcgtttccgctactccagcggcgacagcaacgtgctggcggcggccctccacggcatgctcggcgcggactatgccgagtacccctggcgcgcgctgttcgagccgctgggcatccgttcggcggtatgggagcgagacgccgccggcacgttcgtcggctcgtcgtacgtctacatgagcgcccgcgacctggcgcgcgtcggcctgctgatgcagcgccacgggcgctggcgcgagcggcaactgctgccgctggcatgggtcgagttcaacctgacgcccttcgcccgctaccggccgagcgcggaagaggagggcgaggcggtgccgggcggccagtggtggttgaaccgtgcggtgaaaggcgcgccggcgccctggccggacgtcgccgagaccgccttcgccgcgctcggccactggggccaggcgctctacgtgctgcccgaggagaagctggtgatcgtgcgctacgccgacgaccgcgacgggcgtttccgccacaacgaattcctgcgcctggcacaggcggcgttcgccggggaggcgcggccatga

SEQ ID NO: 342920 - DNA, 336 bp, Pseudomonas aeruginosa
atgatccgtcgccatcccttgctcttcctgttcgtcctggggctcctcgctgccctcgcgtgggcctggcagaaccgcatccacctggcggcctttcccgccatcatcggcgcctacacggccaaggagtactgctcctgccgctacgtgatggggaactccgcggactattgccgggcctatacccaacagtacgtgccgatcagcggcttcttcgacgacgaagcccgccgccgggtgaccgcccgcggcctcggcagtacgcagacggccgcctggctgggcccgcgcgagggatgccggctcatgcccgaggcggacaggctgccggactga

SEQ ID NO: 342921 - DNA, 591 bp, Pseudomonas aeruginosa; identical to SEQ ID NO: 322596

SEQ ID NO: 342922 - DNA, 1221 bp, Pseudomonas aeruginosa
atggctcgacatcgacacatcgtggcctggctcgaggaggtcgccgacgacctgcgtagcctgcgccaggacatccacgcccatcccgaactgggcttcgaggagcgacgcaccgccgcgctggtcgccgaatgcctgcgcggctggggctacgaagtgcacgaagggatcggccgcaccggcgtggtcggcgtcctccgccagggcgacggcacgcggcggctcggcctgcgggcggacatggatgcgctgccgatcgtcgaggccacggggctcggctacagcagctgccacggcgggcgcatgcacgcctgcggccacgacggacacaccgcgatgctgctcggcgcggcacgctacctggcggcgacgcggcgtttcgacggcaccctggtactgatcttccagcccgccgaggaaggccagggcggcgccgaggcgatgctcgccgacgggctgctggagcgctttccctgcgatgcgctgttcggcatgcacaacatgccgggactggaggccgggcacctgggcttccgcgcgggaccgatgatggcttcccaggacctgctgagcgtcaccctggagggcgtcggtggacacggttcgatgccgcacctgagcgtcgatccgttgctcgccgcgtcgagcgcggtgatggccctgcagagcgtggtggcgcgcaacgtcgatccgcagaaggccgcggtggtcacggtcggcgcattgcaggccggcgaggcggccaacgtcataccccagcgcgccgtgctgcgcctgagcctgcgggcgctcgacggccaggtgcgcgagcaggtgctgcagcgggttcgccagatcatcgagttgcaggccgccagctatgggtgccaggccagcatcgagcactacccggcctatccggtgctggtcaacagcgtcgaggaaaccgagttcgcccgccaggtcggggtcgagctggccggcgcggagcaggtcgacggcgacacgccgaagctgatgggcagcgaggacttcgcctggatgctacagcgctgccccggcagctacctgttcatcggcaacggcagaggacggccgatggtgcacaacccggcctatgacttcaacgacgacatcctggtccggggcgcggcctattggggcgcgctcgccgagacctggctggccgcccccgcggcgtccggccttcgactgactgccgccaataacggcgcggcctga

SEQ ID NO: 342923 - DNA, 1320 bp, Pseudomonas aeruginosa
atgcacgcttgcccgagcggtacctcgcgtacccgccaggtggcggctgccgtgatcggcaacgccctggagtggtacgacttcatcgtctacggcttcctttccagcctgatcgccaggctgttcttcccttccggcgacgagtacacctcgctgttgatggccctggccaccttcggtgtcggtttcttcatgcgtccggtcggtggggtcctgctcggcctgtatgccgaccgcaggggacgcaaggcggcgatgcaactgatcatcctgctgatgacgctgtccatcgcgatgatcgccttcgccccgacctacgcggcgatcggcgtcggcgcaccgttgctgatcgtgatcgcgcgaatgctgcagggtttcgccaccggcggcgagtacgccagcgccacggctttcctggtggaaagcgcgccgccgcaccggcgcggtctctacggttcctggcaattgttcggccagtgcctggcggtgttcgccggtgcggggatgggcgcgctggtcacccattgcctggacgccgagtccctggagagctggggctggcgggtgccgttcctgttcggtctgctgatcggtccggtgggattgtggatccgccgctacatgggcgagaccgaggccttcctcgaagccatccgggagcccggcgagcgccaggggctgctcggcgtgctgcgcgaataccggcgcagcgtgctggtgagcatgggcctgacggtgatcggcacggtgtccttctacgtggtgctggtgaatatgccgaccttcgcccacaagcagttgggcctgccgctggacgaggtgttcatggtgcagatggctgcggtggcgctgatgaccctggtgatcccgttggctgggggactctccgaccgggtcgggcggcgcccggtgctgctggtcgcgaccctggccttcatgctcatggtctatccgctgttcgcctgggtcgccgcggcgccgagcctggggcgcctgctgctgatgcaactgttgctgtgcacggcgatcggcggcttcttcggcccggcgccgaccgcggtggccgagcagtttccggtgcgggtgcgttccaccggcctggcggtggcgtataacctggcggtgatgctgttcggcggtttcgctccgttcatcgtcacctggctcaccgaggtcggcggctcgccagtggcgccggcgttctacgtgctcggcgcggccttcctcgggctgctcgccaccctctatctgcgggagggcgcgacgcccgccccgcgcccccgtgaaccggccctgggcaagccggcaaggagtctgtga

SEQ ID NO: 342924 - DNA, 1485 bp, Pseudomonas aeruginosa; identical to SEQ ID NO: 322593

SEQ ID NO: 342925 - DNA, 771 bp, Pseudomonas aeruginosa
atgccggaaagagaagaggcgggaaccgtgcgttcggtggagcgggcgctggcgatcctcgatctgctgggccagcaccaggcgctggggctcgaggaactgcattacctgaccgaactgcccaaggccacggtgtcgcggctgctgcataccctgctggagcagggctggctgtaccgcggcttgaccgaccggcgctaccggctgcgttccacccgcctctacggtgacgccgccgagcgcttccgttgccaggtggtggagcgttccgcgccgctgctggtggagttgagcgagcgcaccgggctggtcgccgatttgtcgattctcgacggcgaccgcctgctggtggcggaaagctcggtgcccggcgtcctgcgcaagcgctacccggccaaccggctggtggtcggccagcacgccagcctgttccattcggccatgggcaaggcctgcctgggcgaactggcagacagcgaggtgcgccgcctggcgcgccagcaccaggtagacgaggacctctggttgcgcacccgcgagcaggcccacggccagggctacggcgagcgtaccgagggacactgggagtatccggtgcgcctgccgttcctgatccgcgcggtggccttgccggtacgcgcccagggtcgcctgctcggcagcgtggcgctgcactggccgcgcgaccaggattgcgtcgaacgggtgcgccgccggcacctgggaaccctggccgataccgtcagtcagttgcagcacgcgctcgactga

SEQ ID NO: 342926 - DNA, 573 bp, Pseudomonas aeruginosa; identical to SEQ ID NO: 322590

SEQ ID NO: 342927 - DNA, 1158 bp, Pseudomonas aeruginosa
gtgagcggcccggtctttccctggcgcagcgacaaccgcttcgccctgctcaatgacggcgtgcggttcttcccgcgcatgctgctggccatcgaggcggcgcagcggagcatcgagctggagctgtacctggtggaagacgggcattgcgccgaactgtttctcgtcgccctgctggatgcccgccgccggggcgtcgccgtgcgctgcctgttcgacggcttcggctgcctcggcctgggcagcgcctggatccagcgcctgcgcgaggccggcggcgaactgcggctgtacaacccgctgcgctggaagctgactggcggcaatctctaccgcgaccatcgcaagctgctgctggtggacgggcgcctcggttatgtcggcggcgccgggatcaccgacgaattctgggaaccggtcagcgacgtcagcgcctggcgcgaggtgatggtcgagatggacggcccggtggtggcggactgggcggcgctgttcgagcggcaatggctggcctgtctcgaagagaaagcctggaagccccgcgagggcatgacccttacccgccttccgccgcagccgggggcggcccgtgggttgggccgggtggcctacgccgacgcccgccagcaccgcgacatcctgcaatcgctggtccgcgcgctgaacggctcgcgccgacggatctggctggcgacgccgtacttcctgccgacctggaaggttcgccgggccctgcgcaaggccgcccagcgcggcgtggaggtgcgcctgctgctggccgggcggctcaccgaccacgccccggtgcgctatgccgggcagcgctactacccgcgcctgctgcgcgccggcgtgcgcatccacgaataccagccgcgcttcctgcacctgaagatggtcatggtcgacgattgggtgagcgtcggctcctgcaacttcgatcattggaatctacgcttcaacctcgacgccaatctcgaggccctcgacccggacttcaccaatgaggcggcggcgagcctgctggcggacttcgccgacagccgcgaggtgaccctggcgatgtggcgcgcgcgacccctgtggatgcgcctgcaccagcgcctgtggggttggctggaccgggtagtggtgaatttcctcgaccgccggcgctag

SEQ ID NO: 342928 - DNA, 1281 bp, Pseudomonas aeruginosa
gtggcaacgcccgactccaaggaacgtttcatcggactggaatggttgcgcttcctgctcggcctgtacgtggtggtgtaccacaccctgcatacctatccgaaagagcagaagtttcccggtctcgacgaactgaccagcctggggttcttcgccaccagtaccttcttcgtgctttccggcttcctcctggcccatgtctacgcacgcagcggccggttgcgcgaaagcgcccgcagcttctggaccaagcgactgtccaatctctatccgctgcacctgttctccctgctgctgtcgatcctggtgttgctggccctcagccacctgggaatcggtcccgagctggacaaggccaccccgcgcttcgtcatctacgacaccaacgaagtgctcggccgcacccacccggaactcttcctgcactggatgagcaacaccgaactgttcgtcaacagcatcctgcagatcctcctgctgcaggcctggaatccctattacctgaccttcaacgcgccgttgtggtcgctgtcgacgctgatgttcttctacctggcgtttcccttcgtcgccccgcggctgatgcgcagccggcacaagtggaaggtgctggcgctggtctggctggtctacctgatcccgccggcgctggtagtggccagcgagagctacgggatcccctggaccggcctgctgcaccgcaatccgttgctgcgcctgccggaattccttggcggcatcctggcctacgggttgttccgcggctaccgcgaccgtggcatggtgccgggacgcggcctgctggccgcgctggtggcgctggtggtggcggccttcctggtggccgactacctgttcacccagggcgccaaacattggtacttcctgctgcacaacggcctgctgctaccggcccagttgctgctggtgtgcctttgcgcgctgcccgccgacccgaagagcgctttcgtccgccactggtcgccgcgcctgggggccgcctcgctgtcgctgttcgccctgcatgtgccgatgttcaccctgttctcccgtagcgagcgccttatcgccgtgccggggcgttgtctcgacgactggcgcgcctgcaccgaggcggcggccgcgctgccatcgtcgctgctctgctacccgctgttcctggtcctgctggtggcgttctgcgtgctgttccaggagcgcggcgtggtgccggtgcgcaagtggctggtgcgccggctgatgccggcgccggcgctggccaaggtgccgcgcccggcctga

SEQ ID NO: 342929 - DNA, 612 bp, Pseudomonas aeruginosa
atgctgcgcagcctgtcgctggccctgtcgatcgtcgcgagcctggtcggctgcagcacgcccggcgcgttcttcggtgcggtggacggaccggccttcgtcgcccatccgagcgccgatgccagccacgccaccgtctacctctaccgtccgcggagccagtgggcggacgaggaactcgaggcgccggggatcttcctcaacaacgaactgatcggcagcctgccgagcaacggctacctggcgttcgagttcgagaccggcagctacaagctggaaatgcgccggccgctggcgggcagcttctggaccctgttcgccgacggtccgatggatttcacccgcatcgccagcttcatgctcgaggccagggccggctcggtctactacctgcgctacgacgaactcaacccgccaccgaagagcgagcacccggcgggtgagggcgatggcccgctgcaattggtggcggccgatctcggcgctgcggaaatcggcgctacccaccaggtccaggagcccatgcagttcgccgccagcggctaccggaaacgcgtgcagcgctcgttctgggaaggcgtcgggcgggccctggacaagatcggcatctga

SEQ ID NO: 342930 - DNA, 582 bp, Pseudomonas aeruginosa
atggctgcgaagaagatcctgatgctggtcggcgactatgctgaagactacgaaaccatggtcccgttccaggccctgcagatggtgggccaccaggtgcatgcggtgtgtccggacaagcgggccgggcaaagcgtgcgcaccgccatccacgatttcgaaggcgaccagacctacagcgagaagccgggccacaacttcaccctcaatgccgactttgcccaggcccgcgccgaggattacgatgccctgctgatccccggcggccgcgcgcccgaatacctgcgcctgaacgagcaggtgctggctctggtgcgtgacttcgatgccgcgcgcaagccgatcgccgcggtctgccatggcgctcagctgctggccgccgccggcgttctgcaagggcgggcgtgcagcgcctatccggcctgcgccccggaggtgcggctggccggcggcgagtacgtcgaccttccgccggaccaggcccacgtcgacggtcacctggttaccgcgccggcctggccggcgcatccggcgtggctggcgcgcttcctcgaggcgctcggcacccgcatcagccactga

SEQ ID NO: 342931 - DNA, 309 bp, Pseudomonas aeruginosa
atgtgcgaactctatgtgaaagccgatccgatcctctatgaatcgcgctcgcgttccttgcgcatccgcggggtggtgaccaccctgcgcctggagaaccagttctgggacatcctccgggaaatcgccgaaggcgagggcctgagcaccaaccagttgatcaccaatctctacgaggaagtgatggactatcgcggcgaggtgctcaacttcgcctccttcctgcgtgtcagttgtacccgctacctggcgcagcggcgcgagaaagtcgccgagctgagcctggtcggccagcgcgcccagtcctga

SEQ ID NO: 342932 - DNA, 1320 bp, Pseudomonas aeruginosa
gtgaaatactccctgcccaccacggccaccgcgccgttctgtccctcggcggtcagccacagcgtggcggtgccggccgacgcctcgccgctgcgcaagctggcgctgttcgtcggccccggcctgctggtctcggtcggctacatggaccccggcaactgggccaccgccatcgaggcgggctcgcgcttcggctacgcgctgctgttcgtagtggtgctggcgagcttttccgggatgctcctgcaaagcctctgttcgcgcctggggatcgccaccggccgcgacctcgcgcagctctcccgggagcgctaccgccctggcgtggcgcgtggccaatggctgctggcggaactgtcgatcgtcgccaccgaccttgccgaggtgctcggcgcggcgctggccttccacctgctgctgggcgtctcgattaccaccggggtggtcctcaccgccttcgataccctgatcgtgctggccctgcagggcgccaacttccgccgcctggaggccatagtgctggggctgatcgcgaccatcggcgcgtgtttcttcgtcgaactggtgctgatcggcccctactggccggatgtcgccgccggcttgtggccgtcctgggacacgctgagcagccaggagccgctgtacctggcgatcggcatcctcggcgcgacggtgatgccgcacaacctctacctgcattcgtccgtggtgcagacccgggtcagcggcgacgacgcggcgagcaaacgctcggcgatccgcttttcccggctcgacaccatcggctcgctgtccctggcgctgctggtcaatgcggcgatcctgatcctcgccgccgcggctttccacggtagcggccataccgaggtggtggagatccaggacgcctaccacctgctcgacccgttggtgggcggcgccctggccagcttcctgttcggcttcgccctgctggcggcggggcagagctcgaccttcaccggcaccattgccgggcaggtggtgatggagggtttcctccgggcgaagattccctgctggcagcggcgcctgatcacccgcggcctggccctggtgccggccttgatcggcgtgctctggctgggcgaaggcgcggtaggcaagctgctggtgctcagccaggtggtgctcagcctgcaattgccgttcgccctgtggccgctgattcgcttcagcagcgaccggggcctcatgggggagttcgtcaacccgcgctgggtcagcgcgctggcctggtcgttgttcggcctgatctcggcggcgaacctgaccttgctgtatttctggttcggctga

SEQ ID NO: 342933 - DNA, 1524 bp, Pseudomonas aeruginosa
atggccgtgatcaagcaagacgacctgatccagagcgtcgccgatgccctgcagttcatctcctactaccacccggtcgatttcatccaggccatgcatgaggcctacctgcgcgaagaatcgccggctgcccgcgactccatggcgcagatcctgatcaactcgcgcatgtgcgccaccggccaccgcccgatctgccaggacaccgggatcgtcaccgtgttcgtccgggtcggcatggacgtgcgctgggacggcgctaccatgagcgtcgacgatatgatcaacgaaggcgtgcgccgcgcctacaacctgccggagaacgtcctgcgcgcctcgatcctggccgacccggccggcgcgcggaagaacaccaaggacaacacgccggcggtgatccactactccatcgttcccggcgacaaggtcgaggtcgatgtcgcggccaagggcggcggctcggagaacaagtcgaagatggccatgctcaacccgtccgactcgatcgtcgactgggtgctgaagaccgtaccgaccatgggcgccggctggtgcccgccgggcatgctcggcatcggcatcggcggtaccgcggagaaagcagcggtgatggcgaaggaggtcctcatggacccgatcgacatccacgaactgaaggcccgcggcccgcagaaccgcatcgaggaactgcgcctggagctgttcgagaaggtcaaccagctgggcatcggtgcccagggcctgggcggcctgaccaccgtgctcgacgtcaagatcatggactacccgacccacgccgcctcgctgccggtgtgcatgatccccaactgcgccgcgacccgccacgcccacttcgtgctcgacggctccggccccgccgaactggaagcgccgtcgctcgacgcctacccggagatcgtctgggaagccggcccgtccgcgcgccgcgtcgacctggacaagatcaccccggaagaggtgcaaagctggaaaccgggcgagaccctgctgctcaacggcaagatgctcaccggccgcgacgccgcgcacaagcgcatggtcgacatgctgaacaagggcgaaacgctgccggtggacctgaaaggccgcttcatctattacgtcggcccggtcgatccggtcggcgacgaggtggtcggcccggccggtcccaccaccgccacccggatggacaagttcacccgccagatcctcgaacagaccggcctgctgggcatgatcggcaagtccgagcgcggtcccatcgccatcgaggcgatcaaggacaacaaggcggtatacctgatggccgtcggcggcgccgcctatctggtcgcccaggcgatcaagaagtccaaggtgctggccttcgccgaactgggcatggaagcgatctacgagttcgaggtaaaggacatgccggtcaccgtcgcggttgacaccaacggcgagtcggtgcacatcaccggcccggcggtctggcagaagaagatcgccgaaagcctggcggtcgaggtcaagtaa

SEQ ID NO: 342934 - DNA, 1128 bp, Pseudomonas aeruginosa
atgcgcacagacaagcctcctctgaaacagcgtgcgctgcaaaagctcttgctccgccggttcggcatggccgcaggcacctacctgctcggcctggtcctgctctggctggcgctactcagcggcttctaccgcgcagcgccgaccaccgcggcggccagcaccaccctggtggtggcttgccaactggccttcctctggctgttcgccagcggtcgcaacctgcgttacgccgatcccagcctgaccgagccgcaggtgctggtggcgatcgcctggctgacctatttcctctaccacgtcgacagcctgcgcggcaccttcatggtgttctacgtgctggccctgctgttcggcgtgttccaactgccgccgcgggtcttcgcccgctgtgcggcgctggcgttcatcgctttttccggcatctacctggtagaggccttgcagcagcgtctcgagctaccgggccgggctgcattgcaggtgctcgtgatgttcatcgtaatggtctggctgagcctgttcgccagctacatacaggcgatgcggcaacgcatgcgccagcgccgctatgccttgcaggcgcaccaggacacgctgcgcggcatgatgcgccaactggaagacctggtggccaccgacgaactcaccggtctgttcaaccgccggcatttcatgcgcatggccagccgggcgctggaagacctgctgccgaaccggcagcacggcctggcgctgatcgacctcgatcacttcaagcggatcaacgaccgccacggccacgccgccggcgatcgggtcctgcagaccttcgccgcggtggcgcgttcctgtctgcgcgatggcgacgtcctggcccgttacggcggcgaggagttcgtcctgctgctgccccacgccgacgcggaacagctggaaagctgttgcgagcgcctgcgcctggcgttccaacaggcggaaccggtcggggtcacggtggataccctgagcctttcggtgggcatgaccctgctgtatgccgacgacgatctcgacgaggccttgcagcgggccgaccaggcgctctaccgtgccaagcgcggcggacgaaaccgctgcgacgccacctgggaggtcaccagtgcctga

SEQ ID NO: 342935 - DNA, 927 bp, Pseudomonas aeruginosa
gtgcctgacatacgggtcggcgagcgacgccttgccgtcgccgccggcagcaacctgctggatgcgctgctcgccggtggcatcgccgtgccccatagctgccgcgccggcagttgccacgcctgcctggtgcattgcctgcagggcgaggtggacgacaccctcccggaggcgctcgatccggcacggcgcgaagcgggctggcggctggcctgtcagtgccgggtgctcggcgacctcgtgttgcagcctttcgatcctgagcgcgacgggctgccggccagggtcgtagcctgccactggctgggcgatgtgctgcgcctgcgcctggagccggagcggcccttgcgctatcgcgccgggcagcacctgctgctgtggagcgacgatggcgtggcgcgtccctattcgctggccagcctgcctcacgaggacccatggctggagttccacatcgactgtagcgctcccggcgcgttctgcgaccgcgcccggcgcctggcgcctggcgcgctcctgcgtctgggcgagttgcgcggcggggcgttgcgctacgagccggactggcaggagcgaccgctgttgctgatggccgccggcaccgggctggcgccgctctgggggatacttcgcgaggccttgcgcgcggaacaccaggcgccgatccagttgctgcacctggcgcgcgaccactacctggcgagcgagttggcggagttggccgggcgtcatccgcaagtgcgcgtcaacctggtgtcggcggcgcagttgccctctgccttggccgatctccgccttgttccgcggcgcagcatggccttactctgcggccaacccgccagcgtcgaacgcttcgcccggcatctctacctggccggcgtaccgcgtagccagaccctggcggacctgttcctgccccacgcctga

SEQ ID NO: 342936 - DNA, 774 bp, Pseudomonas aeruginosa
atgagcgagctgattcgggtcgaacgcgaagcggggctgctgaccctgcgcctggaccgccaggacaagaagaacgcgctgacccgcgcgatgtacagtcggatggccgaggcgctgctggaggcgcaggccgatacggctgtgcgggtagtgctgatcactggcggcgatgcctgcttcaccagcggcaacgacatcctcgacttcctcgagcaaccgccatccctgcgcgacagcccggtcggccgcttcatgagcgccctgctggaattccccaagccggtgatcgccgcggtgaacggaccggcggtgggtatcggcaccaccctgctgctgcattgcgacctggtcttcgtcggtcgcaatgcgcgattgaagatgccgttcgtcaacctcggcctgacaccggagttcggctcgagcctgatcctgccgcgcatgctcggtcatgccagggctgcggaattgctgatgctcggccaggacttcagcggcgagcaggcggcggcctggggcctggccaatgcggcgctggaggatggcgccacggtgctggagcacgcccgcgatgcggcccggcgcttcctgcacctggcgccctcggcggtagtggagagcaagcgcctgatgaaagcgccgtttatcgaggagcttcgccgggtgatcgccgaggaaggcgatatcttcagtacccgactgcgctcgcccgaggcgatcgaggcgctcagcgccttcatgcaccggcgccagccggatttctccaggttcgcctga

SEQ ID NO: 342937 - DNA, 1452 bp, Pseudomonas aeruginosa
atgtccgttcgccgcaccaaaatcgtcgccaccctcggcccagccagcaattccccggaagtgctggagcaactgatcctggccgggatcgacgtcgcccgcctcaacttctcccacggcacccccgatgaacaccgcgcccgcgccaggctggtgcgcgaactggcggccaagcacggccgcttcgtcgccctgctcggcgacctgcaaggaccgaagatccgcatcgccaagttcgccaacaagcgcatcgaattgcaggtcggcgacaagttccgcttctccaccagccacgcccgcgacgccggtacccaggaagtggtcggcatcgactacccggacctggtgaaggactgcggggtcggcgatgaactgctgctggacgacggccgggtggtgatggtggtcgaggaagtcgccgccgacgaactgcgctgccgggtgctgatcggcggcccgctgtccgaccacaagggcatcaaccgccgcggcggcggtctcaccgcgccggcgctgaccgacaaggacaaggccgacatcaagctggccgcggacatggacctggactacgtggccgtttccttcccgcgcgacgccaaggacatggaatacgcccgccgcctgctcaccgaggccggaggcaaggcctggctggtagccaagatcgagcgcgccgaggcggtcgccgacgacgacgccctcgacggcctgattcgtgccagcgacgcggtaatggtggcccgtggcgacctcggcgtggaaatcggcgatgccgagctggtcggcatccagaagaagatcatcctgcacgcccgccgcaacaataaagtggtgatcaccgcgacccagatgatggagtcgatgatccacagcccgatgccgacccgcgcggaagtctccgacgtggccaacgctgtgctcgactacaccgacgcggtgatgctctcggcggaaagcgccgccggcgagtacccggtggaagcggtgaaagccatggcccgcgtctgccagggcgccgagaagcacccgaccagccagaaatccagccaccgcctcggccagactttcgaccgctgcgacgagagcatcgccctggcgtcgatgtacacggccaaccacttcccggggatcaaggcgatcatctgcctgaccgaaagcggcttcaccccgctgatcatgtcgcgcatccgctcgtcggtaccgatctacgcctactccccgcaccgcgagactcaggctcgcgtggcgatgttccgcggcgtggaaaccatccccttcgacccggcggcgctgccggcggagaaggtcagccaggccgcggtcgacgagttgctcaagcgcggcgtggtgaccaagggcgactgggttatcctgaccaagggcgacagctacaccgcccagggcggcaccaacaccatgaaggtgctgcacgtcggcgacctgctggtataa

SEQ ID NO: 342938 - DNA, 915 bp, Pseudomonas aeruginosa
atgaacctgcataacctgctggtggtcgtcgacccgagcagcgacgaacagccggcccttacccgtgcccagtggatcgccgaacgcagcggcgccagcgtcgagttgctgctgtgcgacttcaacccggcgctggacggcgggctgttcttcgacagtcactcgctgcagcgtgcccgcgacctttacctggacgaacgggtcacctggctggagcagctttccatgccgctgcagcaggccggcatccgcactcaggtcgaggcccagtggggcaagccgctggaccggatggtcctgcaacgggtcggcgaaacccggcccgacctggtcctcaagagcacccgcaagcacaacctgctgcgccgcctgctactgggcaacagcgactggcaattgatccgccactgcccgcagccgctctggctggtccatcacgacgcctggcgcggccagcgcctgtgcgcggcgctcgacccgctgcatgccagcgacaagccggccgccctcgatcaccggctgatcgccgccgcccgccagctcgaagccagcctggggctgcgcgccgactacctgcatacccacgcggcgatgccgcgcagcctgctgttcgacgcggaaatgctcgccggctacgagcgtttcgtgctgcaacatgaggaacgtcaccgccaggccttcgacgacctgctggcagcctacccggagatcgccgcggagcgccgccacctgctggccggctatgccgagcaggcgatccccgacttcgtccgggccaacgacatcgacctgctgctgatgggcgcggtcgcccgggggcacctggacaacgcactgatcgggcagaccgccgaacgcgtcctggaggaggtggaatgcgacctgctggtgctcaaaccgacaaatgacatctga

SEQ ID NO: 342939 - DNA, 807 bp, Pseudomonas aeruginosa
atgcgcttcgcccgccgtctcgtcctgctcccgttgctgtcgctgctggccgcctgctcgccgaccacgccgctgttcgtcgcccaggtgaccactggcgaagtcgccgaatacaagcagatgaagagcaaccgcatgaccgccgccatcgaggaggaaggcgacctgctgacctacagcgccatggcgatccgcgacaacaggagcgccgaggcggaaaagctctacctcaccggctacgacaatcgccgctacagcgccgaggtgcgcggtatctcgctgtaccagatcggcctgatctacatgagccgctacaacgaccagcgcgacgacgccaaggccaccgactacttccagcgcgtggtccgcgagttccccggcacccacgccgccgagcatgcccaggcgcgcctgctggcaatgcgccagcgggccagggagccggtgcagaagagcgctcgcgaattgctcgccacctggaagccacagcagaacctcgatctctacaagaccagcctcgacccggacatgaccctgctgtcgcgccgcgcggtgctcaaggatcgggtcgacgaagccgccgagctctacctgctggcggtcaacgatccggcgattcctgccggtataaaggaaaaagccctctaccagctcgccctgatgtacctggcgccggacaacccgcacccgaaccgcgacaaggccatcgaatacctgcgtcgccagttgctcgactatcctgaaggcgaattgtcgaacaaggccggccggcacctcgaccaggcgctcaacgtgcaacctcgctga

SEQ ID NO: 342940 - DNA, 378 bp, Pseudomonas aeruginosa
atgcgaagcttgatcgttgcctgcctggcgctgagtgccaccggttgtaacagctggtcgctgaacagcgacctgaacggggcctaccgcgcctacgacaaaggcgattgcgcacaggtgatgctcgacctgtcgcgggccgaacggcggattcgcgcgcggccctacctgcagccggaaatctcgctgctgcgcggccagtgcctggaacgccagagcctgttcgtcgacgcggcgcagacctaccacttcatcatcgcccgttaccccaccagcgaatatgcctaccgtgccaaggcgcggctggagacgttgcgccagctgggccggctgagcgagacgccggcctcggccagcgccgtgccgacccgcctgtag

SEQ ID NO: 342941 - DNA, 423 bp, Pseudomonas aeruginosa
atgcgtgccctgtggttctgtgtcgccctgatgcccgtgctggcgcaggcggacatctatcgctggaccgatgcccagggcaaggtacacttctccgccacgccaccggccggcgcgcaacgcgtcgaagtcaggccgcaggtggtggaacgtgacgccgcgacccgccagcgcgagcagcgcacccaggagtatttcgatgctcgtcgcgaggaacgcaccgccgccgccgaacgtgccggccagcgccaggctgcgctggccgaggaatgcgggcgcttgcggcaacagttgtcccagctcgaacgcggcggccgcttctatcggcaggacgccggcggcgggccggtttatctgagcgatgccgagctggacgccattcgtcgcgaactggcctcgcgggagtccgaacgctgccgctga

SEQ ID NO: 342942 - DNA, 360 bp, Pseudomonas aeruginosa
atgggtcttcaacgacatatccagcgccatcagttgcccagctacctgaaggtgttcaatcgcatcaccgataagccgatgggctacatcggcaacgtctccgaggacggcctgctgctgatcagccaattgccgatgctggtcggcgcgcgtttcgaactgcgcctgaaggttccgggactgggcggtcgcccgcaatgcatcgatttttccgccgactgccggtggacctgcgaggacgtcacgcccggtcatttcgattccggcttccatctgctggcgccgcccgccgaattcctcgaactggtggaggcgctgcgccgctacttcagcttcccccgccagccgcagtcggtctga

SEQ ID NO: 342943 - DNA, 1332 bp, Pseudomonas aeruginosa
atgaagccatcgcgcgccctgctggcgctgttcgccgcgctcctgctgctggccatcggcctgggcagcctgtcggcgctcggccagcggttgcctgcgcaactgcatacattctggtgggcggcgctcgccgcgctgctcctgctcggcctgctggacgccctgtgggcgcgccgccaggcggtgccgaagctgagccgccagctcagcggcaacctgccgctggggcgctggagcgaagtgcgcctgcatctgcagcacacctatcggcgtccggttcgcctgaccctgttcgatcacctgccggccggcatggatttcgagtacctgccgcaggaggtcgaactgcgcccgggcgaaagcaccgaggtcggctaccgggtgcggccgctcaaccgcggtcacttcgtgtttccccgctgcgagctggaactgcccagcccgctgcgcctgtggcggcagcgccgctacctggaagcacgcggcgagacccgcgtctacccggacttcgcccgcctctacggcgccgaactgatggcggtcgaccactggctcaaccagatcggcgtacgcggcggccagcgccgcggcctcggcctggagttccaccagttgcgcgaattccgcgacggcgacaccctgcgccagatcgactggaaggccaccgctcgcaaacgcacgccgatcgcccgcgaataccaggacgaacgcgaccagcagatcctcttcctgctcgactgcggccgccgcatgcgcagccaggacggcgacctgtcgcacttcgaccatgccctcaacgccagcctgctgctggcctacgtggccctgcgccagggcgacgcggtgggcgccatgaccttcgccggcgacgaccgccggcatctcccgccgggcaagggcagcgcccagctcggcgcgctgctcaacaccgtctacgacctgcagaccagccagcgtcccgccgatttcccggaagccgtgcaggcggtgctgtcccgccagcggcggcgggccctggtgattctggtaaccaacctgcgcgacgaggacgacgaagaactgctcggcgcggtgaaacgcctgggccgccagcaccgggtgctggtcgccagcctgcgcgaggaagtgctcgacaccctgcgccacgagccggtcgcccgctacgagcaggcgctcgcctacaccggcaccatcgactacctgaatgcgcgcaacggcctccacgagaagctcgcggcccacggcgtgccagtgctcgatgcgcgtcccagcgaactcgggccggagctgatcagccgctacctgggctggaagcgcgccggcgtgctttga

SEQ ID NO: 342944 - DNA, 1008 bp, Pseudomonas aeruginosa
atgagcgaacagacgcccgaacaaccgagcaccgcgcccaaccctgcgctccagcgccagcgcgccagccagctggcccaggccctgcgcagcgaactgcagaaagccctgatcggccagggcgcggtgatcgacgacgtgctcaccgcgttgctcgccggcggccacgtgctggtggaaggcgtgccggggctcggcaagaccctgctggtacgcgccctggcgcgctgcttcgacggcggcttcgcgcgcatccagttcacccccgacctgatgcccagcgacgtcaccggccacgccgtatacgacctcgccagcgagcagttcaagctgcgcaaggggccggtgttcacccacctgctgctggcggacgagatcaaccgcgcgccggccaagacccaggccgccctgctggaagtgatgcaggagcgccaggtcaccctggaaggacgcgccctgccggtgccgcagccgttcatggtgctggcgacgcagaacccgatcgagcaggaaggcacctatccgctgccggaagccgaactcgaccgcttcatgctcaagctgcgcatcgattacccggccgaagccgaggaacagaccctggtgcgccaggtgacccgctccgcgcgcagcgacatgctcgacgtagccaacctgcggccgctgctgaaggacaaggacgttctcgccctgcagcggatcgccagcgacctgccgatcgacgaccaggtcctcgactatgccgtgcgcctggcccgcaccacccgcaactggccgggcctggccctcggcgccggacctcgcgcgtcgatcgccctggtccgttgcggccgggcgcgggcgctgctgcgcggcggcgagttcgtggtgccggacgacatcaagggctgtgccctggcggtcctgcgccatcgggtccggctgtctccggagctggacatcgaggggctgtcggtggaccaggtcctgcaacagttgctcgaccaggtaccggccccccgcgtatga

SEQ ID NO: 342945 - DNA, 1278 bp, Pseudomonas aeruginosa
atgatgagccggcgcgcgcgcttcctgctgcttgccgtgctcctgctgctggccgggctgctggcgatcttcctggccagccgcctgcaaccctatacggagacgatcgacctcggcccatcgccggaggcccggcgcaatccctacctggccgccgaactgttcctgcgcaagcagggggtcacggtgagccgcgccgacggccttgaggtcctcaaggagctgccgccctccgggcataccctgctcctgctcggcagccgctccggcatgactcccggccaggcgcgccgcctgctgcaatggagcgagcagggcgggcacctggtgctgatcgccgaacgcctgtgggacgaggacgagaagaagagcggcgacctgctgctcgacagcctggatatccgccagtacctcaccgaggacttcgacgacagccaggaccgggccagcgaggaaaccgccgacgccgacgccgacgccgacgaaggtagcgtcgacgaccatgcgaccgaagcgccgccggaggaagccgccggcgaggaagaagagcccgccgacagcgtgccggactattccgcactgacccgcctgtacctggaaaacgagcgctcgccggcctacatcggcttcgatcccgactaccacctctacgatccgcagaaccacgcctacgcctgggccaacagcggcgacgccacccacctgttgcagatgcagcacggcaagggcctggtcacggtgctcaccgacgcctggatctggcagaaccgcaacatcgagcagtacgacaacgcctggctgctctggtacctgacccaggacaaccaggtgaccctgctctaccgcgccgaacgcgacagcctcaccaccctgctcgcccgccacttccccgaggccctggcggcagcgctgctgctgttgctcgccggcctgtggcgcgcagggctgcgccagggtcccttgcagccggtggccagccgttcgcgccggcaactggaggaacacctgcgcgccggcgccgacttcctcctccgccagcgcggccacgtcgccttgctgcacggtctgcaacgcgacatcctgcgcagggcgcggcgtcgccaccccggtttcgaacagctcggcgtcgccgagcaatggcagatcctcgggcgcatgacccgcctgccacccagcgccatcagccaggccatgcgcccatatccggcgcagcgcctttccgctgccgacttcacccgccaggtcgcccacctgcaaagcctcaggaatgccctatga

SEQ ID NO: 342946 - DNA, 1572 bp, Pseudomonas aeruginosa
atgcgcctgactgacgccagcgtggcgatccgcccgcgcagcgcctgggaagcgctcgacctcggcatcctcctggcgcatcgccatgcgcgcctgctgatgggcagctgggcgttgctgaccctgccgctgttcgccgtgctcagcctcctgctgtggcagcatccgaccctggcgatcctgatcttctggtggctcaagccggccttcgaacggctgccgctgtacattctctcgcacgccctgttcggcgatacgccaaccctgaggcaggccctgcgcgcctatcccgccctgctgaggaagcagttgccggccagcctgctgtggcgccgcttcagtccgacgcgcagcttcgacctgccggtcctgcaactggaagggctcgccggggagccccgcagccagcgcctgatcgtattgtcccagcgcaacgccggcggcgcgacctggctgactgtggtcggcgtgcacctggaaatggcgctctgggccggcttcgccatgcttctctacctgctgatcccggcgcagaacgagatcgactggaactggcagagcctgctcgacccggaagccggcgagtggctctggctggagcacctgtcgaacctgctctacgtcctggtgctggtagtctgggagccgatctacgtggcctgcggcttcaccctctacctgaaccggcgcaccgaactggaggcctgggacatcgagctggtgttccgccgcctgcgccagcgtctggtcggcagcgcctatgtcctgctgctcggcctgaccgcttcgctggcctggctgcccgccccttccgcctacgccgagccggcggccgccaccagcgccggcgaagccgagctgccgcccgagcaggcccgcctgctgcggcagaaactcaacagcgaacaggccggcaagcagatccgggcgatcgtcgacggcgcgccgttcaagaacagcgagaccgttacgggctggcgcttcggcgacaagaccgagaaaaaggacagccgcaaggaggacgaagagcggctcaaggcattcttcgaggccctggccaactgggtgccgttccgtcacgcggcgcaggtcatcgaagtgctgctctgggcgctgctgttcagcgcggtgttcctgctggtctggcgctaccgtgaatggctgcgcctgttcgtcggcaacctgggcttgccgcaacgggcccgccgcgaagcgccgacggtgatgttcggcctcgatctcagtccggaaagcctgcccgacgacatcgccggcaacgccgaacggctctggaacgagaaaccacgggaagccctcggcctgctctaccgcgggctgctcagccgactgctgcatgactaccgcctgccgttgaagggctcccataccgagggcgaggtcctgcgtctggtcgaaggactggagcaacaacggccgctgctgcactacagccaactgctgaccgcccaatggcaggcgctcgcctacggccaccggctgccggccgacgacgctcgccagcgcctctgcgacggctggcgcagccttttcgccgcgggagccaagccatga

SEQ ID NO: 342947 - DNA, 981 bp, Pseudomonas aeruginosa
atgaaacagagcctcttcgaacagcgccaccaggccgcctggctacgcttcgacaaacgcctcgccttcctcgagaaaggcaagaagctggaaggctccagcgacaacttcgccgccgattaccggcgcctctgccagcaactggcgctggcccaggagcgcggctacagcagtcacctgatcgaccagttgcagcaactggcgatgcgcggccatcagcagttctaccggcaccgcagccacctcggcagccgcatcctcggcttcctgcttgccggcctgccgcgcctggtccgcgaggagtggcgcagcatcgccgtggccagcctgctgttctacggcagcgccctgctcatggggctgctggtctatcactttcccgacctgatctacagcgtggtcagcccggacaaggtcagcgagatggagtctatgtacgccccggaaaccacccgcctgggtccgttgggggcacgcgacaccagcgacgactgggaaatgttcggcttctacatcatgaacaacatcggcatcgcctttcagaccttcgccagcggcgtgctgctgggactcggcagcctgttcttcctgctgttcaatggcctgatgatcggttcggtggccggccacctgacgcagatcggctacgtgcagaccttctggccgttcgtcatcggccacggcgcgttcgaactgaccgccatcaccttcgccggcgccgccggcctcaagctcggctgggcgctgctcgcgccaggtcgcctgacccgcggcgaagccctgcggctggccgcccggcgcagcgtgcaactgatcgccggggtgatcgtgctgttgctgctggcggccttcaccgaggcctattggtcttccatcagtcatttcgagccgcgggtgaagtacgcggtcggcgcggtcctctggctgctggtcggcagctacttcctgttcgccggacggagccgccatgcgcctgactga

SEQ ID NO: 342948 - DNA, 750 bp, Pseudomonas aeruginosa; identical to SEQ ID NO: 322568

SEQ ID NO: 342949 - DNA, 738 bp, Pseudomonas aeruginosa
atgaacgacaccagcaatccctacgccacccccgccagcgccctgcaaccgacccaggcggtgccgccggtcatcggcgactacgacttccgcatcggcgacgtgatcagcgaagcctgggccaagatcaagggcgtcaaaggcatcctgatcggcgccttcgtggtctacagcgtggtgatccagaccatcaccttcatcctcaccctgctcttcggcggtatcggcctgatgagcgaggccgatcccatcgccttcgcggtcggccagatgatcgccagcctggtcgccacggcggtgggctacccgttcttcaccggcctgaccatgatcggcatccgccgcgccgccgaccagccggcgaccttcaacgaaatgttcaactacttcggcatgctggtgccgctgctgctcaccggcctgctgatgatgctgatggtctacgtcggcttcttcctgctgatcatccccggtctctacctgagcgtcgcctacatgctcgccctgccgctggtggccgagcgcggcctgacgccctggcaggccctggaaacctcgcgcaaggccatcagccgccactggttcaaggtgttcggcctgctgctggtgctgagcctgctgatgctggtgagcatgatcccgctgttcatcggcctgatctggaccggcccgctgttcgtcgtctccatgggtattctctaccgcaccatcttcggcgttcgcccgctaggcaactga

SEQ ID NO: 342950 - DNA, 375 bp, Pseudomonas aeruginosa; identical to SEQ ID NO: 324760

SEQ ID NO: 342951 - DNA, 852 bp, Pseudomonas aeruginosa; identical to SEQ ID NO: 322564

SEQ ID NO: 342952 - DNA, 213 bp, Pseudomonas aeruginosa; identical to SEQ ID NO: 324762

SEQ ID NO: 342953 - DNA, 348 bp, Pseudomonas aeruginosa
atgatcggattgccagcgggcacccgcgtctggctggccgcaggccacaccgacatgcgcaagggcttcgatggcctggctgctgtggcgcaagaagtcttgctgcaagacccgtttggcggccatgtgttcgtcttccgtggtcgacgcggtgacatcatcaagctgctgtggtgggatggccaagggctgtgcctgctgagcaagcgactggagaagggccgctttgtttggccacaggccgatgtcggcaaggtcagcctgagcccggcgcagttgtcgatgctgctggagggcatcgactggcgcatgcccgagcgcacctggcgaccagagcgtgctgcctga

SEQ ID NO: 342954 - DNA, 1563 bp, Pseudomonas aeruginosa
atgccgcacgatccgcacccgcatgaccactccgagctgtctcgccagttgcgcgacagccgccaggagttggcccatgccaagctgctgatcgataagctcaagaccgagatcgcctacctgcgccgcatgcacttcggccgcagcagcgagcagctcgatgcgactgttcagatggagctgttggcgcccaccgcaacggttgagtcacaagcagccaacgatgagcctgaaggtggcgacaacggacgcaagcgctcacgcaagggtcgcccgggcctgcgcgacttgcccgcccacttgcctcgtgagatcgtggtgcacacgcccgatgccggctgcgcttgcggcgcctgcctggacgccctgcgcaccatcggtcaggacgtcagtgaagtgctcgactacctgcccggccagttcaaggtcatccgccatgtgcgcccccgcctggcctgcccggcgtgcgacagcatcgtgcaagccagtgcaccgagccgaccggtcgatcgcggcatggccggcgccggcttgctggcccatgtgttggtgagcaagtatgccgatcacaccccgctgtatcgcctgtcgcagatctacgcccgtcagggtgtcgacctggagcgctccaccctggctgactgggtcggcgcagctgctgcgctgctcagtcccctggcgcaagccattggccgccatgtgctggcggcggccaagatccacaccgacgacacgccgattcgcgtgctgggtggccagggccaacaggctcgcacagggcgcctgtggacctatgtgcgcgacgatcgcgccagtggcgatgtcacacctcaggccgtgtggttccagtactcacccaatcgcaagggcgagcaccccaggcgccacctggcgggcttcaagggcatcgtgcaggcagatgccttcgcaggctacgaccggctgttcgacagcggcgagatcatcgaggccggctgctgggcccatgccaggcgcaagttctacgacgtgcacatgcagcagcaccagcaacctggcaccttggcgcaccaggccctgctgcgcatcgcccgggtgttcgccattgaggctgacatccaaggccaagcacccgatgagcgacgacgacagcgacagcaacacaccgcacccatcttggctgaccttcatgcatggctcactcagacgcaggcacagctgtctgccaagtcaccgatggcgatggccattggctacagcctgagccattggcgggccctcacgcgcttcgtggacgacggcctcatggaggcgcacaacaacatcgccgagcgatcactgcgcggcgtggccatcgggcgcaagaactacctgcatctgggctcggatgcgggcggagagcgcgccgccatcgtctacacgctgctgggcacggccaagctacacgggatcgatccatacgcctacttgcaccaagtgctggcacgaattgccgatcaccccatcaaccgcatcgatgagctgctgccatggcgggtgtgcccaccgcagcaggccacgcccgaacaacgccaggccgcatga

SEQ ID NO: 342955 - DNA, 609 bp, Pseudomonas aeruginosa
atggtcacctcatcgaacaggccctcgctcaagctcgtcgggtcatcccccagaaacgtcaaggtgctgcaactcaaggtcgagctgcagggtgtgcgccccaaggtctggcggcgcgtgttggtgcccgccagcatccgtctgcccaagctgcatgtggtgctgctgcgtgtcatgggatgggacggcggtcacctgcatgagttcgagttctctgaaggcagatatggcgtgccagatccagattggcccgatgagtcgatggacgacgaagccaaggtaacgctgagcaaggcgctcggctacagcaccacgttcacctggagatacgacttcggtgatgactggacccacaagatcaaggtcgagcgggtcgacaccatgcctgccgaactcaagctgcagttccccatgtgcttggcaggcgctggtgcctgtccacctgaggacgtgggtggcacgcctggctacgcagagttcttggaggccatctccgacccggcgcatccggagcatgacgacatgacggcgtggatcgcgcgccccttcgatcccaatgccttcaatgtgcaggaagcacaggatcgactgtatgagatcaagctctag

SEQ ID NO: 342956 - DNA, 1263 bp, Pseudomonas aeruginosa
atgtcccacgcgcttgaaactctcatcggtcactggaaagccgatccgctgagcacctacaacacctggttcctgtgggaagaacggctgaagaacttccgctcgattcgccgcggcctggcgcaggtggtcaaggacatcgatgcgggcaccttcggtagcgcattccgcggttcctcgctcgaaacggtggtcggatcggtggccgagcagcgccagatctttaagggggcagaccatgcattcctgtggaagcccaagctgcgcattcccgacatctacgagaacgcaatcaaccaacaggcctttgcccggttgttgcacacctgcgactgctgcaacagcgcagaggaagtgatcgaagcaatacggcggatcgacgctcgtcagatcaagggcctgggtcccgccgtggcgaatctcctgtacttcgttcaccccacgatcgtgatgccgttcaacaccgcgatcgtgaagggctacaacgcggtcacgggcagcagcgtcaagctcggcaagtgggagcactacctctcgatgcgcgaaggcggccttcgcctcaatgcccagcaccgcaacgcgttgtcgaacgacatgggggcactggctgggctgctgttcgacatcggctcgggccggtacgcggcgccaccgcgcgatgacgatgcggccgccgtccagggctgggaggccgatctcgaaaaggtgcgcgaggaatcggccgcggcccacaaacgctgggccgcggagcgcgagagcgacgcgacccacaccgaaattcagggatggctgcgcgacctgggcaagtcgctcggctacggtgtctggattgcgtccaacgatcaggggcgcagttatcggggaggacgcctcggagatggctgtctgacgcagcttcccgcgcaggcccgggccggtctggactctgttcgcctgatcgacgtcatttgggtggaggccgacggctcgaagatcgccgctgccttcgaggtagagcactcgacctcgatctattccgggatcgtgcgcatgctcgacctagccttgggcacggagctgggagcgggtgtatcgatgttcctggtggcgccggacgctcgccgcgaggatgtccgcagccagttgcgtcggccggcattcacgcgggtggcggagctgggaattcgctacctcccctacagcgagcttggcgcgcatcgcgatgcgatcggcagattcggctcgggcctaaagccgttgaacgagatctcgcacctgctgtga

SEQ ID NO: 342957 - DNA, 231 bp, Pseudomonas aeruginosa
atgagcgccttgaaagccgcccgcaagcaggcgggcctgacccaaaccgaactagcgaaaagcgttggtctcactcagggagcaattacccactacgagaccggtcgacggactcctgagttgaacctgtgccgtcgtattgtcgcggcgctaaacgccggcggctccagctttagcctggaggacgttttccctgaacctgaggccagcgccgagcgcctggccagttga

SEQ ID NO: 342958 - DNA, 312 bp, Pseudomonas aeruginosa
atggcggattcaatgtggggagaagtcttcgccggcgctgccggcgggatactggtattagttgtgcagggtgggtggggctggctccgggatattgttgactccaagaggatttaccaatggctgaagactcagcaggacgggggaggtgagagtttccgtagtacccgtgcgattgccagccatctaaatctgaccgaggccaggacatacaagctttgcgccgagagtgccaagatattcatgtcaaccggcaagaaagagggtatgtggagtatctccagtcggaaggaaaaaggctttttcagctga

SEQ ID NO: 342959 - DNA, 1752 bp, Pseudomonas aeruginosa
atgccgtggccggtgcggcgggcacggcgggaaccgccaacccgctccagtcgtcgggccgcgatggcggcgcgtctgcgtaccgtccgcgtagtagcgcagcttcttcgccttgattggcgcgacgctggacaccatcaccaccgcctcgtcgggcggaagctgcatcacttcgcccggcgtcagcagcgggcgcgcggtttcctggcgcgacaccatcaggtggcccagccacggcgcgagccgatggcccgcgtagttgcgctgggcgcgcagctcggtggccgtgcccagcgtctcggagatccgtttggcggtgcgctcgtcgttcgtggcgaacgtcacgcgcacatggcagttgtcgaggatggagtggttttgcccatacgccttgtcgatctggttgagcgactgcgcgatgaggaagctgcggatgccgtagcccgccatgaaggccagcgccgtctcgaagaagtccaggcgccccagcgcagggaactcatcgagcatcagcagcagcttgtggcggcgctcgatgccatcggagccatcgagcgattcggtgaggcgccgtccgatctggttgaggatcaggcgaatgagcggcttcgtccgcgaaatgtccgaaggcggcaccacgaggtacagcgataccggatgctcgaccgcgatcaggtcggcgatgcgccaatcgcagcgcgaggtgacttcggccaccgtcgggtcgcggtacaggccgaggaacgacatggcggtgctcaacacgccggaacgctcgttgtccgacttgttgagcacttcgcgcgccgccgaagcgacgacaggatgcggcccatcgcccaggtggggcgtggtcatcatccggtgcaaggtcagctcgaacgggctggccgggtcggagaggaagttggcgacgccgcgcagcgtcttgtcttcgccggcgtagagcacatgcaagatcgcaccgaccaacagcgcgtggctggttttctcccaatggttccggcgctccaatgcaccttcgggatcgaccaaaatgtctgcgatgttctgaacgtcgcgcacctcatgcgcgcctcgccgcacctccagcagcgggttgtaggccgccgacttcgcatcggtcgggttgaacagcaggcaatgcgagaaacgcgagcgccagcctgcggtgatctgccagttctcgcctttgatgtcgtggatgacggcggatgcgggccaggaaagcagcgtcggcaccacgaggccaacgcccttgcccgagcgcgtaggcgcgaaggtcaggacgtgttccgggccttcatgccgcaggtactggcggtcgtgctggccgaggaacacgccggccggttgcgtgaggcccgccttgcgaatgtcctgcgcgctagcccagcgcgcagagccgtaggtggtaacgaggcgagcttggcgcgagcgccagaccgacatggcgatggcaacgcccacggcgaccatgccgctggtgccggcgatggtgccgccggtgtcgaatacttccggtgcataggccccgaagaagaaccaccactcaaacagtttccaagggtggtagatcgacgtgccaaggaagtcgaaccagggcgagccaaggcgtacttgatagccaagggcggctgctgtccattgtgtggcgccccacacgccggcgatcacgatgccgaatacgacggcgatctgaccgaacagcacgttcgtcccttgcatgacctggcctccgatttctcctga

SEQ ID NO: 342960 - DNA, 9459 bp, Pseudomonas aeruginosa
atgccgctgagtccgaacggcaagctggatcgcaaggcgttgccggcgcctgaagtaagcgtggcgcaggcaggctacagcgcaccgcgcaacgcagtggagcgaaccctggcggaaatctggcaggacctgctgggcgtcgagcgggtcggcctggacgacaacttcttcagcctcggcggcgactcgatcgtctcgatccaggtagtcagccgtgcgcgccaggccggattgcaactgagcccgcgcgacctgttccagcaccagagcatccgcagcctggccctggcggccaaggcgggtgcggcgacggcggaacagggtccggcaagcggcgaggtggcgctggcgccggtacagcgctggttcttcgagcagtcgattcccaaccgccagcactggaaccagtctctcttgttgcaggcgcgccagccgctcgacggcgaccggctggggcgtgccctggaacgcctgcaggcgcagcacgatgccctgcgcctgcgtttccgcgaagagcgcggcgcctggcaccaggcctacgccgagcaggccggcgagccgctgtggcgccggcaggcggggtccgaggaggtgttgctggcgctttgcgaagaagcccagcgcagcctcgacctcgaacaggggccgctgctgcgtgcgctgctggtggacatggccgacggcagccagcgcctgctgctggtcatccaccacctggcggtggacggggtgtcctggcgcatcctgctggaagacctgcagcgtctctatgccgacctcgacgccgatctcgggccgcgtagcagttcctaccaggcctggagccggcacctgcacgaacaggccggcgcgcgcctggacgaactcgactactggcaggcgcaactgcacgacgctccgcatgcgctgccatgcgaaaacccgcacggagccctggaaaaccgccatgagcgcaagctcgtcctgaccctggacgccgagcgtacccggcagttgctgcaggaagccccggcggcctaccggacccaggtcaacgacctgctgctgaccgccctggcccgtgcgacctgccgctggagcggcgacgccagcgtgctggtgcagctcgaagggcacggccgcgaggacctcggcgaggccatcgacctgagccgcacggtgggctggttcaccagcctgttcccgctgcgcctgaccccggccgcggacctcggcgagtcgctgaaggcgatcaaggagcaactgcgcggcgtgccggacaagggcgtcggctacggcctgctgcgctacctggctggagaggaggctgcggcccgcctggccgcgctgccgcagccgcggatcaccttcaattacctgggccggttcgaccgtcagttcgatggggcggcgctgctggtaccggccacggaaagcgccggcgccgcccaggatccgtgcgccccgctggccaactggttgagcatcgaaggccaggtctacggtggcgagctgagcctgcactggagcttcagccgggaaatgttcgccgaggcgaccgtccagcgcctggtcgatgactacgcgcgggagctgcacgcgctgatcgagcattgctgccaggagggcaatgtcggcgccacgccgtcggacttccctctcgcgacgttgcgccaggagcagttggatcgcctgcctctggcgcggatcgaggacatctacccgctgtcgccgatgcagcacggcatgctgttccactcgctctacgagcaggcttccggcgattacctgaaccagctccgagtcgacgtccatggactcgatcccgcgcgcttccgcgccgcctggcaggcggcgctggacagtcatgacatcctgcgcgccggcttcctctggcagggcgatctggagcagccgctccaggtgatccacaaacacctcgaactgccgttcgccgagcatgactggcgtggtcgcgaagcgctcgccgaggctctcgacgagctggccgcgagcgaacgccagcggggtttcgagctggagcaggcgcccttgctgcggctggtcctggtgcgtatggacgaagagcgctaccacctggtctacacccaccaccacatcctgctggatggctggagcagcgcgcagctgctcggcgaggtgctcgctcgctacaccggcgaacaggccgagcgcacgggtgggcgctaccgcgactacatcacctggctgcaggcacaggacaagcgcgtcagcgaagcattctggaaagaacaactggcggaactgctggagccgacacgcctggcccaggcggtcgccgccgagcgcgagcaggtcggcagcggccagttccagcgcagcctgccgccggcacgcaccgcgcgcctgaagacgttcgcccagcggcacgcggtgaccctcaataccctggtgcaggccgcctggtcgctactgctgcaacgctacaccgggcaggatacggtggtcttcggcgccaccgtcgccggccgtcccgccgaactggccgggatcgaaaggcagatcggcctgttcatcaataccctgccggtggtcgccacgccgcaaccgggcatgcgcctcaccgactggttgcaggaggtgcaggcgcgcagcctggcgctgcgcgagcaggagcacacgccgctgttcgagatccagcgttgggccgggctcggcgaggcgctgttcgacagcctgctggtattcgagaactaccctgtggccgaagccctggaaaaggggtcgccaggcggcgtgcgcttcggcccggtgagcaatcatgaacagaccaactacccgctgaccgtcgccctgggcgtcggcgacagtctgtcgctgcaatacagctatgaccgccaggcgttttccgatgccgcggtcgagcagttggaccggcacctgctgaacttgctcgaaggcttcgtcgacaacgccgaacggactctggtcgagctgagcctgctggatgccgaggagcgcgcgctgatcgattcgctgtggaaccgcagcgagtcgggcttccccgcttcgccgctgatccaccagcgggtggcggagcgcgcacgcctggccccggacgcgccggcggtgctgttcgacgaccaggtgctgagcttcgccgagctggacagccgggccaatcgcctggcacatgcgctgatcgcccgcggcgtcggtcccgaggtgcggggggcgatcgccatgcagcgcagtgcggaaatcatgattgccttcctcgccgtgctgaagtccggcggcgcctacgtgcccctggacatcgagtacccgcgcgaacgcctgctgtacatgatgcaggacagccgcgcgcacctgctgctgacccagagccacctgctcgaccgactgccgattcccgacgggctgtcctgcctgtgtctagaccgcgaacaggagtgggccggtttccccgcccatgatccagaggtggcgctgcatggcgacaacctggcctatgtgatctacacctccggctccaccggcatgcccaagggcgtggcagtgtcccacggcccgctggcggcgcacatcgtggctaccggcgagcgctacgagatgaccccggcggactgcgagctgcacttcatgtcgttcgccttcgacggctcccatgaaggctggatgcacccgttgatcaacggtgcgcgggtgctgatccgcgacgacagcctgtggctgccggagcagacctacgcgcagatgcatcgccacggcgtcaccgtcgcggtgttcccgccggtctatctgcagcaactggccgagcacgccgagcgcgacggcaacccgccggcggcccgggtctactgcttcggcggcgacgcggtggcgcaggccagctacgacctggcctggcgcgcgctacgcccgcaatacctgttcaacggctacggaccgaccgaaacggtggtcaccccgctgctctggaaagcccgcccggacgacccctgtggcgccgcctacatgccgataggtacgctgctgggcaatcgcagtggctacatcctcgatgcccagttgaacctgctgccggtcggtgtggccggtgagctgtaccttggcggagaaggcgtggcgcgcggttacctggagcgtccggcactgaccgccgaacgtttcgtgccggatcccttcggcgcgcccggcagccgcctgtatcgcagcggtgacctgacccgtgggcgggcggatggcgtggtggactacctgggacgggtagaccaccaggtgaagatccgcggtttccgtatcgagctgggcgagatcgaggcacgcctgcgcgagcaggcggcggtgcgcgaggcggtggtggtcgcccaggcgggtgccagcggccagcaactggtcggctacgtggtcccgcaggatccggcgctggtcgaggatgccggtgcccaggcggcctgccgcgacgccttgcgcaaggcgctgaaggaacgcttgcccgagtatatgttgccggcgcatctgctgttcctggcgtgcatgccgctgacccccaacggcaagctggatcgaaaggccctgcccaagcccagtgccgaccagcagcaacgcgactaccaggcaccgcgcagcgaagtggaaagacaactggcgacgatctgggcggaggtgctgaagctggagcaggtcggcctggccgacaacttcttcgagatcggcggcgattccatcatttccctgcaggtggtcagccgtgcgcgccagctcggcatccatttcactccgaagatgctcttcgaggcgcagaccatcggtgccctggctccgctggccgagagcggtacgcaggtgctggcgatcgaccagggaccggtgaccggcgtcacgccgttgctgccgatccagcagggtttcttcgccgaagaggtcgccgagcgccactggtggaaccagtcggtactcctggaagcccgcgagccgctcgatgcccggcaccttgagcaggccctgcggggcatgctggcgcaccacgatgcgctgcgcctgtccttcacccgcgaggcggccggctggacggcgcgccaccggggtgtggaagagggcgctgcggcgctgctccgcgtcgctcgggtcgccgacctggcggcgctgcgggcgcttgccgacgaagtccagcgcagtctcgacctggccgatgggccgttgttgcgcgccctgctggcgactttcgacgacggcagccagcgcctgctgctggttatccaccatctggtagtggatggcgtgtcctggcgtattctcttcgaagacctgcagaccgcctaccggcagttgctggcgggtcaggccgtcgagctaccggccaagaccagcgccttcagggattgggccgagcgcctgcgggcgtttgccggtgacggcggcctggatggcgaactggcgtactggcaagggcaattgcagggcgcctccagcgacctgccgtgcctcgacccgctgggcgaccagagcaaccgccatgcccgttcggtcagttgcggactggacgccgaggcgacccggcaattgctgcaggaagcgccggccgcctaccgcacccaggtcaacgacctgctgttgaccgcgctggcgcgggtgatctgccgctggaccgggcaggtcgatgcgttgatccagttggaaggacatggtcgcgaagaactcttcgccgagatcgacctgacgcgcacggtgggctggttcaccagcctgttctcgctacgcctgacgccggccgagggcatcgccgcatcgatcaagggcatcaaggagcaactgcgcgcggtgccgaacaagggcatcggcttcggcgccctgcgctacctgggcagcgcggcgagccaggcagccctggccgggttgccggtgccgcgcatcaccttcaactacctcggccagttcgacggcagcttcgccatggacgagggcgcactgttcgttccggccggcgagcgcgccggcgacgaccagagcccggacgcgccgctggctaactggctggcgctgaacggacgcatctatggcggcgaactgcgcatcgactggagcttcagtggcgagcgcttcgaaaccaccagcatccagcgcctggccgacgcctatcgcgacgaactgctggcgctgattgcccactgccgagtggccgagggccagggtctgacgccctcggacttcccgctggcgcgccttgaccaggcgcgtctcgaccaattgccgctggcgccctgcgaagtcgaggacctctacccgctatcgccgatgcagcagggcatgctgttccacagtctgtaccagcaggaggccggcgattacatcaatcaactgcgggtcgacatcgacggtctgcatccggagagcttccgcgcggcctggcaggcggcgttggacgagcacgatgtgttgcgcagcgggttcctctggcagggcgccttcgagacgccgctacaggtggtgcgcaagcgtgtcgaagtgccgttcagcgtacttgactggcgcggtcgcgaggacctggcggcggccctcgacgagctggctgccggcgaaggccggctgggcttcgacctgagcgaggcgccgctgctgcgcctggtactggtgcgcacggacgaagagcgctaccacctgatctacaccaatcaccatatcctgatggacggctggagcaactcgcagctgctcggcgaggtactgcagcgctaccgtggcgaaacgccgccgcgctccggcggccgctatcgcgactacatcgcctggttgcagcgccaggacgccgcgctcgccgaggccttctggctgccgcgcctgcgccaactggacgagccgacccgcctggggcagtcgatcgcccaggccaggcagcgcggcaagggctacgcggaacggttgcgcgagctcgatggcgagcagacccggcgcctggccgagctggcccgcgagcagaagatcaccgtcaataccctggtccaggccgcctggctgatgttgctgcaacgctataccggacaggacagcgtggccttcggcgctactgtcgccggtcgcccggcggaactgaacggtatcgaggagcagatcggcctgttcatcaataccctgccggtcatcgctagcccgcttccgcagcagagcctggcgtcctggctgcaggcggtgcagggcgagaacctggccctgcgcgaattcgaacacacgccgctgtacgacatccagcgctgggccgggcagggcggcgaggcgctgttcgacaatatcctggtgttcgagaactaccccgtttcgcagatgctccagcagcaggcctcgcaaggcctggctttcggtgccgtgggcaaccacgagcagaccaactacccgttgaccctcagcgtaagcctggggcagcgcctggaactgcagttcgcctatgaccgcgagcatttcgacgacgccagcgtggcgcgcctggatcgtcacctgacgcacctgctggcgcagatggtcgagcgtccggccagcacctgcctggccgagttccagctgctggaagcggcggagcggcgccaggcgatcttcgactgggggcgcaacccgggacgctatccggacgagcgcagcgtcgagcagctgttcgccagccgcgcggcgatggagcccgagcgggtcgcattgctcttcgaggagcgccagctgagctacggcgagctcaacgcccaggccaaccgcctggcccaccgcctgatcgagctgggcgtggggcctgacgtgctggttgggatcgccgtcgagcgcgggctggaaatgatcgtcagtctgctggcggtgctcaaggccggcggcgcttacgtaccgctggacccggaatatccgcaggagcgcctcggctacatgatcgaggacagcggcatcgccctgttgctcagccagagccacctgctgcaacgcctgccagcggcctccgggatcgcctgcctggcgctcgaccaggcgcgggactggcaggaccgtccggcgagcgacccgcagttgcgggcgcatccgcagaacctcgcctacgtgatgttcacctccggttccaccggccgtcccaagggcgtcggcatcagccgagagagcctgtcgcggcatacccacgtttcgctggagttcttcggcatcgggccggacgaccgggtgctgcaattctccaccttcaatttcgacggcttcgtcgagcagctctacccgccgctcgcctgtggcgcctcggtggtgctgcgcggcaccgagatctgggacagcgagacgctgtaccgggagatcgtcgagcgacgcatcaccacggtggacctgactaccgcctactggaacatgctggccaaggacttcgccaaccagggcgtgcgcgactacggcgcgctccgtcaggtccacgccgggggcgaggcgatgccgccggaaagcctggtggcatggaaggccgccgggctggagcatgtgcgcctgctcaacacctacggccccaccgaggcgaccgtcacggtcaccaccctggattgcgcgccctacgtcgacggcagcaaggcgatcccggcgaccatgccgatcggcaaggtgctgccgggccgcgccatctatctgctggacgatgccgggcaaccggcgccggtcggggcggtcggcgagctggtgatcggcgccgagctgctggcgcgtggctatttcaagcgtcccgacctgacggccgcacgcttcattcccgatccgttcgacgagcagggcggcggccgcctgtaccgcaccggcgatctggcacgctacggcgccgacggggtgatcgagtacgtcggccgggtcgaccatcaagtcaaggtccgtggcttccgcatcgaactgggcgagatcgaggcctgcctcggcgagcacccggcggtgcgcgaggccctggtcatcgccgtcgagggtgctgctggggcgcagctggtggcctatctggtgccgcaagcggaagcgctggctagcgccacgctggaggtacaggccgcgctgcgcaacgagctgaaggccctgctgcgcgacagcctccccgaatacatggtgccggcgcacctgctgttcctcgaacgcctgccgctgagccccaacggcaaggtcgaccgcaaggctctgccggcgcctgacgccagtctcctccaggaggcctacgtggcgccgcgcagcgagctggaatgccaggtcgcggcgatctggcaagaggtgctgaaactccagcgggttggcctcgacgaccatttcttcgaactcggcgggcactcgctgctggccatcaacgtgatttcgcgcattcaactggagctgggcatgaagctcaccccccaactgttgttccaattcccgaccctggggcttttcgtcagcaatctggaaaaggccggtgggcaggtcgacacatcgaaactgaacaagctggaagccctgcttgatgaaatggaggaagtttga

SEQ ID NO: 342961 - DNA, 1380 bp, Pseudomonas aeruginosa
atgtttaatatcgaaaagatagacagaacggaaattgcccctttactgagcaagaatgaaactcattatttagacttcaagtcaaaagatatatctggaaaagatctccaacgccatatagtcggctttgcaaatgccgacggcggagaactctacgtggggatatcagaggaaaaaaataaatttttcatcgacgggctagactctatagagagcgccaaccaaataatacagacagccctacttgaaataactccatcagtggaagatctaatgatagacttcctcgagatagaaaaattctacgtaatcaggattgtaatcccgaaatcaccaaaacttcaccataccgcctctggcgattgctatataaggctttccgctcaaactcaaaaaataaaaggtgatgaagctgtctccctagcatactctaaaggcttcttcaaatatgaagaacaacctgtaaatgctacctcaccacatgaaatcatagagtcaggacatttaactgattttttagaaagaatcgggagcaaacaagacgccctcagatttcttcgccgaaatagacttctcgatatctcaacagctgcagaaaaagtaaacgtagggtgcgtccttcttttcgacaacgaccctgatgaagttctatctacgaaggcaagcattaaaatccttcgaatgaaaaccacttcagatcagtataagagagaacagctttctgaccatgaaaagctatcaggccccttagagtctctaataataaaaactgaggagcgcatactaaaatacatgcaagaagcctctttcgaaatagacggagtgaaatttgaagtatcctacccaatcgaagcggtccatgaaattttagtaaatgctttcctccatagggactattcaatttcggatgaaatacagatcacgatcttcgacaatcgcattgaaattaaatctcccggccgcttacccggcggcgtaacaaaagacaatattttgaatgctcacttcgcaagaaatccaaatcttgtcagattaataaataaactaccaaaacctcttaaccatgacctcggcgaagggctagacacagcctttcgcgcaatgaacagagcgggcctagtatacccagacatcgtacaaacagatgattccgtaatagtatctctcctacacaaaaaggcagcctcatatgaagagataattatggactatctaaaagaaaatgactggataaccaataaaattgcccgcggcctcacgggagaagggtctgagaataaagtaaaaaatgcgcttcaaggactcagaaggaaaggactcatagagcctgaagatgctagtgtcagtcgattcaattatagatatcgcagaacaaagtaa

SEQ ID NO: 342962 - DNA, 1143 bp, Pseudomonas aeruginosa; identical to SEQ ID NO: 335750

SEQ ID NO: 342963 - DNA, 837 bp, Pseudomonas aeruginosa
atgaagacggtctgcgaagttctcggcgtggcgcgctctgccgtggcggtgaagcgagctcgctcgtccgactggcgcgatggtcgccgtgcccgcgtgaccaacgatgccgggctggtcgaggagattcaggcccatgtggcgcaccttcccacctacggctaccgccgtgtctgggcgctgctgcgccgcagtcgggagcagagcggtgcgccgtgcatcaacgtcaagcgcgtgtatcgggtcatgcgggagcatcagttgctgctgcgccgccctggcgtgcggcgagataagcggcgacatgacggtcgcgttgcggtggaccgcagcaacacccgctggtgctccgatggcttcgagttccggtgcgacgatggtacgccgctgcgcgtgacgtttgcgctggactgctgcgaccgcgaggcgattagctgggcagcaacgaccggcgggcatagcggtgatgtggtgcgcgacgtgatgctggccgccgtcgaacagcgcttcggcaccacgcaggccgcgcagcccattgaatggctgacggacaacggctcggcctacatcgaccaccgcacgcgcagcttcgctcgcgaactgggtcttgagccgctgaccacaccggtccgttcgccgcagagcaatggcatggcggaatcgttcgtgaagaccatgaagcacaattacgtcgcctatatggacaagtctgacgcaccaacagcgctctcgcgtctggcaatcgcgtttgaacactacaatgagcgccacccgcacaaagccctgaaataccgctcgcctcgcgagttcaggcgtaatgcggtgtcatcaacctaa

SEQ ID NO: 342964 - DNA, 402 bp, Pseudomonas aeruginosa
  misc_feature (354)..(354): n is a, c, g, or t
gtgcctatcagtaagcctagtcattacgtggaaagcatcgaaattctgaccgagccggagcgccgtcggcggcgcacggcgcaagaaaaaatcgccatcgtgcaggaaacattggagccgggagcatcggtgtcggccgttgcacgtcggcacggcgtcaacgccaaccaagtgtttggctggcgcaagcaataccaggaaggcagtctggcggcggtgaaggcaggcgaaaccgttgtgccggcatctgagctggccgccgccatcaaggaaatcaaggaactgcaacggctactcgggaagaagacgctggaggtcgaaatcctgaaagaagccgtggaatggggccgttcnaaaaacctgattgcgcgctcgcccttgctgccgggggacgaccgatga

SEQ ID NO: 342965 - DNA, 1671 bp, Pseudomonas aeruginosa; identical to SEQ ID NO: 335758

SEQ ID NO: 342966 - DNA, 612 bp, Pseudomonas aeruginosa
atgcttgaagctctcgatctcgcgggcgttcgcggggagcgccgcctgtttgaccatttgactttccggatcgtgccgggcgagtgcctgtcggtgcacggcgagaacggcagcgggaagaccacgctattgcgaacgcttgcagggttcgctacgcctgctgctggcagagtcttgtggaaaggaaagccgctgcgcaaccagtggagtgaataccaacgcgaactggtttacaacggccatggcattggactcaaagaagacctgaatgccttggacaacctgcttgccgcggccgccatcgctggtgagccggtcaccacggaatgcgtggaatcagcgttggacgaagttggcttggccgagcacaggcacttgccgttccggatgttgtcacaaggccaaaagcgtcgtgcaagcctggctcgattgctcctctacaggaggaagttgtggattctcgatgagccctccacagcgctggaccaattcggtgcgcgatggcttggtgaactgatccatcggcaccagtcacgcggcggcatggtcgttctgacgagtcaccaggagctggccttgaaaacttctcagaccgtccggatgggggcatga

SEQ ID NO: 342967 - DNA, 1962 bp, Pseudomonas aeruginosa; identical to SEQ ID NO: 335771

SEQ ID NO: 342968 - DNA, 1533 bp, Pseudomonas aeruginosa
gtgctgcccagcctcaagcagatgtcgatctatgacattcgcaggccgcaactcctgggcgtcctggcgcggatcgagaagcgcgaggccttcaccactgccgaaaaggtccggacctggctggggcagctattccgctatgcgctcgtcatcgtcgagggcatggaggccaatccggccacggacctggacgtagtggccgagcccaagcccgcggtgacccataacccctacctgcacctgcccgagcttcccgagttcctccagaagctcaggctctacaacccgcgcggctggcaaacccagctcggtatccgcctgctgttcttgaccggcgtgcgcaccggcgaactgcggctggcgaccccggatcagttcgacctcgaccgtgggctttggatcatccccccgcagatcgtcaagcagcttcaggacgagatgcgcaaagcggggaagcggccgcaggacgtaccgccctacatcgtgccgctgtcccttcaggccatcgagatcgtgcgctacctcctgggggtgatgcggcccgcccagcgccacctgctgacgcaccgcagcgaactcaagaagcgcatcagcgagaacacgctcaacgccgccttgaagcggatgggctacgaggacaaactgaccggccacggtattcgtggaaccatctcgacggcactcaacgagatcggctatcccaagatttgggtggacgcgcagctttcgcattccgacccaaacaaggtgagttcggcctacaaccacgccaagtacgtggaaccgcgccgccggatgatgcaggactgggccgaccgcctcgacttgctcgaacagggccaagtcgaagcggccagcgcgcacctcactatccacatcgagggcgtaccggccatggcggaggaggacaagcccgacgccatcgttgcagcttcctctgcgcctcccgttccgccggtggtggccacccccatcgtcgtgacgccgaacgaagggggcatcaccttccaacggttgtcgcaggtgccgccatccccgactcatgcgccagaacccgaggtgtcggccatccagcgcgagcgcgaggaaatgctggccatctacgaatcgccgagcagtctgccggtgcccctgttcggcaagttggctggaaagtccaaggaccagatcaaccgcgagttgaaggcgggcaagctgctctccatcagcctgggcaaccgggggcagcgagttcccgattggcaactggtgccgctcaaacacaagctggcccaggtgctcatgcgccagtacccccaggcggattcatgggagctttaccgcatgctgacccagccacatcccgacctgggtgaccgcgcggccatcgacatcgtgacgccaagcaatctgggcatggtggtacagatcatcgcaggcagcgagccacatgcgaatgctcccgaggtcgtaccgccgcggcctatctccgaagaggtgcgccagagtgttcgccggctgatggagagcgctgtcgccttggacggcgcatag

SEQ ID NO: 342969 - DNA, 300 bp, Pseudomonas aeruginosa
atgaagaacgcgcccgtcctgttcgctctcgcgtccctgctgaccggctgcgaccggccgccttcggcggatgcgctggccgccgacccgtcccggctgcacgcgctgctcgcgcaatgccgcgcgggcgagcacgacggcgcgttctgcgcacacgtggcccaagccgacctgcgccgctttctctccggcaaagccggccccggcgagtaccagacgctcgccgacctgccgccgattccacccagcttcgatgaacccgccgatgacaacgggcctgggcaggagaactcgccatga

SEQ ID NO: 342970 - DNA, 351 bp, Pseudomonas aeruginosa
atgccccagccactcgccaccgccccggagctcgcgcagctgctcgccaacggcgaggcccgcgctgctggcaaagtcattgacccggtgcccgtggtacggctcttcacgccggacgctcacgtgacctggctgctggccgcgctcgatcccgccgatggcgacacggcctggggcctcattgacctggggatcgggatgccggcgcaaggcaccgtcaagctgtccgagctggccggcatcgtcgggccgcaccagcagcccgttatgcgcgacctctacttccgtcccacaggcacgctgtcggaatacacccggctggccgagctcgacggagcgatcccggactga

SEQ ID NO: 342971 - DNA, 288 bp, Pseudomonas aeruginosa
atgacagcgaagaactcattggcggcggcattaaagacggtcaggaaagcgcgcggcttaagccaggaagcgttctccgacgtgtccagccgtacctacatgagttcgctggagcgtgacctgaagagcccgaccctgaacaagctggccgagctgtgcgaggtgatggatatccacccgctcacactgctaacgctggcctatgcgggcgatagcccgcacaaggccgacgagctgctggcgcaggtgcgtcgggagctggagtcgatgttgaagccgcgcgcgtga

SEQ ID NO: 342972 - DNA, 423 bp, Pseudomonas aeruginosa
atgagcaccgtcacgatctaccacaatcccgactgcggcacctcgcgcaacgtgctggccctgatccgcaacagcggcgaggagcccacggtcatcgagtacctgaagaccccgcccgatcgggcgacgctgatggtgctgatcgccgcaatgggcgtatcggcgcgcgccgtgctgcgcgagaaaggcacgccctatgccgaactgggcctgggcgacccgcagtggggcgatgaccagttgatcggcttcatgctccagcatcccatcctcatcaaccggcccattgtggtcacgccgctgggcacgcgcctgtgccggccttcggaggccgtgctggacatcctgccgcagccgcagcgcggcgcgttccgcaaggaagacggcgaagccgtggtggatgcggagggtcgcagggtctga

SEQ ID NO: 342973 - DNA, 429 bp, Pseudomonas aeruginosa
atgtggcacaccctgaccatccagctccgacacgaaaccgccgacgacattgccgccatcgaagcggtcacgaccgccgccttcgccgatgcgccgcacaccagccataccgagcagttcatcgtgcgtgccttgcgtgtagcccgggaactgacgctttccatcgtggccgaggaacgtggacagatcatcggctacgtcgcactgtcccccgtcacgatctccgacgcccaaggccggaaggccgagggctggtatggtttgaggccgatttcagtcatgccgccaaggcaggggcaaggcattggttcgcgcttgatggaacaggcactgaccgaactgcgggctatgcgggccgcaggctgcgttctgctgggagatcccgcgtattacgcgcgctttggtttccaggcccatgcgggcctgtaa

SEQ ID NO: 342974 - DNA, 276 bp, Pseudomonas aeruginosa
ttgacccgcgccaatggcaagcgccccgactccgaccggggcgcttcgctggaaggggaaccacccataacccacactacgaccagccgcccacgcatggcggcgacctatgcccccggcacggtacgcacccgccgctggcatgatgaaggcgacgtgcgcggctatcgtccgcctgcgggctggacggcccgcaccgacctcaccgacattcaccccatcgcgggccgcgccttgtcgtgtgccatgtggtggatcatcgaaacgaaggaataa

SEQ ID NO: 342975 - DNA, 597 bp, Pseudomonas aeruginosa
atggtggacggcttcgtccagccggttggcgaagggctcgccgatcaactggtgggccaccaggttggctacggtggtgtccagtgggatcagtgcctggccgaagtgggcgatgtagcggtcgttcacttcttccaccaggcggtgcgccaggtaggcttcgtcgagcagggcgtcgaggccgtcgtggccggcgagcaacgccggcggggtgaggaagaactgctcggcgaccttcagcaccggcttgatccgttcctcgatgccggcttcgcgggccacgctgttggcggcgtcgagcaggtccggtacctgttcgacgtaggcgtggacgaagcgggtgagtatgtcttccgtgttctcgccttgcggctggatggtgcgatgcaggcggggcaggcggctggctatcagatcagccaggtgaccgtggcgggcttcgctgaggtgcgcctgctggatgagttcacggagggcagcggtgttcatgggttctcccatacaacggggatggtgaagaagaggagaaacatagccggcggcgcgcgccggctaagacgcgattgtcataatcgcttcgtggttatgcgaggatga

SEQ ID NO: 342976 - DNA, 870 bp, Pseudomonas aeruginosa
atgacgccagaatatagggttgcagctgaaaagcaaatatcatcttacctgcaaagaaatgatgtaaaaaatataatatatatgcaggttgagcaaacgtatagtgatcttggtcgtgatattaatgtttggaatgtaaaagcggaagacggaaactggtgggttgttgaaggggagggagccccgatgaatctctatacacaggacgccttttatttttcagctgatgaagcctattcatttcatatggggattacccaaaggctgcaagctcgtcaccatagagagtttaagcacatagttgatgagttgccattagatattgatgaggtgaaatcaattagtcgaaggttgaatgtcgcagcgcaggctttgaatgacgtttctggtgtagaggatatccaaagtattggtttgacttgtagggagagccttattgaactggctcgggtgttagtaagagcaaatccagctattttgcaagatggaaacctgaaggctgcagactttaaaggtatcgcaaaggcagtaatttcaatatacgccgaagggaaaagtaatagtagtttacggaagcatgctcgtagcttgtctgagatggcatgggactactcatctgaaattgttcactcgccaaacaagaatgttccggacgcgaaaatttgtctgttatttacgtgttccattgtttcggtgtttcaaaatctttacttaaagcatttgggttttgatgcagagcaaaaatgctcagaatgcaaaagcatgaattgtagttttcacgaaaccgaggataattcacttcttgttatgatttgtgatgactgcggtcatgaagaggcagtgcacttagagaatcaggatgtcgattga

SEQ ID NO: 342977 - DNA, 147 bp, Pseudomonas aeruginosa
atggatcgctttgagctactaacctactcagtgttcggcgtgctctgcgcgttgggggttacagccgcgattggatacaagatcgccgcgtacctggacaagcaacaggagaacagcggaacacccccgaactcaactaccgattaa

SEQ ID NO: 342978 - DNA, 837 bp, Pseudomonas aeruginosa
atgagcgattttttcactgccaattggctctcaattgcatcaattctgatcggtgtgcttgtagcctacgtcttctacaggcttcaacgaaaagattcagcgtcagctgcttcagagcgaactaagcacgccacagccgacctgcttgatgtagtggaaagctatgttatcaacaagcaggaattgtctcgaaagctgatcgacaatctcattgaggcgtcggaacgtctgcacgcagtttcgttgacgcctacctgtactccgatcaccctcttgcaagatgttgcccttcgcctccagcgaagtcgccatcttgatattccacagaaaacagactactcggtcaagattgatgagctgatcgtcgaagtgaaagcggagcttgaacctctgacctgggagcgtatgaaagccgatagctcgcaaattattgcagaggtgctcgaggtggttccggaagagcatcggtcaggggtggagaagaatctcgaagttctcggaatgattggcgaaattgccagaaacgaagggcatctcaataggttccaagaagatcaaagtcgtttgagttggatttctctcgcgtcaaccgctatggctggcttagccgctgctttgaccgcatccagtattggcactaggttcttttttgacagcactgacgtctggagcccgccggtgcctaagctgagtggagttttgtcaatctccctcgtgcttgtcttggtgtctttgctcgcggtgtatgcccttcgcctttacacaagatccagacaatctgcgagggaatatctaaatgctagctctaattcggagcacggtggtcgtcgagcatga

SEQ ID NO: 342979 - DNA, 612 bp, Pseudomonas aeruginosa
atgttcatccgcgcctacctacgagcatccaccgacgagcaagacgccggtcgtgcccgcacctctctggagaagttcgccagcgaccataacaaggtcatcgcctgcgagtacctggagaacgccagcggcgccgctgcggatcggcctgagctgctgcgcctgctgaaggatgcccgcaagggtgatgtactcctagtcgaatccatcgaccgcctctcccgcctccccgccgatgactgggccaagctcaagagtgcgatcgatgccaagggcctgcgcatcgtcgcgctcgatctgccaaccagccatcagggtatgcgagacacgcaaggcgacgagttcacccgccggatgctggccgcgatcaattcgatgctagtggagatgatggcggcgatcgcgaggaaggactacgagcaacggcgggaacgccaggcccagggaatccagaaggccaaagcagctggcaagtatcaaggccggccggtcgacgaggagctacataagcgggtcaaggaactactcggagccgggctgggcattcgagccacggctagacacgcatcatgctcgacgaccaccgtgctccgaattagagctagcatttag

SEQ ID NO: 342980 - DNA, 837 bp, Pseudomonas aeruginosa
atgggtaacaaatcaacaacgatccgaatcggcttgctggccgcgacagtagctcttctggttgggtgttctggcacccggggggctagcactgtgcagcttcctgagccgaaagatgtaccgagggaaaaatggtcggatgctatgcatgttctgaccgccatggggatttcagggcagcgtgacgttccaatcgagctggcaggggcagttgatagggcgagcccggccagcggctctggaacagtgctcggggatgctggattaagcgcggttagcttcgcttcgccacctacaagcttgagtggtggcgcagcagcgggagttggcttgggcttgatgcttttgggtggctcgagcgatccggtgcgtgcaactcaggttgtagcgtgggttcctgctgaccaggcaagctcgccggaggcggcgtctgctcttgcattgcataaggtcgaagatgctcgcaagagagtttttgccaatggcttatcgaagctgccgatgcagaccggtaaatatcctgatggtcatcacttcggctatgcatccctggcagatagttatgcggagcgtccgattccatacagtgaagaggttgctaaatcgccgagctttctgagatcgccactcagctacgggccgatcttcatacgtgacaaccagttcacgcttgatgcctacaagaacgacatgactgcctcggaagccatgctgcttgtatcgcaatacctgcctgagtggatctacatctaccaccctggtcagcggctgagaaaagattcgatcccagcggcaatcttcaatcagggcagggcgctctacttcgtagggaaatag

SEQ ID NO: 342981 - DNA, 129 bp, Pseudomonas aeruginosa
atgaccaacagtactgttagacgctgcttgcgccagcaagctctctacgacaaatcggacaacgtgttcatccaaaccaacatcggcaaatcgatacgcggcctacacgtaatcgttaaccctgaatag

SEQ ID NO: 342982 - DNA, 1197 bp, Pseudomonas aeruginosa
atgggtagagatgggcggggagttcgggcggtctcggactcgagtatcgaaatcacgttcatgtaccgtggagttcggtgccgtgagcgcatctcgcgcaagcccaccgccactaatctgaagctcgccgagcggcacaagattgctatcgaggaagccatcgccacaggcgtctttgattattcagctaccttccccggctccccacgtgcagcaaagttttcgccagaggcttgccgggaaaacgtggccggtttcctcatccgatggctagccggaaagaaaaagcacgtctccagcagcacatgggaaggctacaggaagatcgtagagctgcgattgattcccgcgctcggtgacggtctggtggttgaactcaagcgcaaggcggtgaaggactggctggacacactgcaagtcagcaacaagaccttgagcaacattcaaagctgccttcgctcggcgctgaacgaggccatcgacgaagagcttctcgacctcaacccgctagccgggtggacctacgcacgtaagggcgaggtgcgtgaggacgacgttgatcccttctcccccgaggagcagagagccatcctagccgcgcttgatggtcagggccgacacttggtgcaattcgcgttctggaccggcatgcgcaccagcgagttagtggcattggactggggcgacatcgactggatccgcaacgaggtgcacgtcagtcgggcgatgacccaagacgctaagggcaaggctgaggtgaccaagacaatttccggtaagcgcagcatcaagctgcttgggccagcgctcgatgcactgacagcgcagaagacgttcactttcctggctggcctggaggtcttccagaacccgcgaaccagtgagcgttggactggcgaccagcctatacgcaagacgctctggacgcatgctctgaagaaggctggcgtccgttaccggcgcccatatcagacacggcatacctacgcctcaatgatgctctccgcaggagaacatccgatgtgggtatcaaaacagatggggcatggcgactggactatgatcgcgagagtatacggacggtggatgccgaacgcagatatctatgcaggagccaaagccgaaaggctttgggctcccaacgatgaagcagagtcagttactcgtagaaacgaacgctactcaggatccggttga

SEQ ID NO: 342983 - DNA, 1578 bp, Pseudomonas aeruginosa
atggccgtgcccatcgctgtagcacctggcggagacaatagtggtgtacgtaatgcgttcgacgaccacggcgcatacctgaaatcgctcacaccagaaattgtcatagcactatgtggcccgatgggcactccactccatgaagtagccaagacgttccaagagctaattcgtggaacagattttggatacgaggaggtgaaaatattacgtttaagtaaagaaattcgccgattaaagggcttggaagaagagaagtcgattgaaaggctaattgatgccggtaacgagctacgccgagattatggtaatgctattctcgcgaaattggcgattcaagatattttgttgtcgcgagcaactcatcaagagcttcatgactcagaacttaggcaaaaagatcctaaggcggcagctgatccagcagcagtaatgcctcgggccgccaggaaatgttgtcacataattgattcaataaaaaatattgatgagctgacacttttacggtctgtttacggggacatgctacatgttgtcggtgtgtactctcctatcgagatgcgactagaacgtctagcacggataaaaggtcctagcgatgaagttcacaggcttattgatcgggactcaggggaggaagtcaaatatggccaaagcgttgaagatacattccctagatgtgactttttcttgagggttgattcggctacagattcgcagcgaaacacacgggttcgacgctttttagaattgatgctaggcaccaggattataacccctaccgtcaatgaacgtgctatgtatgcagcatactcggctgcgcgtaactctgcttgtctttctcggcaggtaggtgcagccataacaaatgctgaaggcgagatacttgcttctggctggaatgatgtgccaaaggcatttggtggtttgtatcatacagtcgatcaaaactcttctaccgatgatgatcgcagatgttggaacattgaaggtggtcgctgctttaatgatgatgaaaagactgcaattgctaatgccatggttgacaggctcattgtgaatggcctggttgaggaaaaaaagcgttcatctgcatttgaaatgcttagaaaagattctcagctcaagagtcttatcgagttctcacgtgcggttcatgcggagatgcacgctcttctgactgcaggggagacaaagggcgggcagattagaaatgggaagctattcgttaccacttatccttgccactcatgcgcaaggcatctcgttgcagcaggtgtcaaagaagtgtatttccttgagccatacaggaaaagcttagcgactagattgcactcagactccatcacagagcgagagagcgacgactccaaggtccgagtgatgcccttcgacggtgtcgccccatcccgatttctgcggtttttctcagcacatccaggcggcaggaaagacccgaaaggtatcatgcacgtccacgaggcttcacccgtgacagcgatcactcttgaggctatacatacgcttgaagcattcaccttaagggcattagaatccgccggcctgaacaaacggtga

SEQ ID NO: 342984 - DNA, 1200 bp, Pseudomonas aeruginosa
atggcaaagatcaagctcaccaagaccgccgtggagtcggcgcaaccccaggccaaggatgtcgaactgcgggataccgtggtgcctggattcctgtgcaagattaccccgacgggccgccgggtgttcatgctccagtaccgcacgaactccggccagccccgcaagccctcgctggggctgtacggggaactgaccgtcgaacaggcacgggtcaaggcgcaagactggctggccgaggttcgccggggcggtgaccccggcggcgccaaggcggaggcgcgcaaggcgcccacgatggccgagttgtgcaagaagttcatggaggactactccaagaagcgcaacaagcccagcacgcaggaaggctatcagggcgtcatcgaccgcaacatcatcccgctgctgggccgcaagaaggtgcaggacgtgaagcggcccgacattgccgggctgatggagaagctggcctacaagccgaccgaggcgaacaagaccttcggcgtgctgcgcaaaatgttcaacctggccgaagtgtggggcttccgcccggacggcacgaatccgtgccgccacgtcccgatgtacccgccgggcaaggaaacccggctcatcgtggacgaggaactggtgcggatcttccgccatctggagaagctggaggcggaagggctggagaactacgttatcccgctggcgatccggctgcagttcgagttcgccgcccggcgctccgaaatctgcccgctcgaatggagctggctggactttgagaaccggcgcgtggtgtggcccgacagcaaggtcggcggcatttccaagcccatgagtgaggaagcctatcagctgctttcgacggcaccacgccgggagggctgcccctatgtcctgccgtcgccgaacgacccggccaagcacctgacctttggcgagcactatggcggctggtgccgggcgctcaaggccgccggcgtgccgcacgtcggcacgcacggcattcgccatcgctccaccaccgacattgccaattcgggcgtgccgaccaaggtaggcatgaagctgacggggcacaagaccgtggcgatgttcatgcactacgtccacaccgaagacaagccggtgcgggatgcggccgaactggtggcgagtcggcggcaggccatcacgggcgcgcggcgcccttcggaggccacggcatga

SEQ ID NO: 342985 - DNA, 759 bp, Pseudomonas aeruginosa
atgctggtagtcgccgatcaccccggccggcacctgctcctcataacggtagtcgccggtcaccacgcctatcgagccgacctgctcggccgagtggatgcacagcaggatgtcacccaccaccatctgctcggcgaagtagttgagcgtgcctttatcgccaccgccgagcgactggtagtaggtgttctgctcaaagtcaccacgcagatcaccagtttccccccaaccaatacgcgcctcgccatgtgccaggcaatagctctttgtgggcgatgcgccagtgcctgcaatggaaatcttccagatcgcaggattggcccgcaccccaaggtcggaagccggacgcgtacgcgcatcgtcgcaaatgcgtttgaacactcccgactcaacggaatacttcacctgcccggtttccgcatcggaatccgcccgcagcccctctacaaagtcctcatagctgaagctctggtggaaggtcacaaagcgcacccgctcggcggtcacgaaacggtcgaactccaccttcagacgcttacgcgtcgccgggtcattgccactgttctgcgccagaaagtccggtgccagaatggccagcgcctgattaatggtgtggaaggttttgccggtgcccggcgggccaaagaggatttgattcaggggggtgttattaacgctcaccacagcattttcaggatgctcttcggcagggtcaacgtgagccagagtttgcccttctgctaccggaggattgcttag

SEQ ID NO: 342986 - DNA, 1566 bp, Pseudomonas aeruginosa
ttggatcgtaaagggggtaatgagactcaagctgacgaggtgttagatgacaagagtttggaatcctcttcgacttcttcaagtgccgatctgaaagaaagtgtagttgcgaacgagctagggcctaagagggctcctcgaaagcaatgtgagatgttgcggcggtggaattggtacaggaagggaattagggaaagtgaacactcaaagcaatgggatgaggagcaaaaccaaaatagtaagttgagcgaactggatgcaattcatatgccggcaatatgggttgctgaactttatactccatctactgttgagggattggttaatggtgtccgagacttggggtggaatgagagttaccgcatgaggaaagacttggggggctggatgaatgatgtaagagcgggtaggtctgcgggttggattagcttagggcttgtagctaggcgtgactcaaagaactttctgaaggatcgtgttgcggacttgcctcatggtgttcgcgcagccctcccgattcttttatcaattacccctagtattactgcatttgtaattgtgtttatttttgaagatgacgttgctgggtcattgcaaactgtgcttcggagcgattttgtgtctgaaacaagaagagattctagattgcgattctggcacgtgattaattttattctgacggggaaaagctcggaatatatgggctataccactcaacgccctgacgatcttcgtcggaatttggcttctcagaaagttgatgccttagaggaaatgtgcattaggtgggtttctgataaggtgccaggagttttttctctgaagtcagggaattttccaaccgctgttctttatgtaactgagcaggagcagccaatgtcctcggaagaggtttatatacctgcttgggaagcatttgggttgaataaacctttcgaggtttgggagtcacttgaatggccgtgggcaaaaatgcgcttgccgtcgtatcaggaaaaggggaaaaaacgactagtgtttacctgtaggcggcgcgatgcattaacagaaggctctaaaatgtatcatgagcctacatccaactggactctgtctcatcgagcagataaggaatgtcgtgggctactagctagatggtcagtgacatgtttgcttgacagctattatgaagacatagcggagcttcgcgatcaaagcgctcgtgacggagagtatagagccatccgtgacttaaagcgactccgctctttggcgcgtacaaagttgttcgatataggtgtttgtacgcaagagattgaggattttacaagttcaaaaataagttataactatagtgctactgcgatgaagttgaatggctctgcggatgtggattttctagataatctcaggcgctctcaggccgctcgtgcaaagcaagttaggcgcgatgccgatttgttgcgcgagaccttggctcttagtagtaatttgtctcaaactatcgcaaatattcgaattcagtggtttgtggttgcgttagccgtgatttccatcgtggtggctttatgggctgcgctcaagtga

SEQ ID NO: 342987 - DNA, 255 bp, Pseudomonas aeruginosa
atgtgcgtggaatgggtgtccgagtcagcgtggaatccgcatgagctaggaaaaacgctcatcatcgtgctccatgacatcaactttgcctcttgttatgccgaccacatcatcgcgatgcgtcaagggaaagtagccttccagggcgagtccgaggcgctcatgcggccggatgttttaagtgccatttacgacaccccgatggcagtgcatgacattcaaggggcccgcatctgcgtgttttacgaaggctga

SEQ ID NO: 342988 - DNA, 1062 bp, Pseudomonas aeruginosa
atggcttccggcccgttctctttcctcggccgcgagcacgagctcgtcgtgggcggaatgcagtctaagcgcgacctggatagcgctagcaccggacaccttttccgtaagatctccatggaccccatctccatcagcgggtacaacggcaactatccagagcctgacttcaatgctgccggttacgacagcctgaccgattcgaccatcaggcagaaaggcatctacaccgttggccgattctctctgagtgacccactgaagctgattgtcggcggtcgactcagcacctacagctacgacagcgacagcgccaattcgaacttctctaagcgcaagttcgtaccttacgcaggcctggtctacgacctcgatgaaacctactccgtgtacgcaagccacaccgcgattttcaatccacaaaccaatatggacacgagtggaaatgtgttggcgcccacggaaggaaagaccaatgaggtgggcatcaaagcaggatactttgacgggctactgaacgcatcgttcgccgtattcgagaccaagcaggacaatgttgctcagcaagacccttctgggaagacaccttcgggtggtactgcgtactacgccgccagtggcaccaagagcaaaggtttcgacatcgatttgcagggccagctgacccctgactggaatctttcggcgggcgtgtctcatttcaccgcctccactggcgatggataccgactgagcacaacggtgccccgcacgaccgcaaagctcttcagtacgtatcgtctgccgggagaactcaaccagtttaccgtcggtgcgggtctcaattggcaaagcaggttctaccaggccacgagcacacccaatggcacccagaagctaggacaggaatccttcgccctggcttcactgatggctcgatacgacatcactgacagcaccaatttgacgctgaacgttaacaacctgttcgacaaggagtactaccgcatggttggcttctactctcaggaagtctacggagcaccgcgcaacgctatgcttacccttaatcacaagctgtag

SEQ ID NO: 342989 - DNA, 861 bp, Pseudomonas aeruginosa
gtgaaactggtgacttactcgaaaaatgggcagcgcttcattggccaactgagtgccgacgaagcatcgattcagccattcgactgcttcgctgaagacggggcgctagagctgattcgcaagagcgtagcaggcgagccacttccgaagctgcgcgacgaaaccgtgaaggtttcggacgtgaagctcgaggcgccactgcctcgcccgattcgaaatctgatctgtgtcggacgcaactaccacgaacatgccaaggaactggcaacgactgtcttcaaagacaacgatgccgacgtcaagtcctggccgattgtcttcagcaagctgcccgaaaccgtgaccggcccattcgatctcatcccgctgcaggccgacgttaccagtcaggtcgactatgaggcggagctggcggtcgtgatcggcaaaggtgggaagaatatttccaaggaagacgccatggaccatatctatggctacaccgtcgtaaacgacgtaagtgctcgggacctccaggttcgtcatcaacagtgggatctgggtaagtctcttgatgccttctgccccatgggaccttggctggttactgcagaccagctcgatggtcgaaagacccgggttcgttgctgggtgaacggtgagctgcgccaggatggcccaactgaaaacatgattttcgacattccgacactgatcgagacctgctcccgcggcatcaccctgtacccgggcgacgttattgcgactggcacgccggcgggcgtaggcatgggctttaagccgccacgctacctgaagtccggggacgtggtacgcgtagagatcgatggcattggtgccatcgaaaatcggttcgagtaa

SEQ ID NO: 342990 - DNA, 816 bp, Pseudomonas aeruginosa
atgcaactgaacccattcgatctcgtgatcagaggaatggttgccaaatgctgggaagcaggcagtggcacaccactgctcctgctgcatggatctggtcctggcgccgcagcatttggtacctggcgttttgtacttgaaccgttggcccagcatttccacgtgttcaccatggacatgtttgggttcggtgcatcggacaaaaagaccagcggagatccgttcgaccttgatctatggatggatcaggtgcgcgccctcttggaccacaccaagcaagacaaggtattagtgattgggcattcgatctctggataccttgccctgcgccttgccagcgaggactcccgggttgcggcccttgtcacgacagggaccatgggagcgagatttgagtgcaattcgcagaccgagaaatgctggacctttcccgcaacgcgcgatgacctgaaggccacattgtcggggctgatgttcgacaagtcgggcatcactgatgagctgctggatttgcgcatggacattctgcatgacggggtttacggcccctacttcagcaagatgttcgatggcaacaagcagcgctacatcgatcaaaccacgctctcggatgacgaactctcaaggatttcgtgcccactcctgatgatccacggtcgcgacgatgtgatgtttcccgccgagccgctgacggttgctctcgcgcgaaaaatcccacaggccgacgtgcttctcctcgccaactgcgctcatttgcctgctacagagcggcctgcccgcgtggtcgatgcggtgctgtcttttcttcataaataa

SEQ ID NO: 342991 - DNA, 417 bp, Pseudomonas aeruginosa
atggctcaccgcgtaacttacagcaaccccgaaggcaccgcccctgcgcaaggtcgttactcgcatgtcggaaccaccagtggcggcaagctgcactttctggccggccagcttgctgtgggtgcagacggcagcgtcgttggccgacacgacttcgatgcgcaatttatccaggtcttcaaaaaccttggtgatgttctgaatggcctgggttgcgacttcaacgacatcgtgcgcttcaccacctacgtcgtgcattcgcaagacctggaacacttccaccgtctgcgtgccgagcatttcccgaactggttcaaagggtcggacttcccgcctaacaccctgctcaccatcgaccgcctggtgaaggaagacttcctctttgaggtcgaggcaatcgttcaggcgcgcgattga

SEQ ID NO: 342992 - DNA, 1362 bp, Pseudomonas aeruginosa
atgagtcagcaaaaaggctatctgcttaaaggtcgtgttatcgacggcagcctgagccgcccgatcgaaaatggcgcagtcgtcaccgatggagagctgattgcttgggtcggcgacgcagcatctttgcctccgcaatatctgaccccggcctacgtcgagatcgcgttagaagggcgaaccatcatgcccggcctgattgatggccatacgcacatctcatttggcgagtcgcgctccgaggaagagaacgcgctctacacgccggtggaattccgaacagccaaagctctgtattacgcgaagaaggtccttcaggctggcgtcaccagcgccttcgatgccgcaacgacctatgctgttgcgcaagccgtgcgggatgcaatcgacactggcatgttccccggcccgcgcttcactgtctccggcaagcagctgacgaatcaccagggtttggaagactccttccccagcaacatggagtttcccctgggccaaagcgctgttctggtcaaaacccgagacgacctggttgaagccatacgtctccaagtgaaagatgaagtcgatgcgatcaaggtttctgggtccaacgacaacctgatcactccggacgcgcaagacacctcagcgttcaccctggaggagctgaagatcattgcagacgagactcatcgtctcggaaagctctgtagcgtccacgcacgctccaccgactctgctcgagacgccgccatcgcaggtttcgacaacctcttccatgcctcttacatcgatgatcgaggtattgaggcatgcctcaataaagatgtcgttatcacgccgaccatcaccctgctctacaacctggtggaagccaaccaggcccaggcaggcgcatctggtgcagatgcgttcaagagagaaatcgaggccgcgcaggtcaatctgcgccgtgcctacgatgcaggcgtccccttgctggcaggtagcgaaagcggatggtctccggttccttatggccagtggcacgctcgggaaatggagatcttcgtcaagctcctggggctgacgccgctgcaggccatccactccaatactctggccgttactcggctgctctcgcctcgataccgaagcaaggttggcctccttgaggctgggcgctacgccgacattttggttgttcccggtaatccgttggacgacatctgcctcctgcagaagccatcgcagttcgactacatcttcaaaggcggcaagcctatcgatcggactccgccggcaccgcgcaagcgcaagtggtatgagcgcaccaagacgttcctcggcggcctctatgagttcgacgaagaaaccggccggggcaacttcgttcactag

SEQ ID NO: 342993 - DNA, 693 bp, Pseudomonas aeruginosa
atgtccgagaagctcaatcgcggcatcgtagccgctgctgcactttcacttcctgagatcgtctatcgcgaactccgtaacgcgatactcaatggcgtctttgctcctggccaaacattgcggcaagaggaagtcgccacacgtcttggggttagcagaagtccattgagggaggctctaccacgccttgaggctgaggggattgttgtgctgaatccccgccgcggttattccgttgccacaatgaggactgaggacatcgtagaggccttcgagcttcgcatactcctggagcttgagctcggccgcagagcgctccgtaatcgaaccaacgctgagattgcgaaggttttcgccatcctcactaggatgggcgccatgactgacatgggtgacgaagctgatatcagcaggtggttcgagctgaacaccgagttccatcaggcattgttttgctgtgcgaactgtcctcagcaccaacgtgcgctgaatggtacgcgaggagcgatagagtcttacgtccgagctgaggtgcgactgactggagatctacgccaggctcaagccgaacacagcgatatggcaagggcatttgcagcgggagatgaagaaagcttcctaagacttatccagttgcactccactcacactcggagcagattgcttgaagggctggtgaagtctcagtcttga

SEQ ID NO: 342994 - DNA, 969 bp, Pseudomonas aeruginosa
atggcgatgactaatcaaatgcccgtgaacggcatgcccattgttcgggcccaacgttggaagaaaggcgatctgatcctgcctttgttcattgttctcatcgcgatcatcgccacgttgatcgaacccaggttcatgtcctcaggcaatctgacaaacctcggcaagcaaatggttccgctagcgatcgctgccgttggccaatgcctggctatcatcagcggtggactggatctctccatcgctgcagtgatgtccttgtcaggcgtggtcggaatcctggtcatggagcagtacggagtactggcaggcgttctcgcaatgctattcacagggatcgtagccgggctatgcagcggcgccgtcatcgcgtacctgcgtaccactccgttgatcgtgaccttaggcatgctgtcgatttgccaagcagttgcgttgatcctggccaaaggcgttcccatctatcgggtaccggagagtttctccaacaccgtcggcttcggctccatgctcggcatcccggtgattatctggatcggagccttcactgttctgggagcctgggtgctcctgcggaagacagtttatggccgttacatctacgcaatcggctcgaacagtagcgctgctgtcaaatctggtctcaacgttccacgctataccgccctggcttatggtttttctggcctggctgcaggtatttgtgccgtcgtgatgacgagctggaccagtgctgcggagcccgtcgcctcacccaaccttacgcttgaggccatcgctgcagttctcttgggcggagtggcgttgaaagggggaagcggcggtattcatcatgttctttatggtgtgattattctgagcatgttgactaacgcgatgaatattaccggagtatctactttctatcagatgctcgtggtcggcatggtgatcatccttgccgttgttctggatcgattccgcacataa

SEQ ID NO: 342995 - DNA, 1536 bp, Pseudomonas aeruginosa
atgcattcaccggagcacaactcctccctggttgaggttgtcgagctgtcaaagcgcttcggcgctactcaggctctcaagggggtatcgatcggattcctgaaaggtgaggtgcactgtttgcttggcgagaacggcgccggcaaatcgaccatcgggaagataatcagtggcctataccccccggatgagggccaagtgcgcttcatgaatcgtgaggtacagatcaactccatcaaggactcgcaagcgctcggcatcgcggttgtgttccaggagctgtctgttctggcggacctgactgtgcgcgagaacatctgcttgggcagtgagggccgtgtttggcgacaacctgcgagcacggagaccggcctcgttgcttctttgctcgccgagctcgatctgaatgtggatctcgatgtgaggacaggggatctgcccatcgcttcacagcagctcattgagatcgctaaagctctcatcaagtctcccaggctaatcatccttgatgagccgaccgcgatgctgaatgccaacgaaaagtcgaagttgtatcaagtcatccatcggcttaagcagcagggtatcggaatcattttcgtcacccatcaccttgaggaagtcatgcaactggccgaccgcgtgagcatcatgcgaaacggccagctgatcgactctttgctgatctcacaggtgaacgatcaagcccatctttcagagctgattgctgggcggcaactgaaaggagctgcgactcgtacagcccgagttttttctcaagcaccggtcttgaccgtgaaaggcgtgcgcggtgctccagcagaaggaatcgcggtaaggcgaggtgagattgttggcttgtatggtgtcgttggatgtggtcgagagctgatcatggacgcggttgttggcttggcacccaaaagcggtctcgaactgcacctcaatggctcatcttacgcaccaacgactccagctaaagccgcgcagcagggcatcgcgtttctccccactgggcgcgctgccaactgtgtattcggtgcaatgagcattcgagaaaacctcagcattcagcacctcaacaaagtgagtcgtttgggctggatcaacctcaagcgagaaaggcaggaggtggaggcacgcgtgagcgaagtgcgcacccggttggccacgccagaacagcctctgacagatctcagcggcggcaatcagcaaaaggtccttcttgctcggtgcctgacctactcgagttcgttgctcgttctggaagaccccaccgctggcatcgatatcggcgcgaaagaggaaatccacaacctcctgcgaaaactcacggatgaagggctgtcgatcctgctcatatccagcgacctaccagaaacgctccagctgtcagacgtaatccatacgatgtaccaaggcgcaatcatcgggacctacgagcaaccggagtcagaagaaacccccgcaattctccgcgacgtgcttggcggagcggtacaccgtaacgaggacaatcaccatggcgatgactaa

SEQ ID NO: 342996 - DNA, 1077 bp, Pseudomonas aeruginosa
atgactaccagacgtcccagccttgccgtgcgtgtagctttttctctggcgatatccactgcactcgcgatacccactgtcgcttctgccgaagtcgatcgtctccagggtgtcatcgaacccattaaggccaccaagcctctaaccattggtgcgacgctcgtccacctgcaggatgatttctggaagggaatcgccttcggaattgctgacgaggctcgcctttctaacgtgaaggttgcgcagctttcggttgctggcggatatggaaaagtcagggagcaatttggccagctcgagacgctgcagtcgttaggagtcgacacggtggtcctcggggccgcagcctttgatggctacaaccccatgctgcggcaactgaaggctaatggcatcgctgtcgccgctgcaggcattccggtcaatagcaccagtgtcgacttcggtgtcggacagagcgatctgaacctgggcaaagctcttgcaaacgcggtatgccgcgacaaagggcaggcagaaaagacggctataacagtcccaggacctgcaggtgcggaatgggctcgcttgcgcgctgtagggtttattgaggccgcttcgaagtgccctggcctgaaagttgtagagggtgcaatgggcggcactctgacactggagtccggcctcgaaaccacttcagatctcctccagaccaactcggatgcgagttacgtctatacccccgcaactcccaccgccatgggagcaattcaggcgattcgacagcaaggcagccatgcaaaagtggtgacaggcgtggtcagccgacgcactcctcagctcgttgaaaacggccagctgctggctgttgcttccgagccaggcatactcatcggccgcctcatcgtgcagtacgcgatccgacagcacgagggtctccccatgcccaaaatggagaagcccgagggtctgccgtacccgcaaattgcggtacctactcaactggttgatgcaagcaacgtaaaaacctacccgtacgacaccttcgacctgcctccagaaagctggtcacctgaagtagcgagcacctcgaaatga

SEQ ID NO: 342997 - DNA, 912 bp, Pseudomonas aeruginosa
atgaaaatccctgtccatctcaatgctttacgcgccttcgaagccagcgctcgacaccaaagcttttctgcagccgcagcagagctgaacgtgactcctgccgcagtcggccagcttgtccggaatcttgaggattggctgggagcgccactttttcatcgaggtgcgagtgggcgtatccgtctcataccaactgaagctgccgaacgggcgcttcctgatattcgagcgggttttgatcggctgacgatgggccttgagcgactccaggaaggatcagccaacggcgttctcacagtgacagtcagtcctgcctttgccgcgaagtggctgttaccacggatagacggattccattcggcatggccggataccgatgtacgcctagacaccaatttgaggcctgtcgacttcgttgctcagcgtatcgatatcggtgtgcgctacgggcttggtagctggcccgggctggtggccgaaaagttgatggaggaagagatctaccctgtctgctctccgagtctgctagctgaccccactcgactgcagaggcccgaaggattggcgcgtgagaccctgattcatgatctttcaatggacagtcactcggggtttcccacgtgggaggcgtggctacagaaagccggtcctgccaacattcctacgtcacgaggaatgaagatcaataactctgctgcagtgcttcaggccgccattgaaggacagggagtcgcacttgctcgcagtgtcatggctcgagatgacttggcagcgggacgtctcgtcaggctgttccctgagatcaagttcgaatcggcactggcctactacgtggtctaccgccaggagtgcacgggcctcccacgattgaaggcattccgcgactggctatttgcagcagcctccagctag

SEQ ID NO: 342998 - DNA, 774 bp, Pseudomonas aeruginosa
atgagcaatcaattcaaaggtaagaaactgctggtcgtcggcggcaccagcggcatgggtttggaaatcgcgcgcatggtgctcgctcaaggtggtagcgccgtgatcgtaggtaaccgtccagaaaaaaccgagaaagcgtgccaggagctttccgcgctgggatcggtaactgctttgactgcagacctgatcagcgatgaaggtctgggcaagctgctcaaaaacatcgacgacgagcactcggatgtcgatctgctggtcaatgctgcaggcgtcttcttccccaaacccttcctggagcaccaggatgcggactatgaccagtacatgaacttgaacaaggcgttcttcttcattacccagaaagttgccgccaacctgattgccagcgaccgcccgggcgtcatcgtgaatattggctcgatgtgggccaagcaggctatcgccgctacgccgtcctcggcctactccatggccaaagctggtttgcactccctgacccagcatctggcaatggagctcgcgtccaaacgtatccgcgtaaatgccgtgtcccctgcggttgttgagaccccgatctacgagggcttcatcccaaaagctgaagttcacggtgctctgcaaggcttcaatgctttccacccgatcggccgcgtcggtaccccccaggacgttgccaatgtagtcaccttcctcctctcggatcaggccagttgggtcaccggcgcgatctgggatgtcgacggcggtgtcatggccggccgcaactaa

SEQ ID NO: 342999 - DNA, 669 bp, Pseudomonas aeruginosa
atgttcatcaacgcagatttttcccgccgcgccatattggccccccacgaatacaagtgggtggcctctccgcagaccggtgtcgagcgcgtcatgctggatcggcttgggggcgaaaaagctcgcgcgacaagtatcgtgcgttacgcacctaactcgtatttccctcaccaccatcacccaggtggtgaagagatactcgtcctatcaggtaccttctccgagggagaccagcattacccggctggatggtacctacgcaatccgccgggatcggctcaccagccatcgagtcacgacgggacgcttatcttcgtcaagctctggcagatgggcgtagacgaggagcgcagcgtccggatcgacacccgcgaccccgcaaactggcaggtacagcagggcagacaagtctgccgattgttctcctcaagtaacgagcgcacctgcctgcagcgattgcacgcaagagacgtcgtgttctctgatttgatcgccagtgcggagatttttgttctcgcgggcgagttgatctctggagattcggcctatgagcggggcagctggattcgattgcctgggggtagctacccagagattgaggcgggtttcgaaggggcaacgatctacctcaagaccgaccacctggctgcaatgacgcaaggatcatga

SEQ ID NO: 343000 - DNA, 1155 bp, Pseudomonas aeruginosa
atgaactccgcgcgcattgtcattgtaggtgccgggctgagtggcctgtacgcagcatgtctactcgagcagaaaggcattaaggattacgtgattcttgaggcgcggcgagacctcggaggccgcattctttcgatgcccatctcaggacttaacggctctgaacctccccaagggataaacccaatcaacagtttcgacttgggcccttcatggttctggcccgactttcaacgtcagcttgatcgactcgtgctggatctcgggcttgagcggtatgaacagtacgaagcgggcaatatggtcattgagcaatcctctgaccgagcccccattgccactcctggatacgtgagttcgccaacatcaatgcgtttggtgggggggatgaaagcacttatcaacgcattgcatcagcgcctcagccagcaacgaattttgacagggcaaaccgtcaaaagccttagccgtgttgaccagttcgttgaggtgcattgcgaggacgaagccggtcaggttagtcggtgggctgctgagcgtgtgctgttggcagtgccgccacgcttagctaagaacagcatcgagttccatccgccactgcctgatcatgtgtcctcgcgatggaaagccgctgctacgtggatggccccacacgccaaatacttcgccatttatgaaaaaccgttttggcacgagcaagggttatctggtcaaggtcgcagccgtatcggacctatggtcgagatccacgatgcatcgattccaggaggaagcgcggcactctttggattcttaggtgttcctccgctgactcgcagaagcattcctgaagaccagttgcgagctctttgcctagctcagctagttcgtatgttcggggagcaggcaagactaccggctgctgagttcttcaaagactgggccctcgatccatttgtagccactgacgctgacctggtcggcgccgctgcgcatgcagcggcacccatggctacaatcgaggcagggccgtggagcggttggtttactggcatagccagcgagtggtctccgcaattcccaggctacgtcgctggagctgtcgaggcggccagtaggggcattcaaaacatcacaacttctcttcgacgccaaagaaataactctgcaacctga

SEQ ID NO: 343001 - DNA, 1203 bp, Pseudomonas aeruginosa
atgagccatgtagaacgaggagcagtcattgagcatgaggaggctgtggtagacacacaaaccagtagggtcaagggtggaaagctggccactcgcttggcgttctttattgcaggcttcgccctgtcttgctgggcgcctttggtcccgtttgtacaaagccgactgcacgcagatgccgcgacacttgggaacattctgctctgcctgggtctcggtgcagtaatcggaatgccgctgtcgggtgccgcgtcgtccaaaattggagccaaaccagtcattgttgcaggctccgtttgcctgctaatcgccttgcctttactcgcgttcctgtccagccctgtgttgattgggatatgcctcctggtgtttggcgcgtcgattggcgccatcgatgtcgcggcaaacatccatggtatggaggttcaaaatgcggcagggacgccgctcatgtcgagcttccatgggctctatagcgttgggggccttgccggctcaagcggcatggccgcgctgatcgcatgcggagtgaccccagagcttgcggcctgcggggcagctgtggtgatccttggctgcatcgcgactgctacaccaggcttcttcaagaccaattcgggcagtagtggcgtcgtcttggcaattccgaaaggcatcgtgctgacgatcgggatacttgtgatgatctgcttcctgggcgaaggcgcgatgctggactggggcgcgctgcttcttaagcaagaaaagcacgtcgatgtttcgatctccggcattggctatgcagtcttcgcctttgccatgatggcaatccgactagttggtgaccgcctggtagctcgcttcggtgagcgtgcgatagtcgcttacggaatggcatttactgcttttggcattgccgtcgcgacatttgctagctcctttgccgtcgtcctctcagggatgttcctggcgggtctcgccgtgggcaatgtgattccggccctctttactctggcgggacgtcaaaaagtcatgccggtgcaacacgctgtagccgcagtgagcatctgtgggtacctgggagtgctaatggggccggctctgattggctacgcagctcactggatcgggttgatcgcagccttctatgcattgtctgcactgctccttctttccttgtgcgcaatgccgtcgctcaagtttgaggcccaaagcgagaagtaa

SEQ ID NO: 343002 - DNA, 1197 bp, Pseudomonas aeruginosa
gtgtcaagcacacttctcgataagcccggaaaggaaagaagacagggctggttgctcctggctggcgtgcttctgttggccgcaacattgcgggcacccataaccagcttagggccggtgcttttagaggttcaggatgcgctgaacatcaatgcaagcacggcaggtctgcttcatgccctcccgctattgttttttgccgttatctcactggtcgctccggcgctaggaaggagactggggatcgcgggcgctatctggttcgcgcttgtgttgatttctgcggggaccgttattcgatcgctgccagtcaccagcttcatatgggtaggaacagccacgctgagctccgggatcgctgtttgtaatgttctgctgcctggttacgtcaagcagcagtttggtgagaaaggccccagcgtaattggcttatacgtggcatccatggccattctggccggcgtagctacaggaatcgccgtaccgatttcacaagagccaggcctggactggcgatggtctataggctgttgggccctgcctgctcttcttgcactggttctttggctgccccaactgcgaggcaagcctcaagccgcgccaatgagctcgcaaagcaagccttcggtctctccttggcgcagcggcaaaggctggcaggtagcgctcttctttgcagcccactctctagtcttctactgcgtcattgattggtacaccgcatacgcagcctctggtggcgtctcacctggaaacgcgggacttctgctgctggtgtaccagatcgtttcaactgccgcgaacatcattaccggccccatgattcgccgtatgaagtctcaagccctaatggggtttgtgtgtggcgttgtaatgctgattggagcctgcggcctgctggcactgcccagctacgccctgctttggatcgtccttctggggctcggtgccggggtgtcgatggtgatgagcatcgccctatttggcttgcgtacgcagtccccggaccaagcggccaggctttcgggtatggcgcagtttgttgggtataccggtgctggtgtcggcctgatggtcgtgggtttcattcatgagctcaccagcaactgggagcagcccctgtcagtcatgattttcgcaagcgtggcggtcatcgtttttgcgacggctgctggccgcaatggctacatcaagtaa

SEQ ID NO: 343003 - DNA, 459 bp, Pseudomonas aeruginosa; identical to SEQ ID NO: 339366

SEQ ID NO: 343004 - DNA, 246 bp, Pseudomonas aeruginosa
atgggtaggaaaggtatccgtatcggtcagcagttctacttcggtaccgaccagcacctcctttcgttcgtcgccctccgcccagggcgtgtcgtccacatccgttccgtagatccttgcgtccaggtcgacctcgacgagcgtactcactgtgaagggcaccagaagctcttccgggccgagtcgattcttgaccacggcgcccttgccttgcttggcgattttcgtgactacgccatgccatga

SEQ ID NO: 343005 - DNA, 762 bp, Pseudomonas aeruginosa
atgaagagcgctccttttgatcccgatctcgcaccggctccggtagtgggtgtcaccgaaaactggcagccaggtggtgttccatttcaccaccaccagcgtcaccagttgatgtactcaatcaaaggcgtgatgcacgtgatcacctctttgggccgctgggttctgcctcccagccgagcgatctggatcagccagggaactgatcacaccttcatggccaaaagacctgttgccctgcacattctctacgtcgatccccagtatgagcaggtacctatgtggggtgattgcgcggtggtaaacgtgacgcctctcgttcgcgagctggtcgctgcgagcgtgcagctcccgtgggattaccctgccgattctcattcttcccgcctggtgagagtcctactcgaagagcttcaggagctcccccatgcaccggtcaatctgccggagccgcgggacccaagagggcgcaaggtcgtagccgcactaagggctgatccttccttgcgatactcgctcaccgagctggcagcaatggcagccgcaagcccgcggactcttgagcgcatcttccaaaacgaaacgggaatttctcttagtgaatggcagacgcgtagcaggttgctaagcgctctcgagctattggctgaagggacacctgtggcgaatgccggcgctgccgtggggtatacccatccctcgagcttcattgctgcattccgggggttgttcggcacaactccaggcaattacttcaagtaa

SEQ ID NO: 343006 - DNA, 948 bp, Pseudomonas aeruginosa
atgctcgtgagtccaaaacaggtttcaaaatcctgccgaactgcaatcgcgattgccacacttcttatcgcagcatcagcggtggcttctccacagctcattgaaatcacccatgagcgtggagtgatttcggtgcctcatgatcctagaaccacactcgtttttgatcctggcgcattggatacgttggacagcgttgatgtggatatccaaggagtagggcaggatcactggacgggcgctctcgcgaaatacagcagctcgcgatacctgaatatcgggacgttgtttgagcctgactacgaaaccgttttcgcatctgatccgtcgctcatcatcgtcgccgatcggtccgcagcgaagtactcgcagctggccaagattgctccaacactggacttcaccgttgatccgaagaatctgatccaggaagtagagtccaacgcgcgaaagctcggccagatctacgaccgtgaaggcgcaatagagagcgaaatttcatcgctcaatcaagcgatcgccaaccttcgccagatcgcggagccccaaggcaaagcccttgttgtgctcacttccggcgggaggctgagtgcatacggacctggttcccgctttggcgttattcacgattcgttcggcttcaaagcggccgcaccggacctgaagatttcgctccacgggcaggtgatctcctatgagttcatcagtaaggtcgatccggattggctttttgtaattgaccgagacgccgcgattggcgcggaggggatcgccgccaaagccctcctcgataaccctcttgtacgcaacacacaggcgtggaaaaacaaccacgttgtgtatctcgacggatccgattggtatctcgtaggtctcaccggattgggtgcccttcaacgcagcgttgcgtccctgactcagcaggttctgtcgcgtagcaccaactga

SEQ ID NO: 343007 - DNA, 696 bp, Pseudomonas aeruginosa
atgctaggcgccctggttctcaccattgtcgcgcccggggcccagcccattatcaagatgatgctcgccggagtattcgcgctggctggcagcgctatgtatctcgcactgcttcgtcgagcgccggtgcagaacacctacctggccccgctcatcggcctggtatttggaggtgtcatacattccattgccacgtttctggcctatcgatacggcctcgtgcagtccttgtttgcatggagcgctggggacttctctgtgatccttcgcggccgatacgagctcttgtggatcggatttgcattggcggttctagcattcgtcctggcagaccgatacacggttgtcgggatggggcgtgcctatgcgaccaatctcgggctgagctatgggcggctgcgaattctgggtctgatggttatctccggtatctcggccgttacggtggtgacggcgggaaatatccccttcctggggttagtcgtccccaatcttgttcggctcgcgtgtggggacaatctcagaaagaccatcccctgggttgctctctccggcggcgcatttgcgttgatctgcgatatcaccggaagggtggtgatctacccattcgagattccagtgggcacgatcattggcgtcgtaggtagcgtacttctgctgatgatcatcagagtaaaaggcgcccacgttgaatag

SEQ ID NO: 343008 - DNA, 822 bp, Pseudomonas aeruginosa
atgattctggtcgcctactgcattgctgtgtccaccgttctgttccagagcatctcgcacaaccgcatccttacgccgaacatcataggattcgactcgctctacgtgcttctgcaggcggtgattgtctattttttggggacgatgggtagctcctatggtgactcaccgattgggttcgccgcgaacgtcggactgatgaccctcggcgcgcttctgctgtttcggtggatgttcgcgaaagagtccactggcttaacaatgctgcttctagcaggaatcgtcgccagcttgttgtttcgaagcctgaccagcttggtcatgcggatgatcgaccccaatgagttcctcatcctccaagatctgatgttcgcaaacttcaacagcatgcatgtcgctctccttccgcatgcttttgctgctgcgttggtcgcatcccttctggcctggagctgtcggaaggactacgacgcattagccctcgggcgggagatagccatcaacctcggagtcgattaccaccgagttgtgatgaagactttggtttcgatcgccgtactcgtctcggtcgcaactgctctggttggcccgctcactttcctgggactcctggcgagcaaccttgcatatcgcaccacccaaagcggcaagcacaagcacgtcattcccgctgcagtcatgttctcaatcgttctggtggtaggggggcaaatgctgctggagagagtgtttgctctggggaccgcggttagcgtggtgatcgacttcttcggaggctgcgtcttcctggctcttttgttgaaacgaggcgagcgatgctag

SEQ ID NO: 343009 - DNA, 1452 bp, Pseudomonas aeruginosa
atgaatagaacaataaatatagctgaagcactcccaggatcaggcaagtcaaccaagttcatcaccacccttccagactttcttcccggcaagcatctagtctatgcaatgcctaccaatgctctaatcaaggagcttgcacaagacattaagaccaaagccggaatcgtcccaactgtaattacctcagacactactgatcatgtagtagccaacattgagaaagcactagcagctaaccaattcccactaattatggttacacatgaatctttgaggcgtgtagaggcaaggcttcttgcagggtgggaactggtaattgatgaagttcctagcgtctctgattgctggtctcatcagttcgatagcatcagctacctcagcagccttgaacgctacctaaccgtagatgaaaacaagaaagcaacgctcaaacctgagcatgtagcccttgtggaatccatgatcaaggccaaagaagggagcgcccttagcggctcagcccttgaggtgcttaaggctatgatcacgcccaaatgtagcgttgaggtggagaaacaaagcagcaaggggaaacgacttgtccgcattgtgcgctacagggactacctcccggccttcacctatgccaatagcgtccacatcctggccaacaacgtgagggacacgctccttggggctcacgctaggagccaaggcttcaccttcaccgagtctgtctttacccctgactttgatggctacggaaagcgtgtagagcttcaccccttcctgaaaggtaagtactccaagactcagagcctgatgcagcgtaatggagaagccctgattaagtggagcgatgacactcagctagcctcatggcttgatggtgtaacggctatgatcggggattatgaaagcctagcctttatgcatgactgggttgaatacaatttcactgataacgtaaccaagcttccgattgatagcaggggtatcaatggttatcaggacaggtgcgttgctatatgtcttcagcatgggaatgtgagtcctgatgatgctctcagcttccatagcttgagtgagatgataggcgtaccagtttctgaaatcagaaaggctattgagtttgaacgcttctatgaatccacgcttcaagctgtagcccgcacatcactgagagacagagatagcacggcacctgtcgtcttgtttgttcagaatatggaaatggctaagtatctccaaggaaagcttggacgcatggctactatcaaaactgaactatgcatgacaccttgggaaaaacagaagtctgagaaaaagaaagctaaggcaatgctccaagctgaagccatctctctattcctagagaaaggtatggagagaaaagacattgctgaagaactcagtgttccataccatcagattagacgatggacagtagggcttaagcaagtagcgtag

SEQ ID NO: 343010 - DNA, 606 bp, Pseudomonas aeruginosa
atgtgtttttggatggagttgagcatggatgaagcgtttctaaaagttatagcacctgcttttattacactcacaggtactgtggtgcttgggctggtgggtggttggtttaaacgctatttagagcgtagaagcgttaggtatgcactagttgctgagattcaggcacttgccttaattgttcgtgagcgtcgctacctgccaagctttttagaggtggcacagggtatcgagaatggggcacttcgggaagatgaaatatactcattcggcgtggcggtggattcgacctattgccgtgtttacgccgcttacacatcctcgcttggaagcttgccggcccatattgcccagcttgtcgtaactttttatcagtttgtcgatagtgttgtaagagatgttagtccaggcggaatagtctacgaaggaacgaataaagctgctgacttccacgaggctgctgatctattagctaaggcgcttaaaattgcagatgagctacagcgatttgaagatggtggtatctggttgcgtgtcaaacagatattaagaatagagaaatcggataagctgatccgggatttacgagggtttcatgccagctag

SEQ ID NO: 343011 - DNA, 957 bp, Pseudomonas aeruginosa
atggccaacatccgtcagctaccttccggcaactggaacgcccaggtacgtctcaaggggcaacgccccatctccaagaccttccccactgaagctgatgctcgagcatgggctaagcaacgggaagccatcaccaagacacataaggtctacaccctctatacactgggcatgacctactgtgactcccgcctcaagggcaagggaagctatgaccgagcaataggactggtcgagcaactatcacattcattccctcagcccatccaggacataactccccagcagataaacgacttcaagctagaacgtctcaagactgtgaagcctgccacgtgtaggactcagctagcatttatgtctcggttcttcaaattcgctaagcgtgaactactgatagacatccccaaccccgtagcagacatagcccttcctaagccatctaaatctagcgacaaggttgtcacccgagaagagctaaataaaaccctactctacttaagccctaccatgcgtcttatcactgaattggcatatgagaccgctatgcgtagatcagagatagtgaagctaaccatctcatgccttcacttagaagaacgcatagttgatgtagtagatggaaagaacggaaccagagcagtgccacttacgaagcgtgccgtagggcttctgcaagaggccatattgcttgcccaagagaagcgtataggtatgggtaggttgttctctgtaacgcctcatagcgcctctcaagccgtcaggaaggcacgcattaaagcgggactagatgcaacggttcggctccatcaactcagacatacccgcatcaccaacgtagccaagcggggctttaacaatgctcaaatcatgattgtctcaggtcatagggatacaaggtctgtagctcgttactcccacctgaatgctagggatgtgcttcatctcatagattaa

SEQ ID NO: 343012 - DNA, 948 bp, Pseudomonas aeruginosa
atgcgtcaaagggacctgaaattcaccttcgtcgtcggcgaagggaaactcgcgttcgatgtcgtcgagttcgaactggaagaagcgctctgcgagcctttccgcctgaacctgaagctggccagcgacaagaacgccatcgatttcaggcaggtactcgaccagccgggcaccttcaccctctggcaggacggccgtccggcccgctacgtccatggcatcgtcagccacttcacccagggcagctcgggttttcgccggacccgctacgaactgctgctggaaccgcagttggcgcgcctggagctgtgctgcaactggcgaatcttccaggagaagagtgttccggagattctccaggcgctgctcaaggagcaccgggtgctcgactacgaacagcgtatctaccacgagcacctgccacgcgaatactgcgtgcaggccggcgacagcgatcactacctgcacgaccggctggccttcgaggaaggcctggtctactacttccgcttcgacgaacaccgccacaccctggtctgcagcgaccggctctacgtccaggagcgtatcgccggcggcccggtactgttcagcgcccagccggagggcgacaacccgcagccggtgcttcattctttccgctacagcgaaaatgttcgtacggctcgacagacccagcgggactacagcttcaagcgcccgacctacgaccaggagcatcatctcgctggcgaggcgctcgagcatcagggctcgtcctacgagcgctacgactaccccggtcgctacaagcggagcggcgccggccggcctttcaccgaaagccgcctcagagggcaccggcgcgatgcgcgggtggcatcggtcagcggcgacgacccgcggctgatcccgggccacgcctttgccctggaaggtcatccgcgtgccgacttcaacgcctggtga

SEQ ID NO: 343013 - DNA, 309 bp, Pseudomonas aeruginosa
atgccaaagccaccgaagttttcccctgaagtccgcgagcgtgccgtgcgaatggtctacgaagtccgggagtcgcacgactcccagtgggcagccatcgaggcggtgtccagcaagattggttgcactgctcagaccttgagcaactggattcgcaagacctcttccccctcaagcaccaccccctcggcagatcctcgcatcaaagagctggaacgcgagattcgcgagctcaagcgggccaacgagatcctcaaggtcgccagcgcttttttcgcccaggcggaactcgaccgccgtttgaagtaa

SEQ ID NO: 343014 - DNA, 756 bp, Pseudomonas aeruginosa
atgcttgccgtgcagattcgccgtgtctggcaggaaaactacgaggtctatggggccaggaaggtctggcgacagatgcatcgcgaacgccagggcgtggcgcgctgcacagtggagcgattgatgcgtgagatggggctatgcggtgcggcacgaggcaagacggtgaagaccacgcaagccgatccaggcaatgccagtcccagagatctggtgaagcgtcagttcaccgccgaacatcccaaccagctctgggtcgccgatttcacgtttgtttcaacctggcagggatttgcctacgtcgcgttcatcgtcgatgtttattcgcggttcatcgtcggctggcgcgtcagtcggcacatgcgcacggagtttgttctggatgcgctcgaacaggcgcttcacgcccggcgtcctaagcctcatcgactggttcatcacagcgacaggggctcgcaatatctgtcgattcgctacagcgaacggctgggtgaggccggcatcgagccatcagttggcaacaccggtgacagctacgacaacgcgctggcagagaccatcaatggcctttacaagaccgagctgatccacaagcgagggccatggaaaagcgtagaaagcctggagtgggaaacgctgaagtgggtgacctggttcaaccatcagcggctgctggagccgatcggaaataggccgccagccgagtttgaggcactatacgaacagagtcaggcagccattccagtggcagcctga

SEQ ID NO: 343015 - DNA, 1929 bp, Pseudomonas aeruginosa
ttgagccgaacctgttccatcgacgccgcagtcgatcacttgctgcagaccatcgagggcccgattcgcatgggcctgcccctcgggctgggcaagcccaaccgactggtcaatgcgttgtaccagcgcctgcggaccctgccggagcgccaactgacgctgtataccgcgctttccctggggcgtcccgccgctggcggcgacctgcaacggcgtttcctcgagcctttcgccgaacgggtcttcgccgactacccggagctggattacctgcacgccctgcgccgcgacgaactgccggcgaacatccgcgtcgaggagttctacctgcagcccggcagcctgctggacagcgcgccggcgcagcagcactacatcagttgcaactacagccacgtcgcccgcgacatcaatgccaagggcgtcaacgcggtggcccagctggtggcgcggcatcccgagcggccgggcaagctgagcctggcctgcaacccggatatcaccctggacctcctgccgatgctggagaagcgtcgcgccgctggcgagaccatcgtcgccatcggcgtggtccacgatgacctgccctacctgccgggcgacgccgaggtcgaggagtcggtattcgacctgctgatcgacgcgccggcggaaagcagccggctgttctccacgccgaacatgccggtcaacctgcaggatcactgtatcggtctccacgccagcgcgctggtgcgcgacggcggcaccctgcagatcggcatcggctcgatgggcgacgcgctgaccgccgccctgctgctgcgccagcgcgacaacgccacctaccgggcgttgatcgacgagctgggtgtgcgtgcgcgctgggccgagacgatcgagcgcgacggtggcctggagccgttccgccgggggctttacggttgcagcgagatgttcgtgccgggtctgctggcgctggccgaggccggcgtgctgagccgccgggtctaccccgacgaagcgcggcagcgtgccgccgagcgcggcgaggcgccggtggagggcggggtgtggctgcacggcggctttttcctcggtccgttggcgttctaccggcgcctgcgcgagatgtcgctggaagagcgcgccgggatcggcatgaccggcatcggcttcgtcaacaacctgtaccgccaggaagagctgaagcgcctgcagcggcgcgacgcgcgcttcatcaacagcgccttcaccgtgaccctgctcggcgccggggtcgccgatcaactggaggacggccgggtgctcagtggcgtcggcgggcagtacaacttcgtcgcccaggcccacgagctggagggcgcacgttcgatcctgatgctgcgtagctggcgcgaatccggcggggaagtcagttcgaacatcgtctggcagtacgcccacaccaccattccccggcacttgcgtgacatggtggtgaccgagtatgggatcgccgacctgcgcggcaagaacgacgcggaagtgatcgccgcgctgctggccatcgccgactcgcgtttccagcaggcgctggccgagcaggcccgggcggccggcaagctgccgaaggatttcgtcctgcccgaacgctatcgcaacaataccccggagcgcctgcaggccttgcaccaggcccacgcagcggcgctgccggagtttcccctgggcagcgatttcgacgaggtcgagcaggacctgctgcgggcgttgggttggctcaagcgcaagctgaagctgagcgagatcctcgaactgggcaaggcgaccctggacgcgccggagccagaagcctacccggcgcatctgcggcgcatggacctggacgatccgcaggggcttcgcgaggaactctaccagcgcttgctgctggccggcctgcgggccagccaggaagagcggggctga

SEQ ID NO: 343016 - DNA, 192 bp, Pseudomonas aeruginosa
atgctcaaccacgaaggcgaggaggccggcgtgctggtcgacgggcgcctggaactgaccgtcggcagcgagacctatgtgctcgagcgcggcgacagctactatttcgagagcaacaagccgcaccgttttcgcaatccctacgatgtgccggcacgcttgatcagcgccaccacgcccgcaaatttctga

SEQ ID NO: 343017 - DNA, 204 bp, Pseudomonas aeruginosa
atgagcctagagggactgatcaacgtcgttgctttcgtgctgatgagctacttcctcgacggcggcggccagatcaatcagtccgtaatcccctcctgttggttcagtccggttcagctggagtgctggacgtcgccgcgcccaccggcaggtagcgtaaggcacgagcgccccgccggctgggcgcggcggacgtccctgtaa

SEQ ID NO: 343018 - DNA, 138 bp, Pseudomonas aeruginosa
atgaagaaccacgaaatactcgagaagaacgtcggcctgctggccatcttcatggtgatcgccgtcagcatcggcggcctgacccagatcgttccgctgttcttccaggacgtgaccaatacccggtcgaaggcatga

SEQ ID NO: 343019 - DNA, 849 bp, Pseudomonas aeruginosa
atggccgaccccgctttccacaccccgctagtccatgaaggcatcctcgccgtccgcggccctgacgccgccaagttcctccagggccaactgacctgcaacctcgcctacctcaacgacgagacctccagcctcggcggccgctgcaacatcaagggccgcctgctatcgagcttccgcatcctgcccgagggcgacggcctgctgctggcgatggccggcgagctgctcgaggcccagttggcggacctgaagaaatacgccgtattctccaaggccagccttgccgcccgccacggcgacctgctcgccgtcgccctgggcgacggccgcgtcgagctatgggttccggcgcagcgcgccgaggcggtgcttgccacgctccgcgagcacagccgcgaggcgccgctcgacgattggctgctcggccaggtgcgcgcaggcatcggccaggtgttcggcgctacccgcgagctgttcatcccacagatgatcaacctgcaggcggtcggcggggtcagcttcaagaagggctgctataccggccaggaaatcgtcgcccgcatgcagtatctcggccgcctcaagcgccgcctgtatcgcctggcgctggacgcagacgaggtgccggcgcccggcaccgggctgttctcgccagtccattccaccagcgtcggcgaagtggtactggccgcccgtacgccggagaacagcgtggaattgctcgccgtgctgcaggacgacgccgtcgccgacggccggatcagcctcggaagcgccgaaggagcgccgctcgtcctcctcaatctgccttacacgctggacagcgaccgcgaaatccagcgctga

SEQ ID NO: 343020 - DNA, 951 bp, Pseudomonas aeruginosa
atggatttcttaaagctattgagtgaagctttaggcgacacctcagtgattaagcacgaatttctactttgctatcagccaacggagaatatattacatgctttttttgaaggaaaaactgatgagtctttctatgggactcacataagaaactcaaagccagaagattggcgactgaagacttatatctgcggaaacaaagacggcgtctactttcaacatcagcaacttggccatctgcatgcaaaggagcaacccttactattctttgtcgacaaagacatcgaagatattattcccttccctcgggtaactgatggcaatattcacgtcacagactattattccattgagaactatattgtaaccggggtcgccataagagttgtttgggccgaaatatttaggcagcggtcaggcactcctgcttccgacgcgattgaagaagcttttagcaagtccctagaagcattccatcagctattttacaaagtaatggcttgggtactatttcatcgcagacataaccgatggccgaatctagactgcatactcaccaaaaatctattttccctggataacgatctatgctttatggagacaatccccgatatagagcgtctatatagtcatctcgacgagagaacaaagcaaaaaacggacatcgagcacttcgctgaaattgcactttgcgagacggaactacgccgctttccagccaaagcaattgtgaggggacataatgaaatggacttttttatagagttttacaaaaagctgaaaagtatagttgctcaagcaagcaaaggtccacttaggctaccgaccgacatctctgacaacaatgtcattgatattatggggccgcgaacagccattcctcagtctttaaaagcgtttctagatagacatttagataatcagctgcccttgagcgcggcggctggatag

SEQ ID NO: 343021 - DNA, 303 bp, Pseudomonas aeruginosa
atgaaactactcaatacctacgacgatagagacgaagccgaagaggccgctgagaaactgagcggcgataagcgcttggccagcgagcgtgatgcaacagtgaccatctacaatcttttcggaaccccgagctggggtaatttccatcgcctcggcatgtacaacttgggcgaattgaagtccctgcttgatcgccgcgccaattggcagccccctgatcaggcccgacatgcagaaatcatcgccacactgttggtcgtagcgaagaattatgggatagatatcccaggccactggttatga

SEQ ID NO: 343022 - DNA, 840 bp, Pseudomonas aeruginosa
gtgacaactcttccattcagtcgcttgttctcaatgcccgcattcgaagggctccgtatattgcgtgtccatgttgcgcgcaggcctgaggagcagttgtgtcgcttggtcgagatcgtccggagtactgagccatacgtcgcgagctatgaccttgatgctgcagtttttcttcatgaccttgttccaaaagatgcgccccatacagaggttatattttatcgagtttgtttgggggcggtgctcctaatagagcttcctgagtgggctaagctgatgacacttggccgaggccgcttcatcaagcgattgggctccgaagagtttcgcgatgtacgaagcctattccggcaggcccgcttgcttgatgagccaccatcggccgacgatgtcgattggtgggatgatattcaggcgcacgtccgactgcagcatgatgcagaaaagatgcgacgcgggcgcgcagcggagcagctttcgatcgcacacgagcgtgagcgactcgcgaagttagggttgtcactggagccgcggtggatggcaattgaggacaacactgtcggatacgatgttctttcctataattcaggaaagtttggccctttaaacaaacttattgaagttaagtcgactattgcttctccgcttcgtttttttctgactcgcaatgagtgggatcaagcaaagaagtttggaccggcgtatgtcttccatgtgtgggatatgcagaaggagcctgctgtgctctatgagaaaacagttgagcagatcgcccatcacgtgccacaagacagcaagaagggacagtggaagacagctctgataccagtcggggtatag

SEQ ID NO: 343023 - DNA, 1905 bp, Pseudomonas aeruginosa
atggctcttccaccatcagaactgacaatcgagtatgatccggttcggattatcggccgtatcaagcgcaatgatcagaagactgattctcctatctgggagcggcttcgtgcgcattttgcgggacggtcggatgttctgactactccgcttgcgattgagatgccatggccggatatcctcggcgtgatcagagagtttggtagtcgttcaactcagcagtcgctgaacttccggttccgtccagtcaatgaggcggccgacaaggttgctgcctttgttcgtgatttgcgcactacgcgtgaaaagcggaacagtcttatagttgagcttagcgctgaagagatcgaaggccgtcttaaggcgttaggcttcacaaagcgtttgctgaagccctttcagtaccgcgatattgcccatcttctctcacttcctcatggggccaatttctctgtgccgggagcgggaaagactaccgtcacctttgctcttcacctcttggtagcaacagaaagtgagcacttactcgttgtttgtccgaaagcagccttccctgcatggaggtcaatcgttgatgagtgcatggacgagagcgcacctaacggcggggcaaatccattcattattcttgatgggcgagacgatgaaactgaccgcctgttgagaagcggtgctaaacgatttgtgatttcctacgatttgctcgttcgacagcagtcaacaatcgcggcatacctctcgcggcaacctgtccacgttgtcctagatgagtcgcaccgtatgaaggctggcatggcctcccaaagaggtgctttccttcttggtgtttcgtcacttccagtacgtcgcgacattctttctgggacaccgatgcctcaggacgccaacgatcttgcttcgcagcttggattcttatggccaggtcaaggtctcgatcttcgcttacaaaggggggcgccaccgaaggaagtcttaggtcagctttatgtccgtaccacgaagcaggaactcgggctccctgaagcgactcgtcacttttacccagttaagatggcagacgggcagcttgcactttattcagtggtgcgtagtgaggcactacgacaactgactagggcggtccgcagtggtggtggccccgactatgtaaaagcgcgaaagtcggtcatgcgattgcttcaactctcttccaacccaacgctggcactgcaggcaatgatcgccgacgatgcgcctgtcgcttccgggatcgttgacaaggtaattgaagaggggccttcaacaaaaatgcaagctgttgccgatcatgctaggcggcttgcgcgagcgggtaagaaatcggttatttggaccatcttcactgggagtattctcgactttgaggtcatgctcgcagacctcaaccccgtttcgctttatgggggggtgcccgcgggggatccatcagactccaacactcgggagggacggcttttacgcttccatctcgatggtgactgcaaggtactgatcgccaatccggccgcagccggcgagggtattagtctccatactgtctgccatgatgcgatttaccttgaccgcagctatgtctcaacacactaccttcagtctatcgatcgtattcatcggctcgggttgccatctgacgttgagaccaacatccatatttatcagagtagggccccccgagagcttggcagcattgatctgtccgtttcacgcagacttgcgacaaagattcgcaacttgcagcagctcctcgaagaccctgatctgcaccgaattgcacttgacgaggaggatgccgacgaccctgttgatctcgatgttgatcttcaagacctcgttgaccttgtgggggaattggaggggtgttctccggtggaggcagaagacgagtga

SEQ ID NO: 343024 - DNA, 1284 bp, Pseudomonas aeruginosa
atgtcatacatcgtgaaacttaccgctcctgcggaacgtgaaaccttgatcgagaaggcgcttaagaaaccaatccgctcggaggcgttctatgattttcgaagcaccaaatatgacctccctgtaactagggttggaatagacttgccggtctaccgaatggagaattttcgtacctatacagatcagcatgaatatattgccaaggagaaggtttcgacagaattcttctcggcgggacaagagatcgaaagtgttcagcaagttcagcacgaactcctgattcgattggcgagaaaaggagtcgctgactctgttgttcccgtgatagatgttcttgagaaagaaggtcagcgcgagccgatcttgattactgcatccggcgttgtggtgaacggtaatcgccgtctctcggctatgcgcgagttgggtatgacccatttggacgtgatggttcttccccccgatgcttccatagaagagatcgttgatatcgaggccagtttgcagggcaggcccgagacaaagcttgactatgattggattggagatggccagctcataaatcgcttgattgggatggggcgaactccgaagcaggttgcagatcaactacatcgcagtgaaaaggatataaagaacgcccttcaggccctcactgaagtggatctctatctcaaagagtgggctcacgcagcaggggaatacggtcgagttagcgaggacgcagagcagttgttcaaggatttgccaaaaaggcttgacggtaaggatgtgaacctcgctcaagcaagtcgtgttatcgcatggtctctctttgataaccgggataagttgccaggccgaatatacgaattcaacccagccttcggcaaactggcaggcgatgtattggatcgtgtcgcatctgacctcggactttccacttgcgaggatgctggcccgcaggagatgcaatctagtgatgatgatttcagcatcgatctagatgatgaggaagaggcagttacttacgactccgttatcgaggcgctgaaggacgaaagtacgcgcgatgaggcagtcgattccttaatcgaggctgcacaaagcgctatcgaaatggataaggggcagaaatctggcgaggctgctctcaaggctctctcgcaggctaacggtaagattgcatctgtggatctttcgagagcagccccagaaacatacccgaaaattaaaaagcagttggatactattgagggtctctgcaagcagcttcgaatgaagctctcggacttggaatag

SEQ ID NO: 343025 - DNA, 759 bp, Pseudomonas aeruginosa
atgcatcttatcgtgacctcgccgccctacaatatcggcaaggtatatgaaaagcggacctctcgagacgtctatattgaggagcaagcggctactattgctgaggctgtgagacttctcaacccgcatggttcaatttgctggcaggttggcaaccacgtggatgatggtgaggtcttcccccttgacatcattctttatgatctgttcaaaaaccacggtttgaagcttcgcaatcgaatcatttggacctttgggcacggactccattgtcaaaagcgattttccggccgtcacgaggcaatcctctggttcaccaagagcgacgattacacgttcaacctagacccggtccgagtgccgtccaagtacccgaataagaagcatttcaagggaccaaatcgcgggaaagtttctagcaatccccttggaaagaacccatctgatctttgggaaattccgaacgtcaaggctaatcacgtcgaaaagacgattcatccttgccaatttcccgtcgcgttggttgaacggttggtgcttgcattaaccaaccctggtgatagcgtacttgacccttatctcggggtcggttccagtgcagttgcagcgctgaggcatggccgacacgcttatggttgcgatgtcactcaagagtatgtggacacggccctcgaccgagttgaccagctcttcgccggaacgttgaggacgcggccgatggataagccaatatatgacccgacagggaagtcgatctaa

SEQ ID NO: 343026 - DNA, 1017 bp, Pseudomonas aeruginosa
atgagtgatgagtcccgcaaaaaaccttccggtcgcgccaagggtggtgcagcacgtcaggccgcattaacgcctgagcagcgtagagagaatgcccgaaaagctgctctggcgaaggcagaaatcgcaaagctccctcgggcaactcatgggtcgacagagcatccacttaaaattggtgagatcgagatcccatgctacgttcttgatgacggaactcgtgttctttcacaaaggggacttattgcagggctcggaatgaagtctggcggctccgcaactggcgccgatcgtttggcggtatttgccggaagtaaaggcgtttcttccttcatttccaatgacttgacggcgacgatcaataacccgattcgttttgtttcgcctggcggcggtacacctgccttaggatatccagccactgttctggctgacatatgcgacgctgtattggctgctaggcaggcaggaaaattgcactatcagcaagaacacattgctgctcaagccgaaatacttgttcgtggttttgcacgtgtaggcatcatcgcactggtggacgaagcaaccggctaccagaaggatcgggctaaggatgcactggcccagattctggaggccttcgttgccaaagagctccagccttacgtccgtgcttttccggccgagtactacgaggagcttttccgtctccgtggcttgaaatatcctccagagaatccgaagttccgccctcagtactttggtttgcttacgaacgatatcgtctatgagcgcttggcgccggggttgctagaagaactgaagaagcaggcggctaaagacgagaagaaaaaacatctgcaccgtcgcctgacccaggaggtggggcacccgcgtctgcgcgagcacctagcctcggttgtcactgcaatgaagctctctaatgactatcctgatttcatcagcaagctgaatcgccttcaccctcgctttggtgataatcagatgcttgatcttgaggaaggggatcggtag

SEQ ID NO: 343027 - DNA, 891 bp, Pseudomonas aeruginosa
gtggattcccgattgagcgattttcttgcccgcgccgaaagcgtgctcgcgcgcctggagccgctgctgccggccgtacgcgaagccgtcgactgggagcgcagcctggcggcgcgctggcaccgcgacggccgtagcggctacctgcagccgctggaggtcagcctcgacctgcgcctggccgacctgctgggcgtagagcggcagcgcgagcaactggaacgcaacacccgccagttcgtcgccggccagccggccaaccacgccttgctctggggggcccgcgggaccggcaagtcctccctggtccgtgcgctgctggccgagctggccggcgccggactgcgcctgatcgagatcgagcgcgaccacctggccgacctgccgcgcgtggtggagcaactgcaaggcctgccacagcgcttcgtgctgttctgcgacgacctctcgttcgatgccggggaaggcgactaccgggtactcaagagcgtgctcgacggctcgctggaacaggcgccggagaatgtgctgctctacgccacctccaaccgccggcacctggtttcggagaagcagagcgacaacgagaactggaagatggtggacggcgagctgcatcccaacgaagcggtggaggacaagatcgccttgtccgaccgtttcggcctgtggctgtcgttctatcccttcacccaggagcatttcctcagcgtggttcgccactgggtggacgtgctcgcggagaaggccgggctggcctggagctggagcgaggaactggagaaggaagcgatccgctgggcgcttggccgcggcaaccgcaacggccgttgcgcctatcagttctcccgctactgggtgggcaagcaactgctggagcgccaggcatga

SEQ ID NO: 343028 - DNA, 2058 bp, Pseudomonas aeruginosa
atgaaccaatccccaagcacactgctgaaaaaagctcgagataagcaactccctcatcctgctatgttgaaggagttcaagttatccagctggattcaggcatatgaatggactaggggccagggaagcgatgagcgcggattcctcaatggtgttgcctggctcaatgaccactttcagcgcgtagaaaaaacacgccagcaattcactttctgtcgtgacatcccgttgagtgcgaacgaactgatccaggcgcatctgggggccgctaatcacgcattccaccagatggcctctgagcagatggaaatcatagccgggcagcccgatgcgtcgatggagcagttcctggctcttaagtccaccctgacttatggcggagttgagatcgatcccaatgctttgaatatgtatcgactggacagcctgtgcgggcctttttgggaattgcttcagccccagggtgacctcgaccggctctttcctgaagatcgtcctcatcaaatggacaagctttcgttccttctgaatgaaagctcaatggcgcagctctatcacaacttctcgcgcatctggcaggcgttgctctatggtgaagctcagtttttcccgcacccacagggcatggttttagcctcgaccacaccggatccgcatctgctcaaggctgtttccgaatatcgccgggaccaccacaatagtacaaacgcaatgcagatcattcgagatatgagaaacgtgcgtttggtctttgaaacactactggcccctggtcattatctgcactatcagggctcaggtagcagcttgtctagcgttccgtggggggagctgtcggagcaggtacagtggtcggctttctaccatcgcgccgcgccgcattacatgatcgatcaacacttgcaccccatcttagactcggcatccaccgacgccaaagaccaagagatgcgcaatgtattgaaagtctggtttcatctggtagttcttgctgcccaagtgaaagaggctaccggacccaatcctaagccggtggagtggagcgagttactcgcctttgctccgaggttccgattggacgaactggtcgagcacctagcgcgctgtgcgaatatgatttctgacgacgtgatgaaaattatcaagatgctctcctatggggctagcagccatcagcacgatctttggactcagcccctactggtgctcgatgaacatgtatgtttcccaataagtgctctgctgaccgctagcatcagtcgtaatttcgacacttggcttaatcgtattgacagagactccaagcgccgtggggatttgtttgagcgtgatatcgaaaatgtcttaaaggagtgccgatcaaataaccctatcctagcagagcacctcagctggacagggggtataaagttcaagcacgaacccaagagctttgagcaaatcgacttaacattcgctttcggtaacttgattgttatcgctgagcttaggagtcgccgcgcgcccatcactgcattggattaccacaacgatatatttgataaaaatggtatagaaaataaagtcgcccaggccagtagaaaagcagatagagttcgcgagcgcctgcaagagttttgcatggagtactacccgtcactcgctgggcgcgaaggtcttacggtgctaccccttgtgatcgtaaatgggcaatttcacgcgggctaccctcggaatggggtgcccgtactggacattcatttgctcaagcactttctcaaggatgcagaaggacgatttttcggaagtgtggaagaaaacaccggaaatagatatagcatccccttgtacggctctttagaagaggctgctcgagagtttcctaaatacgctgcctgccccacgcttatcaagttgtacaatgctctaataacccaggtctcccaaaggcacgagattccaggaaaagatttacctcctcttcacatggctatacttgaaattcctaaagtaacgccggaacgttatatccaggtcttggaggagatcgccgaaggtaggcttcggaaaaacttttga

SEQ ID NO: 343029 - DNA, 2265 bp, Pseudomonas aeruginosa
atgggatggattcgcaagcttttaggtcgtgacaaaccagcttcaaagcaaccagaaaatgctccctcgactcatgacccagttacaaaccaagaagataattactacttttcggatgaacctatttcatctaaagaagacgaccgttttgggcgagcgccgtttgccgcgagaatagccgacacgatagctaaacgacgggatccatctagcatcgtcattggtctatttggcccttggggagatggaaagacctctgtccttaaaatgatggaggagtccctagaccaaaatgaccacgttgtcacgataagatttaacccttggcactttccatcagaagacgctcttctgcgaggattcttcgccactctatctgaagcattgggcaaggttccaggattcaaagaaagagcagcaaagttactcgagtcctatggcggaattttatctgtagtttcagtctccattcctggagtggatatcaatcccggcgaagctgcgaaaaacataggcgaatcactatccaaagtaagcttggacgagctcaaaaatcagattgacttacttctatatcagagcggaaagaagctagtcattctcattgatgacatcgaccgattagacaagaatgaaaccaacgcaatttttaaactagtaaaactttcagcgagcttcaaatacacatgctacgttcttgccttcgacgatgatgttgtcgctgcggccttaggggaacgatacggagctggtgggcatgaagcgggaagagcttttcttgaaaagatcattcaagttcctctacatctacctcccgcggaccgaatgagcttacgacagataacatttgaaggcgttgatcatgctctatctcaagcagaaattgcgcttgaccagcgacaggttgatgttttctcgcgccattttgtagatgccctggaaccaaagttaggaacaccacgaataggtaagctttacacaaacgccctaatgttctcactacctctcgtaaaaggagaggtaaacatcgcagagttcatgttagctgaaggattgcggatactttacccaaagctatatgtcgccatccgtgacaattccaccatattcttacaaggagagcctcgtgaaaacagaagggctccggatcaacaacaatctccacttaacaaaataattgaagcctcgacgccgtcggcgactccagaagaacgccaactattaagagatcgactacttaaacctttattccctcgaacaggaaactcaatgtacgggggtgagtgggaagagatatgggccaaagaacagcgcatatgttccgctcgatactttaggcgctactttgtatacggggtccccgaaggggacatatctgacagccagctaaacacactgatagaagatctagtagcggccaaagtcgattcaaatgagcagcgcaggcttttgagcatatacaccaagcgaactatgccacagctaatacaaacgctaagaaatcgtgcagatacttttgacgaagtcaatgcattagccttagcacttgctatcacaagaaacggcgaccttcttccgcgcgagcgaggaccatatgtcttaggtggaacctttatgcaggctggaatactagcagcccagctggcgcggcgtattccattatcagaaaggcaagctgcagtcgaagaaattattcagacagcatctcccttagcaatgggaactgaatgcgtccgatggctcacaagttcatctgaccgggatgaagaaaatagagtactcccagacgaggcggatgacgcaatatttaaaatatttgccgagcgcatccgcgagacgaacactaattcaccaatatttgaagaagccgggcgtgacgctccacatctctactggctttggcgtagaggtggaaatcaggcagagatagaagccagtctacgagcgacatttgacgtagagcctgctcgcattgatgacttcctcggcacctatatcggagagggctgggaaatggaaagcggcctacccgttcgtggcgatctccgacgtgaaagctacgacgacatagcgtcaataatttcaccggagtatgtcgttgctaaccttcgctcacgctttggagcggaactggatgatccccagtaccaccaacaaggaaccccagcacaaatgacggctcaccaatttgtgtttctacatcacgtggccgcagcagagccgccctcaaacgcagaggcggagaatccacccgaggacgaataa

SEQ ID NO: 343030 - DNA, 1296 bp, Pseudomonas aeruginosa
atgaccaagccaaagcatcaagtccgtgtcacggttaagtccgctggcgagatttacgagtcgcccgaggggcgcctgttcttcgacgacaagctggccaagttcactgatctgtccggcgtgcgcctgctgcgctgcggcgtggatacggtccgtcagttgtacaacggcatgatccggttggaagtgatggcgctgttcgatgagccggaagacatcgtggagttcgctggctaccagtgggtcaagggcagggtagggcgcgactccggctatcagtaccgcctgcagaacgctgacacgggcctgatcctgttgatcaagaatcacaacgtgaagctggagaacatcgggccgcacctcaagatcgaggtgtctccacacgctctggacggtgccgatcctgcgaccctgcaggacatgctcgatgacctggctagcgccgtgctcgctcactgcgaaacgaaccagtgcgccgtgcatctcgcgctggatgtgcagggctggacgccttccgcggacatcgtggagcgcatgcgctgtcgttcgactcgtgtgcggcagattagcggcatcgatcgtatcgagttccacggcaacgcctcggtgtatgggcgtggtgagaccttcatgttcggctcggccaacggcatgcagctctgcatctacaacaaaacgcttcaggcacgcgccaccgacaagctcgattactggagcaacgtatgggcgtcactgaatggcgatccctttggtgatggggagcccgcctacaacccggaggaaacggtgtggcgtatcgagttccgcttccatcactcgatagtccagcagttctccgaaggctccaaattgtcctcaggtgaggtgatcggttgccgtacctatgccggcctatgcccgcacctgcaaggcctgtgggaatacgcctgcgacagcttccggctgctgctgaaagacccgaagtggtatgacccgttctggtcgctgatcaccctggataccaaggtccaggtagaagcagatccgctgattgagcgcaccgagtatcgtcgctactacaagaccgcacagggcttctccggcaagaactgcgagatgttcctgggtcagttcgccagcctgattgcgcgggagcgcatcccctcaaaaaaggcacttgaggtcgggagaacgctccccttctggcatgtgatcgaagaccactacacggccaagggctacagcactcgcgacctcgaaaagcatatctgtgggttgatcaatgaccgctacttgaggcgcggatacgccatctga

SEQ ID NO: 343031 - DNA, 3393 bp, Pseudomonas aeruginosa
atggacgagagttacggcaatcccacccaggtgaccgaggaaattgccgccagcctgaccggcggaaccttgcacagccgggtggtggagcgccagtacagcaacgacggcgcctcctggctggttggtttcgtcacccgcgaaaccgaaagtaccagtggcgacagcgacagcaagtcgcgggtgcaattgcgcagcgcgcagccggggactctagcgccggccagcgaaacatctttcagtggctcgcccggtgcggagatcacccgtcaatacagctacgatggcaacggccggatcgtccggattaccaccagcggcgccggactggcggcgcgcagcgaacagttcggcgcctaccaggggccctggccgggcactcggtccaatgccctcggccatgtcgagcgcttcgcctacgaggcggcccgcggccaaccgaccagcaaggtcgacgccaacggcctggccgagagttatctctacgacgctttcggccgggaaaccctgcgccgcttcgccgacggtagcctgctcgccaccgactatctggtttgcggcagccgggcgatctgtgccagcggcgccaaggtagccgtgcgcacgcgtaccgtcaggggcagccagcagggcgcggtggaacgctggcagtacctggatggcttcggtcgggtcctgcgcgaccgtcgccaggccttcgacggtcgttggatcaatgtcgacaacagttacgacgcgctgggccggcagcgttcgactaccgagccttacatcgaggcggcgaccgtcctacagaccacctgggacgcccaggaccggccgttggcccggcagttgcccagtggggcgcaactgagctacagctacggcgcgcgcgctgctggtggcagttggaagcaatatagcctcggctacgacggaaggagcctgaccgagcgccgcgaatacgatgcgcgtggcaagctggtgctcagtaccaatgccctgggcagcgccggcgaggtgtccgttcgctaccgctacgacgccgacggcaacctggcctggacccaggtcgctggcgacagccgcagcgagatccgcatgagctacgacgcggcgggccgtcgcaccggccttttcgacccgaacagcggccaggaaagcgtgcagtacgatgccctgggccaggccctggtgcgtaccgccagcgacggcagtcgcaccgagcgcaagtacgacctgctcggccgggtgctcgagcagaccgaccgcctgggcggccaggccagcatttcgcgctggcagtacgacacgggaacgaaaagcctgggcaagctggtcggcgtggccgggccgggctatcgccaggcgctgctctacgacgatctcgcgcggttgaaggcgagaggctgggatatcgaagtcgacggtgtcacccgcagctaccaggagtcgtatggctacgacggcttcagccgcctggcgagcaccaccctgggcaacggccaggtgctgcgccatctctacaatggatacggcttcgccgctggggagcaggacggcgccgggacgacgctgcggcagatccaggctcgcgacgcccgcgaccagatcgttcgcgaaagctacggcaacggtgtgctaagccagcgcgactaccagcccgccaccggctggttgacgcgcatccaggcgagcaagggcggcagtgtcctgcagagcctgagctaccgctacgatggcctcggcaacctgctggagcgcagcgacgcccgcggctacagcgaagtgctgagctacgatgacctcaatcgactgttgcgcagcgcgcggaccctggatggcacacaggtggtccaggactttacctacgacgccctgggcaacctgaccggcaagagcggtgtcggcgcctatcgctacggcagctattcgagcgccgagcagcagctctgtgctggtcgcggcggggtggcccagcccggaccgcacgccgtgcgcggcaccagcgccgggacgtattgctatgacgctcgcggcaaccagctcagcgggccggggcgacaagtcaagtacgcatcgttcgataaacccgtggaaatttccgcaggttccagcctcagccgcttctcctacgatcccgagcgcaagcgctacctgcagacggtggatgggcgcacctccgtctacctggacgaggggcgtttcgaggaggtcaacgacggcgggcgcagttggcaggacgcctacgtcggcgactacctgatcctgcgcaaggaagggggcgccgtcaaaaagctctacctgctgcgcgatgcgctcggctcggtggaaatcctgctcgacgccaacggtgccgtcagcgaacgccagtctttcgccgcgttcggcgaacaccgtggcgctgactggaaggacaacggcaaccaacccaccgccacctccacccggcgtggcttcaccggccacgagcacctggaggagtccgggctcgtccatatgaacgggcgggtctatgacccggtgatcgggcggttcctcagcgccgatatcgtctatcaggatacggccaatgcgcaggcctacaaccgttactcctatggctggaataatccgatcgccagtgtggatccgacggggtatgcgttggaggaaatttcgtctggcaatagttggtactcaccgtttataagtaatagttggctggttttggggaatgcctttaaaggtaatcttccagatagttactgggacttagggggggcgttcaagcagaatcttaactttgcggcgactacccttgctggaaatccattttctatttatgggttttcgcgggtaagtgaaagttttgataatttactttcccctaaaggtgtagatcagagggcaggagctggagtgtatgagcttggcagtctatttttcccaactgcaggagataaagtatctggatgggttgcaggttttgcgagtcgcctcagatttgctccagccttaagaggagggataggagtttctagtcctgcttggaaaggttctgggccgactcctggggttttaggggtagagccaggttcactatcctctaaatcgttgaggaattattatccgagcactgatagtggttctatagagtatgtgtttgatccgataagtaaaagctttgcggtgggaagacctaaagattttcgtccaatgttgagtcagcatcagcaattggctgattcaattggggctgctgatgctacagttgtcggtggaaaattttggcgtggcccaaatggtgaattctttaccaatgaatatagtgggcactactggaagaattggtcggaagaaaatcgcaaagtgtttgttgatgtgatgaataaatatggtgtgaaggttgagcaccggagagggatgtga

SEQ ID NO: 343032 - DNA, 297 bp, Pseudomonas aeruginosa
atgaccgtagaccgcatcggcgaacgcctgcgtcgctatcgccgcgccgccaagaagaccctgcaccaagtcgccagcgaatccggtctcaccgcgagcttcctctcccaggcggagcgcaacctcaccggtgtatcgatctcttccctggccaacatcgccaagtcgctgaatatcccgctcaatgccctgttcgaccaaccggcacaaccccagaaggcgagcgggtacgctacaccatcgagggccagccgctggcctacgaacgcctgtccagctccttccccggcaacctga

SEQ ID NO: 343033 - DNA, 240 bp, Pseudomonas aeruginosa
atgaacatgccggtgggctaccagtcggagctgatctcccatgagggcgccgagttctcctacgtcctgtccgggcagatcgtctacaccatcgaggggcgccagtaccccctcggcgccggcgactcggtgcacttcgacgcgaccaagacccattgcctggccaacgtcggcagcgatgtggcggaagtcctgaccatcaccaccatgggcctgttcgacgaccatccgacgccctga

SEQ ID NO: 343034 - DNA, 3738 bp, Pseudomonas aeruginosa
atgcagcgtctgcaggccgtgcttctcctgtgtctggcctgctgctggccggggctggccggcgccctcacgctcacgcccgaggaacgggcctggctggccgagcacccgagcatccgcctgggcgtggacacctcctggccgccattcgaataccgcgacgaacagggccgctaccagggacttgccgccggctacatcggcctgctacaggaacgcctgggcgtcagcctgacgcctgtcgaaccgaagacctggacgcaggtcctggagcaggccaaggacggtcggctggacctgctgcccggcatcatggctaccccggagcgccaggagtacctgagcttcacccggccctacctggatttcccgatcatcatcctggcacgcaagaacggcccgatgccgaagcgcatcgacgagctctacgggctcaaggtcgcggtggtcgaccactatgctcctcacgaactgctgatcgcccagcatcccgacctcaccctgctgccgctgccttcggtagcggcagccctgcaggcgctggccaccggccaggccgacgccttcgtcggcgacttcgcctccagcgtatggaacctccgccagctcaagctcaacggcctggagatcagcggcgagacgccataccgctaccaactggcgatggccgtgccgcgcggacaaccgatcctcgccgggatcgtcgacaaggtcctcgccgacctcagcgccgaggagatcgagcgactccaggccccctgggtcggcggcctgctcgaccgacgtccggcctggcgcgagatggcgacctacggtcttcccatcgtcctgctgatcctggtctcggtcgccatactgctggccatgaaccgccgcctgcgccgcgaggtgagtcgccggcggcaattggagcgcgaactgcgcgacagcgaacagcactaccggggactggtggaaagcctgaatgccatcgcctgggaaatgcgcctcgaggagaaccgcttcacctacgtctcgccccacgccgaacgcctgctcggctatcccctcggcgaatggctgcagccgggcttctggcagcggaccctgcaccccatggacgccgagtacgccatccactactgcatgagcgaaagccaggccggacgcgaccacagcttcgactaccggatgctcgccgccgacggccgggtagtctggattcgcgatttggtcaccccgatcacgcaaggccgggacctgctcctgcgcggtctgatgatcgacatcaccgaggccaagctcaccgagcaggccatgcgcctgtccgaacagaagttcgcttcggtgttccaccactgcccggacatggtggtactggccaacggcgccgacggccgcttcctcgcggtgaacagcaccttcgagcagcagatcggcatcgccgccgacgacgccatcggcaagaccgccaccgaactgggcatctgggcactccccggcctgggcccgcaggtcctggaaaagctcggccacggcaacctgaccaacctcgaggtgcccctgcggcgccgcaatggcagtaccttcagcgcgctgctcagcgcccagcacgtggccctcgaccagaccccggcgctggtggtagtgatccgcgacatcacccacctggtggagacccaggaactgctgcggatctccgaggagaagttcgccaacgccttccatgcctaccccgacggtctgctgatcagccgcctcgaagacggcacgctgatcgacgtgaacgatggcttcacccgtctcaccggctaccgccgcgacgaggtcatctcccgctccacgctcgaactcggcctgtgggtcgacaccgaggaccgcaagcgcctgatctcgctggtacgccaccacaccctgacccagggcttcaccgcccctgtacgggaccgcaacggtggcatccgccagtgcgagatgtccgcccaccggatcagcatcgatggcgaggactgcgtgctgaccatcgcccgcgatatcaccgagcgccagctcatgcaggagaagctgcagcaggccgccaccgtcttcgaaagcaccgccgaaggcgtgatgatcaccgatacccgccaacgcatcaccgcggtcaaccgcgccttcagcgagatcaccggctacagcgagcaggaggcgctgggacgctcgcccagcctgctctcctccggacaacacgactccagcttttacctcgccatgtggaaccagctggaacgcgacgggcattggcagggcgagatctggaaccgacgcaagaccggcgagctgtaccccgaatggctgaccatcagcgcggtacacaatccgcagggcgagatcacccacttcgtcggcgtcttcgccgatatctccaccctcaagtacgcccaggcccggctcgactaccaggctcaccacgatccgctcaccggcctgcccaatcgcctgctgttcgagagccggctcaatcacgccctcgacgaggcccgcgaagagagccgtcccggcgccgtgctgttcatcgacctggaccgcttcaagcacatcaacgacagcctcggccatcccatcggcgacctgctgctcaaggccatcgccgaacgcctgcgcgaccagttgcgcgacgtcgataccgtggcccgcctgggaggcgacgaattcatcatcctgctccccggcctgcaccaggaaagcgacgccgagcacgtcgcgcgcaagctgctgaatgccttcaccgcgccgttccaggccgacggtcatgaattcttcgtcagcgccagcgtcggcatcgccctgttccccaaggacggcgacgacgccccgaccctggtgaagaacgccgacgccgccatgtaccgcgccaagtcgcggggccgcagccgcatcgagtactacacccgcgaactgacctacctggccaccgagcgcatggcgctggaaaccgaactgcgccgcgccctcgagcgcgacgagttgcagctctactaccaacccaagctgagcctggagagcggcttgctggtcggcgccgaggcactggtgcgctggtaccatccgctgttcggggaaatttccccggagcgcttcatccccctcgccgaggattgcggcctgatcctgcccctcggcgactgggtgctggaacacgcctgccagcagatgggcgaatggcaaaagctgcacgcgccgttcggcccgctgtcggtcaacctcgccggcgcccagctcggccagccgcaactgatcgaacgcctcgagcaactgctggagcagtccggcctggaaccgtcgcggctgcaactggaaatcaccgagagcttcatcatgaaccagaccgaggaggccctcgccgtcctccacggcctcaagcgcctcggcgtacagctggcgatcgacgacttcggcaccggctactcctcgctcagctacctcaagcgcctgccgctggacatcctgaagatcgacaagtcgttcatccgcggccttcccgacgatccccacgatgccgccatcacccgcgccatcatcgccctcggccgcagcatgcagctcacggtgatcgccgaaggcgtggaaaccgaaggtcagcagagcttcctcacccacgaaggctgcgagcagatccagggcttcgtcctcagtccgccgctgcccgccgagctgttcgccagcaaattcctcaaaccgcgccagccgattggcgctccccgagaagcgccggtataa

SEQ ID NO: 343035 - DNA, 633 bp, Pseudomonas aeruginosa
atgctccaggaacaagcacttcctctgaatcggtgcccacactgcgaagtggcgaaaccgaatctgaacaccatcagcagtctcgtcactaccgactccaacaaccgtaatcctcgtcgatggtggtggtacctctgccaaagctgtggcggagtagttctgacggtttgtgattacgatcggcaacatagtcgcggtgctcatatcacgaatacctggcctgctccaacagcagtcagcgaagctgttccggaccgagcgcgagccttcatggagcaggcgattgcgagcatccatgcacctgccggggcagtgatgttggctgcgtctgcagttgattccatgctgaaagaaaaagggctcaaggccggttctctttataaacgcatcgacgaagctgccgcgtctcacttgatcacatctgaaatggccgcgtgggcacatgaggttcggctggaggctaacgatcagcggcatgcagacgaagacgctgcgctaccagacgaggcaaacgccagaagagtgatcgagtttgccacagcactcgctcaattcttgtttgtgctaccggcacgagttgcagcgggccggggtaaaccagtcgagcctggtgaagcacctgctggggcataa

SEQ ID NO: 343036 - DNA, 1065 bp, Pseudomonas aeruginosa
atgagcaagagacgcgaccgccggaaccattcgccggctacgccagcaccgcaggcgctcgaaggcgaggtgatcgtcaaggaccgggagggccaggcgatggccttcaccttcggcgatccgataccggtgctggatggccgcgacatcctcaactacctcgagtgctacgccaacggccgttggtatgagcccccagtctctctggacgggctcgccaagtcgtcgaaggcaagcgtctatctgcagtcgggcctgatcttcaagcgcaacgccctggcgcggaccttcaagcctcaccggctgctgagtcggcaagcgttcgagcagatcgtcatggacatgggctggtcaggcaacctctacctggagaagcgcgacaacatgctgcggcaggcgctcggcttgcagccatgcctggccaagtacatgcgccgtgggctggacctcgaccgctactaccaagtgcgcgggtggcgcgacgaacatgagttcaaggcgggcagcatctgtcatctgcgggtggccgacatcgaccaggaaatctacggtctgcccgagtggttgccagcgctgcagagcgcgctgctcaacgaggccgcgacgttgttccggcggaagtacttccagaacggctcgcatgcgggcttcattctgtacatgaccgacgccgcccagaacgaagacttcgtcaccgacctgcgcagcgcgatgcgcaacagcaaggggccgggcaacttccgcaacctcttcatgtacgcgcccaacggcaagaaagatgggctgcagctgatccccatcagcgaggtggcggcaaaggatgacttcggcgcgatcaagaacatcagccgcgacgaccagctcgccatgctgcgtattccgccgcagctgatgggcatcgtgccgcagaacgccgccggcttcggctcgatccgcgacgccgcccaagtgtgggccgtcaacgagctggagcctgagcaagcgcgcctgcggcagatcaacgattggctgggggaagaggtagtgcaattcgacccctacgagccacccacagcggcgagctaa

SEQ ID NO: 343037 - DNA, 1758 bp, Pseudomonas aeruginosa
atgaacgccatcgttgacctgcctaccgattcccgccgccatgccaagcacctctactggcagggcttccgcatttgcgagatcgccgacctggtcggcgagaaggaaaagacgcttcacagctggaaaacccgggacgagtgggaccgcgctacgcccctggagcgtatccaggccgcaaccgaagcgcgcctcgtccaactgatcctgaaggacccgaagtccggagcggactacaaggaaatcgacctactcggccggcagttggagcgccaggcgcggattgcgcgcttccaggacggtgggaccgagacggagctcaaccctgagttggccaagcgcaacgccggggagaagcgcaagcccaagcgcaacgacatcaccgacgagcaggtcgagaagctggtcgaggtgttcctcgacggatgcttcgactaccagctcgactggtaccgtgctggtagccagcgcacccgcgcaatcctgaaaagcaggcagataggtgccaccttctacttcgcccgcgaggcgttgatcgacgcgctgacgaccgggcgcaaccagatattcctgtccgctagcaaggcgcaggcgcacattttcaaggcctacatccaggcgttcgctcgggacgtggttggcgtcgagctggccggcgacccgatcatcctgcccaacggcgccgagttgcacttcttgggtaccaacgcccgcaccgcccagggctatcacggcaacttctacttcgacgaattcttctggacgtacaagttcaacgagctgaacaaggtcgccagcggcatggcgatgcagaagcgctaccgccggacctacttctcgacgcccagttcgatggcgcatgaggcctacaccttctggacaggcgagcgcttcaataagggcaagccgagcgcccagcacctgacgctggacgtcagccacagtgcgctgcagcagggaaggctctgcgaggaccgtatctggcgccagatcgtcacgatcctcgatgccgaaggccgtggctgcgatctcttcgacatcgacgagctgcggcttgagtacgacgccgcagcgttccagaacctgctgatgtgcgagttcgtcgacgacggtgcgagtatcttccccctggcgatgctgcagccgtgcatggtcgacagctggacggtctgggatgactacaagcccttcgccatccggcccttcgctgaccggcaggtctgggtgggctacgaccccgcagagtccggcgactctgccggcctggtggtcgtcgcacccccgctcgtgccgggcggcaagttccgcatcctcgagcggcaccagttccgcgggatggatttcaccgctcaggccgagaccatccggcaggtcacgcagcgcttctgggtgacctacatcggcatcgacaccacaggcctgggcagcgcggtggcgcaactggtcaagcaattcttcccgtcgctgcgcaccttctcctacagccccgaggtcaagacgcgcctggtgatgaaggcgtgggacgtggtgagcaagggccgcctggagttcgacgcgggctggaccgacgtcgcccagtcgctcatggccatccgtaagaccgtgacccctggcgggcggcagttcacctacaccgccgggcgcaacgacaacaccggccacgcggacctcgcgtgggcgctattccacgcattgcacaacgagccgctggagggccagacgacggccaacaccagcatcatggagatttactcatga

SEQ ID NO: 343038 - DNA, 822 bp, Pseudomonas aeruginosa
atgaccacccccgccaagaaattccgctccaagtggttccgcatcttcgtcgagggcgcgaccaccgacggccgcatcatcgaacgcgcctgggtcgagcagatggccgcgacctacgatccgaagacctacggcgctcgcctgaactgcgagcacatccgtggcttgggacctgactcggtgttcggcagcttcggtgacgtgctggccctgaaggcggaagaggtggagatcgccggcgcgaaaaaactcggcctgtttgcccagatcgaacccaccgccagtctcatcgaactgaacaagaaaggtcagaaaatctacacctcggccgaggtacagcccaacttcgccgagagcggaaaggcctatctggtcggcctggccattaccgacagcccggccagcctgggcaccgaagcgctcaagttcaatgcgcaccgcaaactgcacaaggacaacctgttcagcgccgccgaagaggttgccctcgaattcgaggaagtcgcagacaccgtcggcatgttcgccgcgctgcgcgacaaggtcagcgacctcctcggcaagggcaaggaaaaagaaggcaaggacgccgctaccttcaccgccctgggcgagttgatcgagcagatcgcaacccacggtgccgaacaggcgcaggccttctccaccctcagcgggagccacagcaagctgcaggccgcccacgacaagctgcacgccgaattcaccgcgctggtgaagaagctgggcgaaaccgactccagctacaccacccggccgccggtcactggcggcgccggccaggtcctcgctgagttctga

SEQ ID NO: 343039 - DNA, 1014 bp, Pseudomonas aeruginosa
atgcgtcaagaaacccgcctcgccttcaacggctacctggcccagcagtccaagatcaacggcgttgagtcggtcacggtgacctacaccgtcgccccgacccctgcccaaaagttggactccgcgatccaggaatccaatgccttcctcaagaagatcaacatcatcccggtcgacgaggccgagggtgaagccatcctgctgggcgtcaacggcccgaccgctagccgcaccaacaccagcgccggcggccgccgcaagccgcgcgatgtcagcgccctgaaaaaagacacctacgcctgcaagaagaccaacttcgacacctcgttcccctaccagttgctcgacgcctgggcgaagttccctgacttccagacccgtctgtccaactccatcgccgtgcagcaaggtctggaccgcatcatgatcggtttcaacggcaccagcgccgccgtgaccaccgacctggcgaccaacccgttgctccaggacgtcaacatcggctggctgcagaagatgcgcgccagcgcgccggatcgagtgatcgaagagggcgaggccggctctggcaaagtgaccatcggcgccactggcgactacaagaccctcgatgccctggtgttcgacgcaatccagctgctggacccgtggcaccgcaagcgcaaggaccttgtcgtaatcgttgacccggccctgctgcacgaaaagcagctcaaggccttggaaaacggcgcaagctccaaccaagaggccaatgccgccgacgagatcatcaccaagacccggctcggcggcctgccaatcgagtacgacgcaccgttcttcatcgagggtggagtcttcgtcaccccgttgagcaacctgtccatctacgtgcagaccggcaagcgccgccgccacatccgcgaagagccggacgccgaccaggtcgctgactaccagtcgtcgaacgaggcctatgtcatcgaagacttcggcgcctcggccctagtcgagaacatcgagaaggtctga

SEQ ID NO: 343040 - DNA, 699 bp, Pseudomonas aeruginosa
atggctaccctcgcccagcgcacccagatacgcaaacgcgcggcactggaggcggcagccgccgcccctgccgccctcatggatggtctgaccacctatgagctgatgctcgccaagctgcagcaggaccagctgcgcctgaagcaggtgcagtctcaacagggcaaggccgctctcaagatagagctgctgccggactatgcgccctacgtggacggcgtgctctcggccggccagggtgcccaggatgacgtgctgctcaccatcatggtctggcgtttcgacgccggtgacttcggcggcggcctggatatcgccgactacgtgttgcgccacggactgaagaccccggaccgattcagccgcaccaccggctgtctcgtcgccgaagaagtcgccaccgccgccctgatcgcacagaaggccggcgagagctttccgaaggacatcctgacccgcaccgcggaactgaccgaagagcaggacatgccggacgaggcgcgcgccaagctgatgctggccctgggccgcgccaccctggaagacctagatgaaaacaccccgggccagcccggccagttgcaagccggcatcgacctgctgaagcgcgccattaccctgcacgaccactgcggtggcaagaaagacctggagcgcgccgagcgccttctcaagaaacacgctggccccgccagctaa

SEQ ID NO: 343041 - DNA, 465 bp, Pseudomonas aeruginosa
atgagcggattcgtcgccagcggcaccaccagcgcgccataccccatcagcaacgacaccttctggcctgagatcgacggccagcagctgcgcgccgccatgcgcatcgactccagcgtcaccgatgcccgtctcgaggtggcgacggtcaataccatgatcgaggccaaccgcgagctcgccggctatagggcggcgcgggaggccgagggcatcgacagcctcgccgaggtaccggcgccgaatatcaagggcgaaagccagttgctgcacctctaccgccgcgtgatctattgcggcgccctggcggagctgatcgagcgatacaacagcttcgacgccaccaacagcggcgaccagaaggtcaccgaagagcagtccagcccggaccagttgcgccgcgacgcccgcaaggcgctgcggaccatcctgggcatcagccataccacggtggaactgctgtga

SEQ ID NO: 343042 - DNA, 210 bp, Pseudomonas aeruginosa
atggccgtcgtgatcgccgcccagggcgacaccgtcgacagcatctgctggcactactacgggcgcaccgccggcgtgaccgagacggtactcgacgccaacccaggcctggccgacctcggcccgatcatcccgcacggaacccgcgtcatcctccccgacgccgcaccccaggcagagcagcgccaggtggtgaacctatgggactga

SEQ ID NO: 343043 - DNA, 324 bp, Pseudomonas aeruginosa
atgcaacagatgcctgaacgccccgagacctgggccatgctcatcgcatggctcgagcaacatcaccctctggtctacgcggccgcgctgtccgctgcgctggccgccgctcgcctcatgtacagcggcgggagcctccggcgcgcggccggcgagggcctcgtctgcgggctcatcaccctggccgtgagcaacggcctggccctgttcggcatcccggtggagttcgccccgttcttcggcggagtcatcggtctgctcggcgccgatgtgatccgccagggcctcaagcgactctacaatcgcaaggcagaccagctatga

SEQ ID NO: 343044 - DNA, 840 bp, Pseudomonas aeruginosa
atgagccaggtactcaaacacggcagccgcggccaagccgtgcgcatcctgcagcagcaactcaaccagcggggcgctaccctcgccatcgacggcgctttcggtgatgcaaccgagagcgccgtccgtgccttccagcagtcggtgggcatggtcccggacggcgtcgcgggcaataagacccaggccgtcctcggcggcgccgatccggcgcgcttcctgcgcctgcgcgacctgcaagccgcggccacccggctgggcgtgccgctggccagcgtactggccgtcaacgaagttgaaagcgcgggcgctggcttcctggacaacggcaaggccgcgatcctgtacgagcggcacatcatgtaccaacgcctcgcgctcccccgtcacccccacgatgacaaagcatcgctgcaggcacgcgccgacgggctcgccgccgcccaccccatgctggtcaacccgaaacccggcggctatatcggcggcagcggcgagtaccagcgtctcgcccaggcgcgaatgctcaacgccctcgccgccaacgaatccaccagctggggtgccttccaggtgatgggctaccacgccgagcgcctcggctacgccagcgtcgccgagttcgtcacccgcatgcagagcagcgaggccgagcaactggaagccttcgttcgcttcatcgaggccgatcccgccttgctcagggcgctgaaagggcgcaagtgggccgagttcgcccggcgctacaacggcccggcatacgcccgaaacctctacgacgtgaagctcgagcgagcctatgcccggcacagcgaagccatgagggagaacgccgcttga

SEQ ID NO: 343045 - DNA, 267 bp, Pseudomonas aeruginosa
atgatccgacacttcgtgcctgggccgatcagcctttgcctgacgctgctcgccggctgcaccagcgccctgccatcgccggagccgacggttatcgtcagtggctgtccaatcgtcacgcgctgcagcctgctgccggcggagttgcggagcaacggcgagctgagtgacgacagcgactacctcctgagcgcctgggccgagtgcgcggccaaggtcgacgcgatctacgaccataaccagtaccctgcgagtccagcaccgtga

SEQ ID NO: 343046 - DNA, 528 bp, Pseudomonas aeruginosa
gtgaacaagcccaacagcctcaagacacacctgctggccgcggtcccggagctggccaacaaccccgaccgcctgctcgtgtttatcgacaacggcagcgcccgcagcactgtggaagcgggcctatcgttcgagtacagctacaccctcaacgtgatcctgaccgagttcgccggccacccagatgccgtattcattcccctgctggcctggctgatggtcaaccagcacgaattgctggccaaccaggacaagggcaaggaggccgtcgccttcgaggccgacatactcgacaacagcaaggtcgacctgtccatcaagctgcccctcaccgagcgcgtcatcgtcaagaagctggacgacggccggctcgaggtgacccacccggacgagccgcagctcgaacctttccttccggctggcaactggcagctgtacgccgaaaacatgttgctcgcgcaatggcagagcaccgccagcgacgcccttggagacctggacatgccgcacccccgtcgccatggataa

SEQ ID NO: 343047 - DNA, 450 bp, Pseudomonas aeruginosa
atggataagctcagcgccctggaagactgggccggcgcccttctggcgaagcttgagccgggcgagcgccaacgactcaaccagtccatcgggcgcaagctgcgccgcagtcagcagcaacgcgtggccgcccagcgcaacctggacggatcgccttatgccaagcgcaagccgaagcaactacgcggcaaggccggccgcatcaagcgacagatgttcaccaagctgcgccaggccaggtacctgcgcctgcagagcaccccggacgctatcgccatcgccttcctgggccgcgtcgcccggattgcgcgcgtccaccaggaaggcctgcgcgaccgccccgagcgcggccaggccgaagtgcagtacgagcgccgcgagttgctcggcttcaccgatgcggaaatcgacatgatccgcgacgaactcttgcagcacctggtcagctga

SEQ ID NO: 343048 - DNA, 567 bp, Pseudomonas aeruginosa
atgaacgactacgccgcgctctcccgcctaattgaaaacctggttcgctacggcaccatcgccgaggtcgacgaggtgaaagctcgtgtccgcgtgaaatccggcgacatcctcaccgcctggcgcccatggctcagcgcacgcgccggcgaggaccgcgagtggaatccgccgaccgttggcgagcaggttgtctacctgagcccgtctggaaacctcgcccagggcatcgccatctgcggcctgttcagcgacagcaagccggccaatggcgatcgcccagccctgcaccgcacgacataccgcgacggcgcggtcatcgagtacgacagcgccgcgcacttcctgcgcgccatccttcccggcggcggcacgaccgagctggtgagtaccggcggtatcatcctcactggcgacatcacccacgagggcaactacacccagaccggcaatcagaccgtgaccggaaaagtcaccgtcagcgacgacgtggtcgccgccggtatcagccttgtcgagcatgtccacatcggcaacctcggcgcgccaacgagcccaccgcaatga

SEQ ID NO: 343049 - DNA, 354 bp, Pseudomonas aeruginosa
atgatcggcatgagcaacacgtccgggcgcaccctgctcaaccgcgcgcatctggcacagtccatcgcggacatcctcaccaccccgctgggcagtcgggttatgcggcgcgagtacggcagccaattggtcgacctgctcgactggcctctcaacagcaccaccaggctgcaggcctacgcggcaacagcgatggcgctgatgcgctgggaaccccgcattcggctccgtagtgtgcaactcagcctggggaccgccgctggcgatgcggttcttgacctggtcgccacgctgaccgacaccaacgagcctctcagtctgcgggtgccgctcaacctcggagccctggcgtga

SEQ ID NO: 343050 - DNA, 912 bp, Pseudomonas aeruginosa
gtgaagaccttcgccgctatagacctcagccagttgccggcgcccagcgtcgttgagccgctcgactacgagcagattttcgccgagcgcaaggcttacgccgtctccctatggcccgcagaccagcaggccgaggtggccgccaccctggaactggagtcagagcccctcaccaagctgctgcaggaaaatgcgtaccgtgaaaccatctggcggcagcgcgtgaacgaggccgcgctcgcgaccatgctggccagcgccaagggcgcggacctggaccaggtagcggcgaactacaacgtccagcgcctggttgtcacccctggcgacccatcggccgtgccaccggtcgccgaggtgctggaagacgacgacagcctgagagaacgcacacaaatggcctgggaggggctcagtacggcaggcccacgcaacgcctatattttccacgctcgggccgccgatggccgcgtcggcgatgcttcggcggtcagcccatcgcccgcggtggcggtgatcaccgtccaggcggtagccggcaatggcgccgctccggctgatctcgtcgctacagtacaggcttacctgagcgacgaagaccgccgtccggtcgccgaccgactcatcgtgcagagcgccgaggtgctgccgtacagcatcacggcaactctctatctgaactctgcgggacctgagtccgagcccatcatgcacgccgccgaagcctcgctgctggcatacgtgaaccagcgccgccgcttggctatggaggtgtccgaatccgccatccatgcggcgctgcacgtcgagggagtgcgcaaggtcgaactgatcggctggaaggacgtcgtagctaccgaggcccaagcgccgtactgcgccgaagtgaagctcaccctgggggccgactga

SEQ ID NO: 343051 - DNA, 618 bp, Pseudomonas aeruginosa
atggcggcgataggcgtactgcccggcaacgcgacccaattggaaaggctggccgcccaggcgctagccgacattcagcgcgtcccgataccgttgcgcactctgtggaaccccagcacatgccctgtaccactgctgccgtaccttgcctgggcattctccgtggaccgctgggacagcaaatggccagagtccgccaagcgcgcggcgatacgtgccgcctacgtcatccattcgcgcaagggcacgatcggtgccttgcgccgtgtcgttgagccgctcggctatctgatcgaggtgcatgaatggtggcagtcctcgcctgccggcgtgccgggaaccttctcgctgctggtgggcgtactcgaaaccggcatcaccgaagagatgtacgaggaactgacctggctgatcgacgacgccaagcccctcacccgccacctggtcggactctccatcagcctcgaaagcactggtgccctgccaatcggcgcggcgatctacgacggcgacgagatcgacatttacccaccccaaaaccgcgacatcgacgtcatcggcaccatcagtcgcggcgggcgtgatcattccatcgacaccctggacgtttacccatga

SEQ ID NO: 343052 - DNA, 2031 bp, Pseudomonas aeruginosa
atgatcgaccagaactcgcagttcttcgccatcctcacagatattggcgcggccaagcaggccaatgccgacgcgctgggcatcccgtggaagctgacccagatgggcgtcggcgacgccaacggcaccgacccgattccatccgccgtacagacgaagctgatcaacgagaggcgccgcgcaccgttgaaccagctgaaagtggacccgaagaatgccgcggtgatcatcgccgagcaggtcattccagagaatatcggcggctggtggattcgagaaatcggactctacgatgccgacaacgacctcgtcgcagtggccaactgcgccccatcgttcaagccgatcctgagccagggtagcggacgtacccaggttgtccggctcaacctgatcgtaagtagctctgcgaatatcgagctgaagatagatcccagcgtggtcttggcgactcggcagtacgtcgacagcagcatcctcaatgtactgccagcgacccgcaaggcgggcaccttcaccaaggtgaaggtcaataaccgcggtatcgtcgaggaaggggccaacccgacaactctggagggctacggcatcaccgacgcgctggcccgcggtgcctatggcctcggcggatcgctcgctccggccgcgccgatcgacaagatcggtatgcccggcggcttttactcctacggcagcggagtgacctcatttaccgagtattgcgggctcatcaacatcccgtactccagcgctgaatactctgctcaactgggcttcaagcagggcaccgcagaaccggcgatctacgttcgctcgaccaagcaggatggcagctggacaccgacgcgcacactctggcactcgggaaacttcaacccaggcaactacgccactaaggcgaccaccctggccggctacgcgatcagcgacgcctacaccaagaccgaaaccgacaacaagctggcggagaaagcgaacaaggccactactctggtgggctacggtatcaccgatgcgcttgggaaaaatgagaccgccgccagcgcgaccaagctggccacgccacggaccattgcgatcagtggcgcgggctcgggtagcgcagtgttcgatggaggttcgaatgtcaacatcgctctgaccctggccgacagtggagtcatcgccggcagctacccgaaggtaacggtgagtgccaaaggtgtggtgaccgctggcgcggcactttctgtcgccgatgtccccagcttgccctggagcaagatcaacagtggcaaaccgaccacgctcggcggctacggtatcaccgacgcactggcccgcggcgacttcggcatcggtacgaacatcgcccccaatacgccgatcgacaccattggcctgcccggtggcttctactcctacggcgacggtcctacatcgttcgcccgatacagctgcctggtgaatatcccctacggccgaaacgactacgccgcgcagattggattcaagcaaggcaccacggagcctacggtcctggtccgttcggtactcaacgacggaggcagttggaccccgactcgggagctctggcacaacggcaatctcgatatggtcggcgcggtggtcgcctttgcttgctccaacccaccagcgggcttcctcatcgcaaatggcgccgcgatctcgcgtgctacgtaccctgagctcttcgcgcgcatcggcacaacctacggcgcgggaaacggctcaacgaccttcaacctgcctgactaccgcggcgagttcatccgcggcgtcgacctgggccgcggggtcgacccaggccgggcgttcggctcacttcaactcgacgccctgcaggcgcatacgcacgtgtctgtcgtcactgccatcggcctgtctggcggcaccggcgaattctccggcgccgcgggttctcccggcggcacgcgggtgactgatcgggtagtcgaggtttccggggcgcgagtggcaaccgaaacgcgctcgcgtaacgtcgccgcgctgatctgtatcaagtactga

SEQ ID NO: 343053 - DNA, 570 bp, Pseudomonas aeruginosa
atggagcaactgacggtctaccacgccgacaggcagacgggagagttcctgagcacgggccatgccgagcccgacccgcgcgagcctggcaactggctgatcccggcacacgcctatctcgacgcgccgccggaatctggcgacggacaggtcgcacggcgtgctgcgggcaacgacggctgggaactggtcgaagatcatcgcggcccgatttacgcaatgagtggcggcgagcatagcgagttggttgatttggggccgatccccgacggttacaccagcgacgctcccccaggcccgttttatcgttggagcggaacggcctgggaaccggaccgacaggcagagcgagccgcgcaggaggccgaggtgcagaagcagcgcgatacgctgctgcaagaagccacgctccggattgcaccactgcaggatgccatcgatctcgacgaagcgacccaggatgaggtggcagaactaaagggctggaagcaataccgggtcgccctgaaccgcgtagaccagcaagctggctacccctcccaagtcgaatggccatcgccccccgcatga

SEQ ID NO: 343054 - DNA, 1173 bp, Pseudomonas aeruginosa
atggccgctgactatcatcatggcgtccgcgtcgttgaaatcaacgaaggcacgcgccctatccgcaccgtcgctaccgccgtggtgggcatggtctgcaccgctgacgatgccgacgccaccaccttccccctcaacaagccggtgctgctcaccgacgtcctaaccgcctccggcaaggccggcagcgccggcaccctggcgcgcagcctcgacgcgatcgccgaccaggcaagcccggtgaccgttgtcgtgcgcgtcgcagaaggcgaaaccgccgaggaaaccacctcgaacatcatcggcggtgtcaccgctggcggccagtacactggcatgaaagccctgctcgccgccgaggcccagctcggcgtgcgcccgcgcatcctgggcgtaccgggcctggacaacctggccgtcaccaccgagctggccgccatcgccgagaagatgcgcgccttcgcctacgcgaactgctggggctgcgaaaccgtctccgaggccatcgcctaccgccagggcttcggcgcccgcgagctcatgctcatctggcctgacttcatcaactgggacaccaccacaagcgccgagaagccggccgctgccgtagctcgcgccctcggcctgcgcgcaaagctcgacgagcaggtcggctggcacaagaccctgtcgaacgtgcccgtggcaggcgtgtcgggcctgagcaaggacatctactgggacctgcagaaccccgccaccgacgccggcctgctcaacgccgaagaggtcaccaccctggtccgccgcgacggcttccgtttctggggctcgcgcacctgcagcaccgatcccttgttcgcgttcgagaactacacccgcaccgcgcaggtactggcggacacgatggccgaagggcacttctgggccgtcgacaagcccatgcacgcgagcctggtgcgcgacatcgtcgagggtatcaacgcgaagttccgcgagctcgtgcgcaacggctacctgatcggtggcgagtgctggtacgaccccgcggcaaacgacgccaccacgctgaaggccggcaagctctacctggattacgactacaccccggtaccgccgctggaaaacctgctgctccgccagcgcatcacggaccgctacctggtcaacttcgccgccggcgtcaccggctaa

SEQ ID NO: 343055 - DNA, 516 bp, Pseudomonas aeruginosa
atggccctgcccaagaagctcaagcacctcaacctgttcaacgacggaaacagctacatcggagtcgccaagtccgtgaccctgcccaagctcggccggaagctggagtcgttccgcgccgccggcatggacggtccggtcaaggtcgacctcggccacagcgatgacggactgcaactggaatggaccctcggcggctgggacctggtcgtgctgcgccagttcggcgctgtgcgcgccgacggcgtgcaactgcgcttcgccggctccgtccagcgggatgactccggcaccgtcagcgcggtggagatcgtcacccgcggccggcatgaagagatcgacttcggcgaagccagccccggcgaggaaaccgagcacaagatcactaccacgctgacctactacaagctcagcgtcgacggcgaaaccctcatcgaaatcgacctgctgaacatgatccacgtcgtcgacggcgaagacctgctcgcagcccaccgaaaggccatcggaatttaa

SEQ ID NO: 343056 - DNA, 1083 bp, Pseudomonas aeruginosa
atggaaacttataaggttcgcagtgtttcggagtttattgaacgtgtaaatgaacttaggaatgaggcagttgatggtgtcttgtatcgtgggcaaagaaattcgaactggcctgtaggttcaggtgcaaaccgcttgtataagcacttttatagtgtcagcgagaggagggctttgtttggtgaacaccaactgacacaaaacctccgaaatggtgagcgccccctaaagcctagttcggtaaatgaatttttgagcaaagatcccagtagaattactgtggcggatgtcgcaacagttcaatacatcagcaaactggaatcggatgggacagttagtgatgaccttaagcgggctatcagtgattttcatcatcgccatgctataggcgaagctgagggaagcatcgccgatgcatacgtaaagtttaaggctgagcatgttgcatactacccggatggagggcacataaattgggacgttcttgctcttgcccaacattatggagtcccaacgcgtttgctggattggtcgctttctcctttagtggcacttttttttgcgctcgatagctctgagacagaggtggtcgctatatcacaattagaggataaattgggtattgatttttctgctgcgaattctcgattagcagtttcttctattgaaaatggtagtggtggagttgagcctgcttttaaagttccaaagtacgattcggctgtatttgttaactatgctagggctgaatggtttactgctgagtcattagaggaaagctgtggagggaaaccggaggatttactcgctgctctttctgtaagacatgatgatgtctatttgacgcctaattattacaatccccggttgagacatcaatcaggtgtattttcaatttcgaagaacacctttgatccgtttaagggtgatcttgtaaagattgaaatagatagaactttttccatgcttatgcgcgtggagttaataggtctaggtgtgactgctaaatctgtgtatggagatttagaaggcctatgtaaggacctgcgtttcttaaagtttggtgggttcaacggaatttag

SEQ ID NO: 343057 - DNA, 327 bp, Pseudomonas aeruginosa
atgaccatttccgagcaatccaccactgccagcaaccccaacgagggcgtcgtccagctcgacaagccgatcgcccgcggcgcgaacaccattgattcgctgaccctgcgcaagccggccagcggcgagctgcgcggcgtctccctgctcgaactgatgcagatggacgtacaggcgctcagcaaggtactgccgcgcatcacctccccgtgcctgacgccccaggaagtcagcgcgatggacccggccgacctgatggcgtgcggcgtcacggtgtccggttttttgctgcagaaatcggcgaaggaagcgtccctcgtcgcgtag

SEQ ID NO: 343058 - DNA, 123 bp, Pseudomonas aeruginosa
atggcggacctcgcgcttgtattccactgggcgccggcggacatggacccgctgggcctggctgacctgatcgaatggcgcgagcgggccagaacgcgctgggagcctgacaatggccaataa

SEQ ID NO: 343059 - DNA, 2589 bp, Pseudomonas aeruginosa
atggccaataacctgaagctcgaggtcatcctccaggcgatcgaccgcgccacagcgcccatccgcgccgtcactcgcagcagcaccggcatgggccgagcgctcaaggagtcgcgtgaccagctcaaggcactgcaggcccagcagaaggacatcagcagcctgcgcacccagcgcgaagcggttcggcagacatccgagaagctcgccggcgcccagcagcggctgcgccagtaccgcgagcagctccagggcatggacgccccgtccgcgaggttccagaagtcgttcgccgcggccgcggcccaggtcaacaagctcaaggccaagcatggcgagcagcgcgccgaactgcagcgcctggtgagccagctcggcaaggccggtatcagcaccagcaacctcggccagcgcgaaggtgaactgcgccagcgcatcgcacaggccaaccaggcaatcggcaaccaggaggcccggctcaggcgtctgggcgcgcagcagcgacgcgtagccgccgccaagcaggccttcgagaagtcccagggcctcgccgggagcatggccgccaatggtgccggcgcagccgcggcaggtgccgccatgggggcgccgatactcggcgccgccaacagctacatcgacttcgaagatgcgatgttgggcgtggcaaagcaggtagacggcgcgcgcgacgacaacggccagctcaccgcgacctactacgacatgggcagcgccatcaaggccatggccgagcgcatacccatggccaccaccgagatcgccgccctcgtcgaaggcggcgcgcgcatgggcatccagggcaaagacaacctgctggtcttcgccgaaaccgcggcaaacgcagccacggccttcgaactgccggcggacgagatcggcgagaacctcgcgcgcatcgccaacctctacaagctgcccatcaagaacgtgggcgagcttggcgacgcgatcaactacctggacgacaacgcccagtcgaagggtagcgacatcatcgacgtcctccagcgcaccgcaggtatcaccacctccgtgggtatgagcttcaaggacgccgccgcgctcggctcgacgttcctgagccttggctcgtccgcggaagtggccgcgacggcgaccaacgccatgatccgcgagctggccatcgccaacgagcagccgaaacgcttccagaagggcctgaaagccctgggcttgcaagccgacgccatccagaagggcatggcgaaaaactccaccgccactctgcagatggtgttggagtccatcaagaagctgccccaggccgagcagctcagcgccaccactcagctgttcggcaaggagttcggcgacgacgcggcgaagctcgcgaacaacctgggcgagtaccgccgccagcttcaactcgccaactccgaagccggcaagggctcgatgcagcgtgaggcagatatccgcgccgaggccctctccgcccgcctgcagatggcgaagaaccgcaccttcaatctctccgccagcatgggcgaaacactgcgaccgaccatcatcagcctggtcgagagcttcaaccaggtgctcgccaaggtcagcgcctgggtcaaggagaaccccgaactcactgggcagatactcagggtcatcgctggcgtggcggcactggcggccggcttcggcgccgtgaccctggccatggcaagcttccttgggccgttcgccatggtgcgctacggcctgacgctgttcggcctgcagggcgccagcctggcgggctcgttgctcaacctcggccgcaacgcgctgccgctggtcctgcgcggcgtgctgctgatcggcagggcgctgatgctcaaccccatcggcctggcggtgaccgccatcgccggcgcggcctacctgatctacaagaactgggcgcccatcaagaccttcttcctgggcctgtgggaagaggtgaaagccggcttcaacggcggactcgccgggatcggcaagctgatcatggacttcagccctcttggcctgttctaccgggccttcgccgcggtcatgagctacttcggcgtcgaattgccgggcaaattctccgccttcggcggcatgctcctggacggactggtgaacggtatccgcaacaagctgggggacgtgaagaaggccatcagcgcggtgggcgacaacaccgtcggctggttcaagcagaagctggggatccactcgccgtcccgcgtcttcgccgaactcggcgggttcaccatgtccggcctcgagcagggcctcgcagacggccagaagggaccgctatcggccgtgctcgacctcgccaagcaactggccgctgccggcgtgctgacgatcggcgccagcggttcggccctggccctggacacccgcccaccgctggcccctgcgggaacatccgcgcgacctgtagcggtacaaccggcaccgatcatcatccaggtgcaggccgcgcccggcatgaacgagcaacagctcgcacgcctggtggcggcagaggtggccaagctcgacaaccgccggcaggtcaacgcccgcagccgcatcaccgacaaggagtga

SEQ ID NO: 343060 - DNA, 444 bp, Pseudomonas aeruginosa
atggccctgatggcattcggcatgttcgtgttcagcctggagaccgccgcctaccaggacttccagcgccagagcgagtggcgccacggcagcaccagccgcatcggcaccaaccccgcacgccaattcctcggccgcggcgacgagagcatcaccctgcagggcgtcctgctgccagccctcgcaggtagcgtgctgagcctggatacgctgcgcagcatggcggacaccggcaaggcctacccgttgatcgagggcaccggccgcatctacggcgtctgggtcatcgagagcctgagcgagacccgcacgatcttcttcggcgacggcgccgcgcggcgcatcgagttcaccctctcgctcaagcgcatcgacgatggccgcgtagacctgctcggcagcgccatcagcagcgccgggaacatcctgaggcagattctgtga

SEQ ID NO: 343061 - DNA, 1266 bp, Pseudomonas aeruginosa
gtgagtctggtggacctggccgagacctacctcggcagcgccgccaggagctaccgcgaagcgagcaactatccacggccgatctgtcgggtagtggtcaatggcaacgacatcaccgccgccgtcgagcagcgcctcatcagcatcgagctcaccgacaaccgcggcatcgaggccgatcagctggaaatcaccctcagcgaccacgacggcctgctcgccattcccccgcgcggcgccagcgtgcaactgtggctgggctggagcgacaccggcctgatcgagaaaggcagctacacggtggacgagaccgaacacagcggcgcgccggacgtgatcaacatccgcggccgcagcgtcgatctgcgcggcgaactgaagaagaagcgcgagcggagttggagcgccaccaccctcggcgcggtggtgcaggccatcgcctcggcgcacggtctcaccgcagtgatcagcgccgccctgggcgccatcgagttgctgcacctggaccaggccaacgagtccgacgccaacctgctggcccgtctcggcagcgaacacgacgccatcgcgacagtgaaggccggccggctgctgttcatgcccaccggcaagagcacctccgccagcggcctggccctgccgcatgtgatgctgacacgccaggacggcgaccaacaccgctacctggaagccgaccgcgacgcctacaccggcgtgaaggcctactactacgagatcaacagcgccgagaagaaggaggccatcgctggcggcggggagaacatcaaggagctgcggcatacctacaccgaccagcaaagcgccgttcgcgccgcgcgcgccgagtggaaacgcctgcagcgcggcactgccacgctgtcctatacgctcgccaggggccggccggagttgatacccgaccagacgtacaccctcgccggtatcaaggcggaaatcgcggccatcgtctggctgggcggcaacctgcggcactcgttcaccccggagagcttcaccaccagcctcgacctggagtcgaagctgccagatggtgacgacgtagccgacctggccgaggagagcaccaactacaccggcatcctggcctggtaccgcgacgagaagaccggcaagcagcacaccatcactgccggcgaccagaccaggccgagacgcctccaccacctgtacgccagcaaggcgacggcgaaacgcgcggtggatcgggagtggaagcagctgcaggagcaaggctccagcaggtga

SEQ ID NO: 343062 - DNA, 507 bp, Pseudomonas aeruginosa
atgaaacgccagattcttgatagccgccgcaaggccgtgatggccgccgtaggggccttcccgggcggacgagagtgcgccgccacgcacctgggcctggagaacgtcaagcgcctcgacaaccaggtctacgagaacccgggccaccgccctctgaccgacgagcaggttcaccagttggagagcgtcagcggcaccagcttcctggccgactacatcgccgccctctacgacggcgtcttcgctcccatgccgggcaacgggccgctcgacaacctcgacctgtacgagcgttcactcgctacagacgtggccgaaggcacggtcgaccagatcatcgccagggcattgaaggacgggcagatcgacgaggcggaaatcgccgagatcatcgcagcccaccgcctccacctcgcggccaggcacgccgaggtgggcgccgtgatcaccctgcaccggaaaaccccgcgcggacagcgcctcggcggtacgggagaacacgaatga

SEQ ID NO: 343063 - DNA, 351 bp, Pseudomonas aeruginosa
atgagcctcgcagcaacccaccgcgacatgagggacgtgttcgacgaactgttccaggtcgaccaggagcggcccgcgattcgcacggccggcatcgaggcgctgcagcgcctggtgcctgtcgcccagcgcgattcggggcagagcggcgtgatcggtcgctttctactgggcctctacaacgggcagtcctttcccttcgacctgaccgaactgcgccgccttgacctgggcctgttcgacgactgcctcgcggtcctgcgcctggacaacacaccagaacaagaggtgcacacctacctgcccaacggcgacgccatctggtcggagttccgcgaacgctgggcctga

SEQ ID NO: 343064 - DNA, 573 bp, Pseudomonas aeruginosa
atgcaagtacaaacccccgaagtcggcgccgagaaggctaccacaccgctctatgacaccatcgtcatccgcggcgccatcggcaaagacatcccccgggaaatcgacggcggagaagttgtagcctggagcacaggccacgagctcgcagccctggatgcgttgcaaaagttcgtcgacaacatggccgccggcaactgcaaccaacacagccatctgacccacgaagccgccgcagcgctcaacctcatgcgccggcggcgtgcaatcggctgggcagcggacgcccccaccgagcatcccccagcgaactggaaaaccgccgtagcctgcgctgtagcaacagccttcaaggtattcggagaaaacaccgacgaagctatggatgccatccgttacatggaggcgttgctgttgacgaaagagccggccaagccaaagcccttcatgttcgtgcaactgcatgacggcgatgtgcaggactggacgcgggacgcaaaccgggccgagtcctgggaggaggacggctacacagtagccaagctctatatcgcgcagggaggtgctgcatga

SEQ ID NO: 343065 - DNA, 204 bp, Pseudomonas aeruginosa
atgtctaaccaggccgaccgccagtacatgctggcatgcgaggcccggtactggctccggcgtgggtacaccacgccggaaaaagtcaccgagctgcgagaaaccctcaagcggcggggggaaagcgccgtcgagcagttgatagaggaaatgcgccgacagtggcaggtgcggacagagtggataggtggtgaagatggctga

SEQ ID NO: 343066 - DNA, 1296 bp, Pseudomonas aeruginosa
atgagcagcatcagagccaaggaccgcgatgcggtcatccagtccctgcgcgccggcgtcgttccccgtgcaggccagcacctgattcaggtggggcgtgccggtgagctggaggcgctcatccgtgatgtggagcgcctcgcgaaaagtggttccgcgttccgcgttgtgatcggtgaatatggtgcaggtaagacgtttttcctcaacctggttcgctctattgcgatggagcgcaaactcgtcaccatgcatgccgatctgaaccctgatcgtcgtctccatgctactggcggccaggctcgctcgctgtatgccgagttagccaagaacatgtctacccggactaagcctgatggcggtgctctgcaagggatagtcgagaagttcattgcacaggccaaaacggaagccaaagcgtccggcaaagacagtgaggctgtgattcgtgagcatctcgaccaactgacagagatggtcaatggctatgactttgctgatgtaatcgcggcctattgcaaaggcttcgaagagggcaacgagcagctcaaggctgatgctatccgctggttgcgtggcgagttcactactaagacggatgcccgcactgcactgggtgtgcgaaccatcgtcgacgatgcgtcggtctacgatcagctcaagctgctcgcgcgattcgttcggttggccggctttagcgggttgatggtatgtctcgatgagctggtgaacctgtacaagctatccaacacccaagctcgcaacgctaactacgagcagattctgcgtatcctcaatgactccctgcagggctccgctgaggggcttggttttgtgttgggtggtacccccgagtttcttatggatactcgccgcggtctctatagctatccggctctgcagtcgcgtttggcggaaaacaacttcgccaagtccgggttggtagatctttccggtcctgtcatacgcctcaccagtctgacgccggaggatttctacgtcctgctgcagaaactgcgtcatgtatacgcggcaggcgtgagtgagcactatttgctacccgacgaagcattgccgctgtttatggcccactgtaaccagcggatgggagaggcctacttccggacacctcggacgaccatcaccgcattcatcaacctgctagcggtgctggagcagaatacagacgctgattggcgcaccctgctgggggccgtagagattgcaccggatcgaggtggtgaggccgatacccaggtagatacggacgatgagcttgccaccttccagctctga

SEQ ID NO: 343067 - DNA, 2217 bp, Pseudomonas aeruginosa
atgagcttgccaccttccagctctgaatcggctgggttcgcactccttgagccgcgaatccagcgctggatatggtccgagggctggacctccctacgcgatgcccaggagcgtgctatccctgcgcttttgggcgcagatcaggatgtcatcatcgcggcggctacagctgcagggaaaaccgaagccgcgttcctgcccatccttaccaacctcctgcaggacatagaaacgccaggggcggtgctttacatcagcccgttaaaggctctcattaatgaccagtgggatcgtctggcgagactttgcgatgagcttgagcttccagtcattgcttggcatggggacatctcagcgagccgcaaacatcgcttcctcaagtccccggaaggcattctgctgatcacgccggagtcgctcgaagctcttttcgtcaacagggggaccagtctagcgggattgtttgccaacctacggtacctggtggtggatgagctccatgcctttatcggtagtgagcgaggcaagcagctgcaggcactcatgcatcgagtggaaacaatcattggtcgccccctgcccagggtcggtctttccgccacactgggcgacatgatgctggccgctgcctttttgcgtcccaatgctcctcatcatgtgtcggtgattgagtccaaggggagtggccagatacttaaggttcagatcagagggtatgttgagtccaagcaggcgcacccgatacagtctgatgatgaggttttttctccggaccatgccattgcagagcacctctttcaggtactacggggcagcaacaacctgatcttccctaacagtcgaactcaggtggagtggttcgctgacaatctgcggcgccgttgcgaacaagatggtctgccgaacgagttctggccgcatcacggcagtttggcgaaggacattcgagaggaaaccgagaaagcgctgaagggcggtgaccggcctgccaccgcagtttgcactactacgctggagcttggggtcgatatcggcagcatcaagacggtggtacaaatcggggcgccgccatcggtggccagcttgcgtcagcgcttgggtcgatccgggcgccgtccgggagaagcagccattctccgaagttactgcaaggagcgtcagctgggggttggctcgccactgtcggatcgacttcgccaggggttgctgcaaagcatcgcgatgatccggttgttgatgcagggctggttcgagccacctcgtgttcatggccttcatttatcgacactggtacagcagtgcctctcggtgatagcccagcggggtggagctacagctgcagagctgtggagcaccttgatacgcaatggtccgttcactgaggtggagcagggcagcttcctcagtttgcttcgtgccctcggtgagcgcgatttgataacccaggaaacatcggggctcctgctgcccggcgtggtgggggagcgcatgattaatcactacgacttctacagtgcatttgtcagcaatgaagagttccgcctggtatgcgatggcaaaccacttggcgcattgcccatctcaaggccactgaccgtcgatcagcgaatcatttttgctgggcgccgctggcgggtcacgagcgtggacactgaggccaaggttatcgtagtgagatccgattctggtggtgcccccccatccttcgacgggcttggagcccgtgtacatgatcgggttcggcaagagatgaagaccgtcttgttggagacgaatgtctacccctatctcgatactacagcacaagagctactggctcaggcacgtagcgctttttcggaccttggactggcacattcgagcatgaccgaaagcggaggtaagacgtacctctttacctggcaaggcgattggacgaacgatgccctagccatcttgttgacgcacaccggactagccagtgagaacagcgggttggtcatcgaggttgagggggatcggacgtcgcttgaaagcaagctgcgcgagatcgtcgagtgggacggtattgatgaatccaatgttctggcggatgtacagaacatggcacaggagaaatgggattgggtgcttccgccagcgttgctcatgcagtcatacgccacgatgcagctggacttgggtggagcaaaggcattggcgttggagctggtgaaccagctccaggtgacggattga

SEQ ID NO: 343068 - DNA, 855 bp, Pseudomonas aeruginosa
atgattgtgaggacaagtaaattgctaaatttcgataagtcgtggcgtttcaagtccccgggtccaatcccgcacggcgttgtccgtgatttttatggtctgattgaaaaaattgcggcgcagggagatgcatggcgcgcagttgagcaatgcaaaaaccgcttcggcgggactggtcgaagcagcagcccggactgggcgtggagtgatttatctcggttcatggatagctcggctgagaatgcgccggtgtttatcgaggctttttggaattgctgcgtagacctcgaacagtccggcttgaacgtgccagatgtccaaattatcaacgctatcctagcggagcatgatgcgggctatgaaattcaactgcctgacttaatcgcaacgcgcgcctatacaccgatcaccgtgccgcgtttggcgccctcgttggatgaacaggcccgcgcgcttatagatgaatgcctagcggagtccgaacggctgctcgatacggggcagggccggcgcgcggttcaagaaactcttttccttctggagtcgattacgacagcctttcgaggtataggcgaggacacagtgacgattcaggggaagtatttcgggcccatcattaacgagatgaaaaagcaggggcgaggcaaggcgcaggaaaatattctgacctggatgacaaccttgcacggctacctttcatcgccgacgggaggcggggttcgccacggaaccgatctaaaagaaggcatcgcgatccagccacacgaggcgcgtctgtattgcaaccttgcgcgcagctatctcatctttttgctggaagagcacgatcagcaaaccaacggagcgtcctcctag

SEQ ID NO: 343069 - DNA, 1305 bp, Pseudomonas aeruginosa
atgcctggcttttccctggaaggattcgctgacgatatctttgctgccaaaacaaaggagtacttcaaagaagttttgtcttcataccagaatggaaattaccgatcttccgtagtaatgctctggtcagtcgcggtgtgcgacctaatttacaagcttgagtaccttattgatgtatacagggatgcaacagctaccgaaatcatcaacgagatgacccgaattcaggctcaagaacccttttcctcagcatgggaaataaagctgattgaagacaccttcttgaagacacgattacttgacgctccagagtacgaaaatctcaaatttctgcaaaagcaacgacacctctcggcgcatcctgttttgactcaggagcgagagctccacgcgcctaaccgtgaaacagtcagatccctgcttcgcaatacgttggaagatttactcatcaagccacccttctacactcagcacatcctgaatgaaatgctcacagaccttgccgaacatagagatgcattgaacgatcgccataaggttaaagggtatgtggaaagccggtacctacggcggttcaaacccacggtcgaaacctccatctttaaatcactatggaaactcaccttcaagcttgagaatgatgagtgcaatgcgaacagaaggatcaacctgaacgtccttgaagcgatcagtgatcggcaggcaggccgtttggaggagatcatcagggctgagcaagaatacttcagcaacgtcgctgctgacggtgagccgttgaagttttttgtttactacttatccaagcattcaacattacatgccctactatcggatgcggcgaagttacgtgttcagcacggaattgcaacagattccaccgcaaaaattgccggctggtttgtaaaaactgacttgtccgctcacttcgtagatcttctgcaatggatcgaaagtgacgactacccacgcctcaatgacgaacaactgaagctcatagtagaaattgaggactcacccgagtggcagcagtgggcgtgtaagctcttgggagcgtattacggaacgagcggaagcttcaacagtgctgatgttcggtttgctagtgcgatcgagccctacctgcaccttttcgatctggaggcgttactcttcacgctagagcgaattgaacgaaatggtcagacgtatggacgtggcgctgcacgtattgaccacatggaagtcaaaaaccgtctattagctatcgatcaggattttaatttcacgccctatcctaatttttctcgcaggctggatgccgagtag

SEQ ID NO: 343070 - DNA, 846 bp, Pseudomonas aeruginosa
atgatctggtccggcttgcgaatatggctggagatcagacttggggttctccagtgccttgaatcgaataggtgccgacagcagggtacgaacgaactccagggcacgtgcctgacgaccgtcagcaatcttctcgggaaaccagcgggcacccgaggtagccaggtcagtgcagggcgggtgggcaatcagcagatcccacccccagtccagcatttccaggacatccccctggacgtgttccccttcggtttccgaaggcagcagatcgcagctcacggcgtaaaaaccaacccgggccagtgcatcgcggacacgcccggagaactcgcaggcaatcagtgcggttggctgtctcataaggcagtcactccaagacgaaaggtttgtgcagtcgaacgccgggcgtgggtttcccgctgtcgtacacaacgtgccagtacttcggcggacgccgggacgggtcgtgtttcgcgcagaaggaacggggacggcagaaccagcggccatcttccagatagggcagcccagggggccggcagtccggacacggcgacgggttgtgcaatgggatggcctgccttgcggaccagcacacagagcagccgcagtccggggcgtgggtttggcgtaggtaatagggactggcggccatggctcatttctgccccctacagccacagcgatagtcttcaatcgcccgacggagccaagcattctcgatctggtcgatatcgacagtcaggccgccccaggtcacgaccctgccggaaacactgccgacgatgcccgcgaagcagaattggaaggtttccatcggcactgggcgatcactcggcatcgtaa

SEQ ID NO: 343071 - DNA, 1257 bp, Pseudomonas aeruginosa
atggattggaaaggaactgcccacccggaacagggaacgatccatgcgtcaaagagacctgaaattcaccttcgtcgttggcgaagggaaccttgcgttcgatgtcgtcgagttcgaactggaagaagcgctctgcgagcctttccgcctgagcctgaagctggccagcgacaagaacgccatcgatttcaagcaggtactcgaccagccgggcaccttcaccctctggcaggacggccgtccggcccgctacgtccatggcatcgtcagccacttcacccaaggcagctcgggttttcgccggacccgctacgaactgctgctggaaccacagttggcgcgcctggagctgtgctgcaactggcggatcttccaggagaagagtgttccggagattctccaggcgctgctcaaggaacaccgggtgctcgactacgaacagcgtatctaccacgagcacctgccgcgcgaatactgcgtgcaggccggcgacagcgatcactacctgcacgaccggctggccttcgaggaaggcctggtctactacttccgcttcgacgaacaccgccacaccctggtctgcagcgaccggctctacgtccaggagcgtatcgccggcggcccggtgctgttcagcgcccagccggagggcgacaacccgcagccggtgcttcattctttccgctacagcgaaaatgttcgtacggctcgacagacccagcgggactacagcttcaagcgcccgacctacgaccaggagcatcatctcgctggcgaggcgctcgagcatcaggactcgtcctacgagcgctacgactaccccggtcgctacaagcggagcggcgcgggccggcctttcagcgaaagccgcctcagaggacatcggcgcgatgcacgggtggcatcggtcagcggcgacgacccgcggctgatcccgggccacgcctttgccctggaaggtcatccgcgtgccgacttcaacgcctggtggcggccggtgcgggtggtccatcgcggcacccagtatgccggccaggaggaagagtccgccgacgcccctctgggggtgagctacgacctgcgcgccgaactggtacccgaggacgtcgaatggcgtcccgcaccgctgcctcggccgcgtatcgatggtccgcagatcgcgacggtagtcggcccggcaggggaagagatccattgcgacgagtggggacgggtgaaggtccagttcccctgggatcgcgagggacgtcacgatga

SEQ ID NO: 343072 - DNA, 843 bp, Pseudomonas aeruginosa
ttgaaagcctatttccatcgctggcgctcgctggtcatcctcgccctgcttctcgcgccgctgctctggcccctgcaatatttcgccgagcgctactacagcgagcagttggccgagcagaaccgccagacgctcgacctctacgtcgccaacctgctcggcacgctgcgccgctacgaagaactgccgcagatcctcggcggtctgccggtgctgcgccaggccctgcaacaacctggcgacccgctgctgcagaagatcgccaacgaggcgctggccgacatccgccgacgcaccggcgccgacgtgatctacctgctgcaaccggacggcaccacccaggtcgcctccaactgggcccaggcggacagtttcgtccaccgcaacttcgccttccgcccctattatcgcgaggccatgcagggccgcctggcgcgcttcttcggcctgggcaccacctcgatcaagcgcggttactacttcgccagtgcggtgaaggaaggctcgcggatcatcggcgtgctggtggtgaaggtcgatctcgaacacatcgaacggctctggggcaattccccggagcaactgctggtgatagacaactacggcgtggtgatcctctcctcccgcgaggattggcgcttccatgccagtcggccgctgagcgcggcggagcgcgacgagatccacgccaacatcccctacccggtgcaggacccgaagcccctgcgcctgcaacagagcgcctggctcagccagagccggacgctgccggaaaccggctggacggtgagcatctacgcccccgcaccctcatcgaacggccggtgcgcagcgtcctgctga

SEQ ID NO: 343073 - DNA, 1047 bp, Pseudomonas aeruginosa
  misc_feature (296)..(305): n is a, c, g, or t
atgccctttgatattgtctggttgaaaagtatgcgtattgtaggtggaggtgtaagcgagcggtccttatcttttaaaaatctgataggccgtgcagggcgtttgtctgatgaggaaaaatttgattacggttatgtctttactgaaagccctaagctttactcgcagcgagttaatgaaaaatattctttaagcgatgtttcggtaattgactctgactttgatggtgaatcgccagatgttaaggagttgatagatgcgattcgcggagaaacattcgttgatgaatacaattnnnnnnnnnncaatttacctttaactaaagtggagaggctttctgatccgagcgtattagaagcttgcagggctgttttagatcttctctataaaggggggagtataagggcaagtttgtctggagaagataagaggccagagcgggataggataaaaaatagtttgcagaaaatattctcggcttctattgatagagatttgctgcctggggaagaggcagtttttaatacggctattatgatattcttattagcggtaggaggtaggaccttcagagaaattgcgggtatccgatacagtggtatttcgcgacgagacgaaggtcaagtaggcgaggccgcatttgcccaacctgcgaacaagttgcctgatagtaatctgactagaatgtactctttgtttagcggagttaaagcgaaagatgttagttatgatgctgttgtttttgatacgtatgactacatggatcaggtgatttctttttcgttgactgacatattttctgcttcttttaaaatctatggaaggctaactggtgactctcggtcagagaaaatgattgagctattgaggtttggtacaaataacgtggtgcatatgctactgatgcgatatggattttctccagaaagtgttgctgagataacaccttatataagatttattaatgagagggagattgttttttcagaggaggttaatgaagctccgcaatatataaaagatatggtagattggtatcttccttga

SEQ ID NO: 343074 - DNA, 174 bp, Pseudomonas aeruginosa
atggccctgaccatcgtgattggcaatcgcaatgactcgtcctggtcgctgcggggctggctggccctgcgcatgagcggggcggcgttcgacgagatcctcgtcccgctggggcggcccgatacccgggagcggatcctgcaatattcgccgaccggcaaggtgccctgctga

SEQ ID NO: 343075 - DNA, 2097 bp, Pseudomonas aeruginosa
atgaacctgcgccagcgcctcgacaacctgcccgtagggcagaaactgctcgccgccctgctgatcctgctggctaccgtgctgctggtggccaacctggcgttcatcagcgccgcctactggatttcccaggagagcgtcgccccccaggcgatgcagaccatcggccggctgatcgccaacccggcgctcagccagccggcactcagttcgccgcagaccgccgaggtcctgctgcgccagctcaacgattaccagccgttgcgcgccgcggccctgtacgacagcaatgggctgatgctggccgacctgcaacgcggcgacaccctcaagctgccggcccgcctggaccgcctggagcactggaggcgcggcgagtaccgcctcaacgcgctgatcgaactgccccaggaaaacgcccgtcccggctacctgctgctggtggccagcggtgaactgccgagcgcgttctacaccggaaccctcaccgccagcctggcgatcctcggcgtcagcgtgctgctctggctgctggtggcgcagcagatacgccgcctgatcacccggccgatccgcgatctcgaggaactgtcgcggcaggtcacccgcgaggagaactacgccctccgcgcccagcgcggcaacggcgacgagatcggccgcctggccgacgcgttcaacaccatgctgacccgcatcgaggcccgcgagcagcagctcaagcgcgcccgcgacgatgcccaggaagcggtcgagcaggcccagagcctggccgaggaaacccgccgctcgaaccgcaagctggaactggaagtgcaggtgcgcagcaagatcgagaagaagctcaccggtttccagcactacctcaacagcatcatcgactccatgccttcggcgctgatcgcggtggacgagcaactctacgtcacgcagtggaaccaggaggccagccagctttccggcaccagcctggacgatgcggtcaaccagccggtgttcctcgcctttccctcgctcaagccgttccttccgcagctcacccgggctgccgagaagcacagcgtggagcgtgtcgaacgggtcacctgggcgctgatcgacacgccacgccactacgccctgaccttctacccgctgatgggcggcaccggccgcggcgcggtgatccgcatcgacgacatcacccagcggctgagcctggaagaagtgatggtgcaatcggagaagatgctctcggtcggcagcctcgccgccggcatggcccacgagatcaacaacccgctcggcgcgatcctgcacaacgtgcagaacatcaagcggcgcctgtccccggagctggcgaagaacgtcgagctggcggccgaggtcggagtgccgctggaagacatcaatcactacctcgacggccgcgacatcccgcgcctgctggaaggcatccagcacgccggctcgcgggcagcgaagatcgtcacccacatgctcgccttcagccgccgcagccaccggcagatgaccgcttgcgaactgcccgcactgctcgaacaggcggtggaaatcgccggtaacgacttcgacctggccgaaggcttcgacttcaagtcgttgcagatcgtccacgagttcgaccccaacctcggcccggtgccggtgatcgccaacgaggtcgagcaggtcctgctcaacctgctgaagaacgccgcccaggccatccaccagcgcgacgacgaagaggaaggcgaacagggccggatcgtcctgcgcacgcgcctgacgccgccctgggcggaagtccaggtggaagacaacggcagcggcatgcccgaactggtgcgcaagcgtatcttcgagccgttcttcaccaccaaggaagtcggccagggcaccggtctcggcctgtccgtctcgtatttcatcatcaccaacaatcacaagggccagatggaagtacgctcggaactgggccgcggcacctgcttcagcatccgcctgccgctggaaagctccgaagcggtcgccccggcacaagccaaggccctgccgcccgctctgccgcaacccggtagcagcctgcggcggggcgacgaagaggaaggttga

SEQ ID NO: 343076 - DNA, 711 bp, Pseudomonas aeruginosa
gtgcgggagcgtggcgacttggttaccgtttccttgccaatgtcagggcgcgatggagataccttcacggcctatctagagcaagtgccggcaggctggaagatatctgacttcggcaacaccatgatgcgtctgagctatgagaatgacttggcgaagctcttcaccgggcctcgagcacggctttatgaaaccatccttaccgaggcaggacttagggacgacgatggcgaattgtcgctgaccgttcccgcagacaagctgagtcgaggacttttttccctggctcaaggcctgtccagggtcgaagacatagcgctctggaccaggtcacgtgttgagtcgacgttctatgacgatctccggcgtgtcctccgggaggtagtgaagtcaagcgacctggaagaaaactacttgatcccgaatcttcctgggtccgagaactacccaattgactactgcattcgcactggcggtcgccccctgttcttgtttggcgtaaataacaaagacaaggctcgactggccaccattgtgattcagtatctgcagcagcatgacgtgaaattcgactctatggcggtctgcgcagatatcgataccctgccatcgcctgaccgacatcgcttgatgaatgccgcaaatgatgtagttccgagcataagggacgtccagatcatccatcagaaaatccggcaccgaatgaattaa

SEQ ID NO: 343077 - DNA, 816 bp, Pseudomonas aeruginosa
atggtgcagatacctacagctgaagagttctttcagctttccatgctggaagaaaactacagaaaaaacgttcgcgagtcgcttaggtgtatagagtttcctgaagacgcatcaatgcttaaagagtctgacttcaatcgccttgccgtcgtcacggctaaagccagaaccgacgttttccatgaattattggaagcgtccacagcatggcaatggctagccgaacaatcggcctttgaccaagctatgcagtcaatgaccaaaaagtatgtacctcaagaccctaaggaccgaatgaaaaggctccttaagcaaagtgctacccgggccggaaatttctctcaccacgccgattggtatgcagcgcgcccaagtcagtacatctactatctggctggacttgcaacagcagcagataattttctcactggtcgaagtgtaagggcggcaacagaaggccgaagcatttcactgaagatgcaagcgctgcttcttgagtttcagaaactcgggaccagtggatggatttcatcaagtgaggaggaaattttaaccgtcaagacagataaactcttgttgtaccttcagcggataagtccaccgcccgcaatatccagaagaaatgacagcgatttaggctccaggctctttgcaacagaacttatccaactaaatcagagagtttactcagcaacacacaagcgagcagtgtttcaccttatgggacttccgctgtttgagcgtcctctagaaatgcgcacaatcgagaggctagccaaagcagagagggagcgaaaaaagaaaatcacgacataa

SEQ ID NO: 343078 - DNA, 225 bp, Pseudomonas aeruginosa
atggcaagtattaccagcactaccccgcccgctcgtcgcttcatcaagcgtcagaccgtcgaggaaatcaccggcctctcgtgctcagaaatctaccgccgcattgctactggcaccttccccgcacaagtcaccctcggtccgaagtccgttgtttggattgaggacgagatacacgcgtggtgtgacgcacgcattgccgaaagtcgcggtgaggttgcttga

SEQ ID NO: 343079 - DNA, 726 bp, Pseudomonas aeruginosa
atgcaagtctctgatcgccttaaagaaatgctgcggctgaaggaatggactccggcggaactggccagacgctcgggggtgccacaaccgacagtgcaccggatcatcacgggcgcctctagaaacccacgaagagaaaccattgatagcttggcaaaggtccttggctgtccccctgaacacctttggtcaggtaaggcttcagatactcaatccccagcggaaagggagttctactctgaaccagggcagatagggcgagttacagaatgggacgacgtggcttcaagcgaaggtgatgaggtaaccattcccttcctccgcgaggttgagttagtagcaggccatgacggcgctcactcagcgggctccgagtcgcgtccaactcttcgctttagcaaaagcaccctaagacggcatggagtccaggcacaggaagcactgtgtattgtcgtgaggggaaacagcatggaaccagtcctcaaggatgggagcaccgtcgcggtggctactaccgagaaaggggtgatcgatggcaagatctatgccctcctacatgatggtttgctgagagtgaagcttctgtaccgccttcctggtggcgggattaggctccgcagtttcaaccgagacgagcatccggatgaggaatacactccgtccgaaatggcaagccaggaactctcgatcatcggaagggtgttctggttcgcgtcattcatctaa

SEQ ID NO: 343080 - DNA, 345 bp, Pseudomonas aeruginosa
atgtcacagcaaaacaccaccacgcaacccctgaacaccatgaccatggctaggggcatctacttcaacctcgacgacgccgagagcctcttgtgcatcagggaggggcagaaagttgatgaggctttgaaggtcgctcagaccctttcgtccggagtgcatcaacttgcacttcggctgagcgctgccgttgatgatggaaattcgactttcattgcggagcttgaggctctagctctgctcagttgcatcagttccagcttggtttctgcttcccgctgcagtgtcgcggcccaatccgaacgttacgaaaacgtgtcgcgacacaaaggcggtgaagcatga

SEQ ID NO: 343081 - DNA, 249 bp, Pseudomonas aeruginosa
atgagctcgctcgggttgaacgtgtctccgctgcctcccatggagtttttcgaggtccacccttcgctgactatcgaagccgctctgaggcaggcaagcaatatcaatcacagcgtttcggatctgcttaaagcgtgcaccgagcgcggcgagctgatgaatttagccgctctcgagctttgctctcggttggctgccgaactggttgacgcctcagtcgaggctctgcggaaggaggctcagcaatga

SEQ ID NO: 343082 - DNA, 723 bp, Pseudomonas aeruginosa
atgattaacctgaccaccatcggcggccagcccgtcaccatgagcagccgcgagatcacggagcttaccgggaagcagcacaagcatgtgatccgtgacatccgggaaatgcttgatgcgctggaaaaagatggtccagttttgggccatgtccgggaggacaaggacagccgtggttacacggagaatttccacctcgaccgcgagctgaccgaaaccctggtcaccggctatagcatccctctgcggcacaaagtgatccgccgcctacatgagctcgaagaacaggtagcccaaccagctattccacaaaccctccccgaggcactgcgcctcgccgctgacctggcagaggaatgccagcagctcgccgccgagcgcgaccacgctgtcaagaccaaggcgcaaatcggcagccgccgagaggctcaggcgatggccaaggcttcctcggcagtgcgccaggtccaacgcctgaacgacgaactgggacacggcactcgtttcgccactgttacggctgtcgagatcgctgctggcgagaaattccccatcaatgcttacgtccccctgcgcaagtggtgccagacctatggcattcagcctgaggacgttcctgaccggcgttatgggaaggtcaaggcatggccggcagctgcatggctggccgtttacggcatcgatctgacgttcctcttcggcgcttctggagcacaagcatga

SEQ ID NO: 343083 - DNA, 234 bp, Pseudomonas aeruginosa
atgagtgtcgccaagactcgccccgggcgaagtctccccagtcacgacggccgcccagtgatcgccgggccctggccttcctaccgccaattccgcgacctgcctgagcgtgagcgctgggtgctctacggacacgccaaagcgtcccgtgaatgtctcgaagagcaggggctagtcatggcggaatcctatgacgcctttgtaaggcgtgtgactgaggagctcgacatatga

SEQ ID NO: 343084 - DNA, 264 bp, Pseudomonas aeruginosa
atgaacaacgtagttcatctgcccgttcaaccgccgacgatcagtcagttggaggctatgtccagtgacaccttggcttttcgctgctggatggatgttgccatggtgtttgaaaccttttcgtacctgggggcaagccgatccgagctcgacgaggcctatcaccaactgggtgaggcgtcactcgcgttgagcgttcttgccgccaggctgaagggcgtccagcgggggcaactgccagacctagttaggggtggtgagtaa

SEQ ID NO: 343085 - DNA, 543 bp, Pseudomonas aeruginosa
atgaaaaatcgcagctattccccctatttctctaccgtctacgaccaatcagaacccgcgggctacatcggaaggggaacccattactccatattgagctgtgctcaatggtgcgatgaacatatggttccgcaccccgatcactcagccaacattcaaaaattcgctgtcatttgggatgaggaccatgacgagcgaattatcgatgtgattaacgcggggtacttcagggggctactcggcccggtcaagttcattggggaaaggaaaggttcgctgaccgtccttgtcgaccaagccttctgggccgtatacgacaaagaggcatacctgaaggaatgggcacatatagcctctaatgtgaacggcgattactggccggcgtatgtctacgccttcggcgaccctgatggcgaaccgatgatcatccaagatgatctggagaatacttcaacctatcttcggaacatctggaatcagtgggatctgagcgcggcacacaggaagcctgccatgcatgaatacgaatctctggatgaatga

SEQ ID NO: 343086 - DNA, 402 bp, Pseudomonas aeruginosa
atgaaagcacgccgcccgcacatcgttccccttccccatcaagccataaccatcctgcgccagatccacgaaattaccggccggtatgagttggttttcgcaggccgcaaccatgccaatcggccgatgagtgagaacaccattaacaaggctctggccgaggctggctacaaaggacgccagaccgggcacggtttccggcatctgttcagcacggagatgaacaaccgaggcttcaatcgtgactggattgagcgccagctagcgcatggagatagagacgagatccgcgacacctacaaccacgccagctacctcgagcaacgtcgaaggatgatgcaagactgggctgactccattgaacaattcaactcaacgataagcctaatcacagctagctag

SEQ ID NO: 343087 - DNA, 690 bp, Pseudomonas aeruginosa
atgggaaaagccgaacgacttgaactacgccttgatgaagagctcgtcgaacgtatcgacatctggatgaatgagacgggccaagccagttcccgctctgatgctatccgtcagctagtgggcatcggcctcggcacgatgacgggcaagagtattcacctcacggatggagacaagctgaacttcatgatgctgcgagacatcatgaagcacctgaatatcaagaatgccgaaaccgatgtcgattttgtcgccgagaccatctatgggggacactactgggctccaacgtgggagatgcaggggttgttccatacacacgcagatcgacccgcagacgttactctggtagttgatacgctggacatgtgggacttcatcgaaagcagcatcgaaaagctgacgccagaagaaactgagcgcctaaaggctgcaaaccatggctacctgcccaagttcgctggcttcgacggcaataacgagagctctttaatgagcattgcccgcttccttgtcgaaaaaatggatcgtttttcccgattcaagaagcgtgacttcaactcgcactcaccgaccgccgctcgctatagccgcatgagcaaagcgttccaaccgatccgggcgactctaggctttggtcgagacctcggcgttgaccagatcattgagttgctcaaggtcgagcgctga

SEQ ID NO: 343088 - DNA, 201 bp, Pseudomonas aeruginosa
atgcccagccgaaccatcgaagagcagttcgaccgtgtcgaggagttcaacagcctcctcggcgcggcggagctgaatgccgctaccacctgggaagaagagttcaccgccgacctccgcagcaacttccagcgctacggcgcccacacctacctcagcgacgcccaactcgagcagttggagcggattgccaacgaatag

SEQ ID NO: 343089 - DNA, 432 bp, Pseudomonas aeruginosa
atgtcatccatcctgcgcctcgaccgcctgcgccagttcatcggcgagctggcgacactgctcgacagccgtcccgacgaatccgccctgctcgcccaagcccaccccctgctggccgagctggtgcgccaggacgactggctgccggaagactgcgcccgccccgatccacagcgctaccaacagtacctgctgcatgtcgactcacggcagcgcttctcggtggtcagcttcgtctgggggccgggccagatcacaccggtacacgatcatcgggtctggggcctgatcggcatgctccgcggggccgaatactcgcagccgtacgccttcgatgcggggggcgtccgcatcccagcggagcccgtcgacgcctggagcccggcgaggtcgaagcgctgtcgccacgcattggcgacgtgcaccaggtga

SEQ ID NO: 343090 - DNA, 951 bp, Pseudomonas aeruginosa
atgagtaccaaggaagaattgattgaagatgctctgcaagttatcttatctttggggttgccaaaagctcaacataacgagcgatcagccctatgcctgctggcaattttaaatctaacaccagggaaaacttggagacaagcatccaacccactaatcggtattactccgatcatggactggattcgcaagcagtacgaaaaggattacgcgccaaacactcgcgagactattcgtaggcagaccatgcatcagttctgcgatgccggattggcgctttacaatccagactgtccgacgcgtccagtgaacagccccaaggccgtctatcaggttgagccatcagcgctagaactgttgagaacattcggcacgccgacttggcatgatgcgctagccggctacatggtcgaacgcgaaaccctcattgctcgctacgcgaaagaaagggagcaaaatatgattccggtcgagattgctcccggccagaaaatcaatttaagccctggcgagcatagtgagctgatcagagacattattgaaagatttgcccctcgattcgctcctggcagcgtccttgtttatgccggtgataccggcgacaaaatgggttacttcgacgctacactccttggtgagctcggggttgaggttgattcgcacggaaaaatgccagatgtggtcttatacttcgcagagaggaattggcttttattagtcgagtcggtaacaagtcatgggccggttgatggtaaacggcatgaagagctggcgaagcttttcaaaggctccacagcaggcttggtttatgttacagcgttcccaaatcgcgcagtgatggggcgttatctcggcgttgttgcttgggaaacggaggtctgggttgctgatgcaccgacgcacctgatccacttcaacggtgttcggtttctaggaccatacgactcgtaa

SEQ ID NO: 343091 - DNA, 1479 bp, Pseudomonas aeruginosa
atgaccagtattgtttctctagatcacgtcgattccgtacgccgtgaagtcgcgcctaaaacagacaggaaactgaagtcagcacttggtcagttcatgacgccatcaagcgtagcgagatttatggctggcatgttcccacctagctctgtcgagaaatgtcgtctgctcgatgccggggcagggatgggggcactctcatgtgcatttttggatcgctggaaagcaggtgagcataagttcaagcaggttgaagctactgcgtatgagatagatgagaagctcagggttcatctgtccaatcatttggctggatacgcagatgtgactccgacggtcgtaggcggtgattacattgagctgactgctactcctgattttgtgtcgccagggtacacgcacgcaatactcaacccgccatataagaagatcaataccggctctgctcaccgtctcgctctgcgaacgattggaattgagacggtgaacctgtactcagctttcgtggcgctggctgtagctcaaatgtcgcccggtgggcaggttgttgcaatcattccgagaagcttctgcaatggtccgtactacaagccatttcggaaatttgttctagagcgcgcggcgattcgtgatatccatctgttcaactcgcgaagcacagccttcaaagatgatgaggttcttcaagaaaatatcattattaggctggagcgtgacggtgagcagggtgatgtgaatatcacaacatcgactgatgatagtttcagtgacctcgttagtcatagccattcattcaatagaatcgtttttgatactgacccagaacgattcattcatgttccggtctcgccagaagagagtgctattgagcagtccaaaactgtggctttttcgccagaagatttgggtgtgaaaatctctactggacctgtggttggattcagaatgcgatccctgttgagagagttacctgagcccggcactgtgcctcttctatatccgaatcacttcagtagcaatggactgggtgtggtatggccaggagagagtcgcaaaaagcccagtgcaattctgcgtaatgaggaaacggagaagtggctgtacccgaacggattctactgccttgttcgacgcttttcttcgaaggaagagaaacgccgcgtcgtggcaagggtgttggatcctagtgaaattggtgacagccccatggtgggcttggagaactacttcaacgtttttcatgacaagaagaaagggctctctaaggagcttgcctacggcctagctgtctacttgaactgcactgccgtcgatcagcagtttcgtcgcttcaatgggcacactcaggttaacgcaacagacctgaagttgatgaagtacccgagtcgtgagactcttctcggtcttggctcttgggctattaagcaaaaggaaattacccagaaaattatcgaccaaaaaatggaagaagttttatga

SEQ ID NO: 343092 - DNA, 789 bp, Pseudomonas aeruginosa
atgagcatttccaaacgactggccgagcgcctggcgccctgggcgctgccgctggtcctgctggcggtgtggcaggcggcggttgagttcggctggctgtccagccgcatcctccccgcgcccagcgccgtactcgaggccggctgggcgctgctgcgcagcggcgagatctggcagcacctggcgatcagcggctggcgcgcggcgatcggctttctcatcggcggcgccatcggcctggtgctgggctttgtcaccggcctgtcgaagtggggcgaacgcttcctcgacagttcggtgcagatgatccgcaacgtgccgcacctggcgctgatcccgctggtgatcctgtggttcggcatcgacgagtcggcgaagatcttcctggtcgccctcggcacgctgttcccgatctacctgaacacctaccacggcatccgcggcatcgaccccggcctgctggagatggcgcgcagctacgggttgtccggcttcgccctgttccgccaggtgatcctgcccggcgcgctgccgtcgatcctggtcggggtgcgcttcgccctcggcttcatgtggttgaccctgatcgtcgccgagaccatttccgccagctccggcatcggttacctggcgatgaacgcccgcgagttcctgcagaccgacgtggtggtcctggcgatcctgctctatgccgtcctcggcaagctcgccgacctcgccgcccgcggcctggaacgcgtctggctacgctggcacccggcctaccaggtcaagggaggtggcgcatga

SEQ ID NO: 343093 - DNA, 825 bp, Pseudomonas aeruginosa
atggtcagccagagcctgcgactggcccggcgagtctcgcgccgggcgtggcgactgcgcgtgccgggcgcctggcgggcctgggccttgccgctgctggcactatcgtcgtgggaggcgctggtgcgcctgggctggctgccggcctaccagatgccggcgccgagcggcatcctgctgaccctggtggaactggctcgcggcgagctgtgggggcatgtcggcgcgagcctggcgcgggtcgccgccggcttcgcgatcggcagcggcctggccctggtggtcggtacctgggtcggtctcagtcgtcgcgccgaagcctacctggagccgagcttccaggccctgcgggcgatccccagcctggcctgggtgcccctgctgctgctctggttcggcatcgacgagacgccgaagatcgtcctcatcgccctcggcgccttcttcccggtctacctcgcgctggtcgccggggtacgcggggtcgatcgcaagtgggtggaactggggcggctctaccgtttgtcgcgcttcgccctggtccgccgcatcctccttccggcggcgctgccgaacctgttcaccggcctgcgcggggcgctcagcctgagctggatgttcctcgtcgcggcggagctgatcgccgccacccagggcctcggctacctgctcagtgacggtcgggaaacctcgcgtccggacctggtgatcgccgcgatcctggtcctggcggccctcggcaagctcagcgatggcctgctccgctcgctggagcgccgggccctgcgctggcgcgacagcttcgacggggagggcggcgcatga

SEQ ID NO: 343094 - DNA, 522 bp, Pseudomonas aeruginosa
gtgaactccggtggcgtaccctggagcgcggcctacatcgataccatcggcgagccgaccgcggacctgcgttccaacatcgccgccgaggcgcgtgcgaagatcgtttacgaacgactgatcaacctcaccgacgatcccggcatcaaggatgcgctgaccttcctcatgacccgcgagctggcgcaccagctttccttcgaaaaggccctgcactcgatccagccgaacttcccgcaaggcaagctgcaagggatgccggagttcgcccggcgttacctgaacatgtcgcgcggcgagggcgacacgcgcggttcctggaacgagggtgatggctgggaatacgtggaggcgccacagccggccctggatggaggcgacggcacggccagcgtgaacctgtccgagactgagcaggaggtgttgcagcgaatggcagaccgcacccgctccgaccccatgaccgatccgctgacaggtgcggacctgggcgctggcgcggctgccgacaaagcgccttga

SEQ ID NO: 343095 - DNA, 315 bp, Pseudomonas aeruginosa
atgaagaccacagcaatggaacagaccgaatcggtcagtgatgtactgtgcgacgtttgtggcgacagcacgcgtgtggaagggtatgggttgcaatttggcactctgcgcgccagctggggttatggttcggctcatgatggcgagcgctacgaagtccatctttgcgagccctgctttttcaggacgatttccggcctcaaacgagagcgcatggtgaactttatgttcagcgatgaggagcaagaaatcagcgatttcgggcgcgttgatcgcgatgattttttcaatgacggtggtagctcagcggcctga

SEQ ID NO: 343096 - DNA, 2823 bp, Pseudomonas aeruginosa
atggctacccccagcgacgactgggcgcagttaggaaatgcctttctccagttttcgaaagagacacccgccgagcaacttgaagcgttgggtatctcgaaggatgaagcagcgttgtttgcagctgcagctttctactttggagactttccagcgtccgcctgcctggccatgcggcagtcagctcggccatctgatccacagagctcatgggctgcgtgctatgacttcctggctcgtccgagcaacctgggctcccaaactgcaatcgacgtgcaagaacaccttcgaagtggggacttggtcggtcttagcgacaaagtagaggcgagcactatcgcagcgcagaatgcgttggcggatggaccggatgtatgggtggctgcggccttgctcaaccgactattggcccgcttcgagagatcgaatattcgggctgtgctgccggagggaaaaactgccttctggacccctctcatcaattcctttattgatcgtaaaccatcgacttgggaattctttccctctcagatacaggccatcgagagaggattgctgggcaacgccgagagctattcgctacagatgccaacaggggctggcaaaaccacgctctgcgagactctgctgtattggcacctgaagcgaaatccgacccatgtcgcgattatgatggtgccgtaccgatctctggcttcggaactccgaaactctctggtgcgtcagctgaaccgattggggatagcggcgcgctgtgcctatggcggcacgattccatcgggagacgaagtgcatggccttgatcacatcaatgcgctgatcgcgacccctgagtcgctgtccggaatactcagtgctgacccagcattcgcccagcggatatctttggtcatttgcgatgaagggcatttgctcgacagctcgggtaggggtattggcctggagctgctattggcgcggatgaaagcacgcctggctaatccgatccgtttcgtattcatgtctgccatcattccgaacatcgaagaaatcaacgcatggcttggcggcgacgagaatactgtcattagaagtacctatcgaccggctatcgctgaattttccgttcttcgatcctccggtaccggggtaaacaagtccgtacgtcttgacatgcatccgcatgctcagcagcgtcactacgcgatccatggattcttggatcggagcagctttcagtacgtgaatccccaaacgggacgcacaaagacctacaccttcacgtcaaccaagacgctggccgtgggcgctgcgagaaaggtgttgtcgatgggaacgacggcgattttcgccgcgaacaagcgtggtaaccaaggtgcgatcggcttggcggaggagctcatcaagcagctcgagtgcccgctaccattacccaggcctgtagattatgcggatatcgaaacactccgaacacgcattgactatctcgaaactgaattcggtgcaggttggatcggcgcgatgtcgctgcgcaatggtgctgtactgcaccacggtgatatccctcaagagacacgagaggttttggagcagctcttgcgggagcggcgtatccaactggtcatctgtaccagcacccttgcggagggggtaaatctaccgatccgctcgcttgttctttattcggttcagcgacgcgttggcagcggacagccggagaacatgctagcccgtgacatcaagaacctggttggccgagccggtcgtgccggcgcgaataccagaggcttggttatctgcgcaaatcccgatcagtggtggctagttcagcccgtcgccactgctgctgcaggagagccggtgagaggctcactgcgtaacttgatcgaaaatctagagacattcctgagatcacaaaatctcgctctcgataaccaattcttggagtaccaggctgtcattcatccgctaattgatggggtggatgcaacgcttatcgagttgattgcggaagagatcggagatgctgaatttctgaggcaggctgccgacctgtctgaccatactttcgcggcccatcagcttccccccggctccgccgttacgctgcgtaaagtgtttgagttacgagcccagcgcatgatcgcactgagggccgatggcaagatcgcctggctgcgagatactggagccaaggtgcgccttctggacttcgtcgaacaggttctgctgccaagcagggtggactggatgagccctgtcgatcccgtgtcagacgagcttgtgtcggcgattctggagtgggcctggcaagatagagagctcaaggaagacgtgcgtgtggcattccgactagacgatggccaggatcctggtagcgtgaagctcagtttcttcgaaatcattcggcagtggctacatggcgcaacgtttgcgcagatcgcccaatcaacgcagattgatgtagacgacatcttgggaatccatactcgtgcgatcacctatgcgttacaaacactggtcgagcagggcatctcactcctttctcgactcttgcttgaacgcggcattgaggtgaacgaaggggtgccggcattcattgagcatctaaaattcggtgcaccctcaagtatcggagttttgcttgcgaatgcgggggtgcggcatcgaaaagcttatgtcgaattgggtaatgcgatgcggagtctcgccattccgatcaactcagcgaatgccaagtcagtagcgttgcagtcgcttgaagctcactcagaagcatggcgtgacgcgttgggtgaattcgttttctccaacaccctgaccgatgtcggcagagtcgattga

SEQ ID NO: 343097 - DNA, 726 bp, Pseudomonas aeruginosa
gtgctggtcaggatgactgcccagcaggtggcgctcctagagaaggccatggccgagccgttgcgccgatgctacatcaccgatgaggtgcttcaggctgctgcggatcgccatagtctcaccctttccgatgttttggctggaaagctcccggatgccggggcaaccatggctggggatttcggcgaggtgctcggctacttttaccagtcagccatggagtatccgggaaacgccataggccccaagaaatggcggctcaagcaggacagaaccaaaccggcgcccaagtcggatgtcattcacttcctcatgccccaacgtcctgccgccagtgctgctgaccaagttctttgctctgaggtaaaggtcaaatctacttccgcctcctccgatccaatcggctctgcaatcacagactgcgcaaaagatcgcaccagtcggctcgcgagcacattggtgtggctacgtgagcgtgccatgactgaggatctcggtgacgtcgacattccgcttctcaaccggtttatcaacgcagttgatcatccgcctgcttctcggcgatacagagctgtcgctgtcatctgtgagagttttgttactgctgaactcagcaatgcgcctaccacggccagtgacgattacacactcgtcgtgatctcagtgccgaatctgcataccacctacaacgcggtctttgaagccgcgcgagcgtcggtacgttga

SEQ ID NO: 343098 - DNA, 3330 bp, Pseudomonas aeruginosa
atgatccctagtcaaatcgctgtctttataggctctccgatcgagcatgagtcggagcgggctgtactccttgagctgctgcgattgctcgaggagtccggcgagaccgccacagttatggtcaacctaaatcttaaagggcggcagctagacttagtggtcgggacggatcgtctaactctggtccttgaagctaaagccagtacggtgccgctcagcggaacaacaaatggcccatggatcgctcatacccgctcagggcgctcgagaaccacgggtaatgcctacgcccaggccctgggcgaaaaaaacgctctctgcagcgctctccgcgattttctaggtgaggttgaagggtatccagatacccatgtggtgttcgtccccgagctggcagaaggctcacagctgtcgtttgatttcaaggtcagctatggagggataggcgggctcgctacacaactgaccggacgttccgagctccgttgctctgccgaccaatggcgcgcgtttgctttacggcatggccttgaacaagtgttcgatcttacctgcgccctagatcctcgctcgctcgatgcgcagcgaacacttgcgcggtacgtcgccgcgttcaccgctacatatgcttcggcagcagccgagtacaaggcggatcgctacgacgttgacggagagctcgtaggtttgccattccttgagcatctgctgcaggaggctcgtacagaccttctaattcaaggaccttcaggctgcggtaagtcactactttcggttgtactggcaaatcggttgtgcgccaaagatgtgataccgatcatcgtggagggaaagctattcgagggacaacttgcccttgcgctggagcgcgaagcagcgttgctggaagtaccatcagccaagagtctattgtctgcagttcgtacactatcgcgaccaatcgccataatcgtggatggctacaacgaatgcccttccagcttgaggtttaagttgatccgggcgctccgcgccgcttcgatcatgtatgacgcggcaattgtcgtaagttcgcaaattgagatcgacagacctgatttgcttccgcttcggaaggttaccgcttcagttccgagccatgatctcaaggtcgaaattgcgtcccttgatgccacctctgctgagttgctcgctcctctactgcaaacaattacttccggtatggaagccagcctcattggtcaaattgggcgtgaagttaaccaagttgcgagcagatcagcgttatttgacggatttgtccgaaggcgcctcggagctaacgcgagcgagggcgtaaccctcttgtgttgcgttgcggaactcctgttcgaacgcatgacttttagcttatccacgcgcgaggttgaccgcatcctagctagggaaagactcggggttgaggttctccaggaggttctccaggcgcgactgctgatcttgcgaggagagcgcctcagctttgtccatgaaatgtacctcaatgcattcacggccgagtctattgtgcggcacgctaattcggacttcgacgcattgactcgggcactggcgttgccacgattcagtgagctgcgggcatttgtggccggcgctatcgaggatcgggagttgctcgcccgcttgattagcacgactacggatgcgcaattgctgaaggcgagcatgaaaggagaatgtggaaacgacgctaaatggttcatgatccaaggattgaacgccgtaatacgcaaactgcggagtgaggtcgaaacggttcgtttcttcattgctccggaccagctctggaagattggcgttgaaccctccagttgcatagcatggacagagcatgaacgagcgatgctgtctgctttgcccgccgcattggcgctcgatcagtactcacgggagttgctggatatcttccgattgcttgatcagacgctggatggagagcgagcgaggcttcgaggtgaggcaattgaaaagggttttaagcagctaagaaccagtttatttgctgttgcctatgtatttggccagggcgaccttggaatttcgcttgtcatgtcggttctccacaacggtggtttagagcgcttttcgcagcttgccgagctacaagcgaacctgcggtacatatggctaaacgcggctacaccgggacaaatctattttgctctggcgttgtcgcgcgagacctacaagctggagcgtgacattctgaagatggcggttgaccaaacgctgccgctattcgaaatcgagcgctggaagtatctgccttatcacgttcagctagatctcatgcatttcgtgcactttcttccgcgggatgacattgccctgcgagagaagctatcgaaggcgctcgaaagtctgcttccaacgctggatcccgttctggcaggcacggcagtcgaatccctcagcggcctgggggcaatggatgacgagatcagtgagcacgaggcgcatgttcgactacaggttgccgaagtcctcagttcgcctggtgccgagggtgcggcggaaatcgcctgggagatctatagcggccagttcgatcaccccttcgactcagcgtacatcaacgttgttgacgaccttccaaacgagcagcgactgacactgatgcgattggcctgcatgggagcctccgagtacagtttctttgttggatcgctaatggacaagcttgctggtgaaggtgatgccctcgcggttccggtgatctcgcgctgggcacgcttgccagatccgaccactcctgtaagacagaacgcggttgaaatctatatttccgcactgatggccttggggaaacttcaatcagatctgccggtggagtcgtgtccgatggggctaggatcccgtgaagatgcaatgtccgcatgcgggatgatctactactggctgcagcggcgaacctgcgaagcaggagagacggaaccactagtggtggctgcgctcgaggctctttccgtcgatccatcgcgcgcgattggcgtgctgtgcgagatctctcagtcgatcattggccatgacccacgcggcacattgctgattacagcctttcccgcccggatggtcatgctcgctcgcgcagccctccagcaaggaggccctatggaaggatacttttctggaccgcacttcttcgggcgtagcgatgccgagcgatttgcgatatccatgattggttcttacgggggggcagaggacttgccgttgcttcgtacttttgtagatcaagtggaactctcagggagtgctcttaaagcacttgcagcgatcgaaacaagagcctcattcgctgcacaggggtag

SEQ ID NO: 343099 - DNA, 765 bp, Pseudomonas aeruginosa
atggaatggctgaccagcccggaaatctggattgcgttcttcaccctgaccgccctggagatcgtcctcggcatcgacaacatcatcatgatctcgatcctggtcgggcgcatgccgaagcacctgcagccacgcacccgcttcttcggcctggccctggcgatggtgacgcggatcctgctgttgctgtcgatcacctgggtcatgcgcctgaccgccgacctcttccacctgttcggccagggcatctccggacgcgacctgatcctgttcttcggcggcctgttcctgctctggaaaagcagctcggagatctaccagggcctggaaggcgaggaagaaagcggcgaggaaccgaagggttcggcgggcggcttcatcggcaccatcatccagatcgcgatcatcgacatcgtcttttccctggactcggtgatcaccgccgtcggtatggtctcccacgtgccggtgatggtcgcggcgatcatcgtcgcggtactggtgatgatgctctgcgccggcgccatcagcgacttcatcgacaagcacccgtcgctgaagatgctcgccctgtcgttcctcatcgtggtcggcacggtgctgatcgccgaagccttcgaagtccatgtgccgaagggctacgtctacttcgccatggccttctccctggccgtggaggcgctgaacatccgcatgcgcggcgccgctgcgcgcaagcggggcgaagagccagtgaagctgcgcaaggaagtgctcggcgactga

SEQ ID NO: 343100 - DNA, 339 bp, Pseudomonas aeruginosa
gtgccgctggtggtgttcccggtcggcgcgctgtatcgccaggagatgatccatgccctggagagcatcgggcgtcgctggcgcatcggctattccagcgccagcctggccagcctggtggccgcggtcggcgccggactgggggtcagcctgctgccgctgggctgcgtcgggcccgagcatcgcctgcttggcgcgcaggccggcttcccgcccatcgctggcctggagctggcgctctacgcgcggcccgagctggacagcgccgggcgcaccctccgcgaccgcctgcgcgacctctgcgatgcacgcctggaagggttgcagggcgagcgctga

SEQ ID NO: 343101 - DNA, 570 bp, Pseudomonas aeruginosa
atggagatgctccaacgccacggcaaagggctgagtggtgaagccaaggcgaaaatcgcgcaggcagtagccgagtccctcgatggcgatcaatcgacgacatcgaacgtgattcgcgcggatttctcacggccagggttagtcggtgacgagatcagcatcgcgcactacgatattcgcggcgccatgggcaacggccaagtaccgaccgactaccctgaaatgcttcgcgacgtgaaggtgagccaggaacagttgcgcaagctcggcgtcacctacgacgacccgaaccacctgaagatggtgtacggctgggggcactccatggcccccaccattaagcacgccgacccgatgatcgtgaacatcaacatccgcgagttcgacggcgacggaatcttcatcttcacctggcaggggcacctttatgtaaagcgcctacaggtccaagattccgagcatttcgagatgatctcggataataagcagcacaaggaccggatcatccgtatggatgagacctatatccatgccaaggtattactggtctggaatgcgcatttggtttga

SEQ ID NO: 343102 - DNA, 498 bp, Pseudomonas aeruginosa
atgacgtcgagtaagtacgaaactcctgactcggttagagattcgttcgaaaaggtcacgccgatgtacaacaggccgagccctaaagagcagcccggcactgctgacaagcaagccggcgaggtccatactgacaacatgagtacactttctcgcgaagaactggatgcgaagctgcagcttgttgaagagcgcctggaccgcaaggtaaccgatatcgccaggtccgttgacgagctaaaagccagcaatgtgaaaaccgtttccgcgcttaacggcgcaaagtggtgggctatcggtaccgccattgccgtgctcgcgatattccttggtacgctccagtggggtctatccgcgcagaaggaggagaacgcgcgcttcagtagctatatccgcgacgatgtgaaagacgtagcggacagcgtcaaagagatagccaaatccgttagcgagatgcgcatcaaggttgaaagccaacaacccgaacagaaaagataa

SEQ ID NO: 343103 - DNA, 135 bp, Pseudomonas aeruginosa
atggccttgcccagcggggtcacggtcagggcggcggcgagcatggcgccgacgatgacgatcgcggaaatcgcgttggtcaccgccatcagcggggtgtgcaaggcaggggtgacgttccataccacgtggtag

SEQ ID NO: 343104 - DNA, 186 bp, Pseudomonas aeruginosa; identical to SEQ ID NO: 321339

SEQ ID NO: 343105 - DNA, 333 bp, Pseudomonas aeruginosa
ttgccgaagaagtccaatgccgccgaacggatcgtccatgccaccgcctcgctgctggccagccgcgggtatttcggcaccgggctgagcgacatcatcgctcgcgccgaggcgccgaaaggctcgctctatcactatttccccgagggcaagccgcagatcgccagcgccgcgatcggcttcgtcgccgacgaggtggcgtccttcctcgaccgcgccgggacccaggcccccatgcgcgcaacgtcctccgccagttcaccgcgaccctgcgtggctggctggagcattcgcgtttcgaagaggcctgcccggtgctttccaccagcctga

SEQ ID NO: 343106 - DNA, 798 bp, Pseudomonas aeruginosa
atgcctagcgtttcgggggttttgcgttttcggggcaggggtggtgtcgaaaaagtgtcgaaactggggaggaaggcaccgctctcacgtctggctatcaccgctgtctcaaggaggatcaaaatcgtggcgaacacctcgaataaaactattgagcggatccgcgttgccctgggtgttgcgtttactctgcttggaatctggttctcgtaccgtttactacgtcgagatttaatcgaagatacttctttcgtgatgttgattgtgacatttatcgcatctggaatttccatatgcctgctgcctctgattgaagaattatccttttccaacttcactcttaaattgaaaaaggcacaggaagcagccgaggtaacactcgaaaaattaaacaaaactcttgaactaacatttacacccttgttgtccaatgccaaacaatttcccggcggatttggcgactcaggccccatagatgggcgagtcattaatttccttgagcttgtcgaaaggataaaggaagcaggtctctcaacggtgcttgcgccgcagatatcagacacagcgaggaccatagccggaggccagctatatacaatgtgctacgtccttcacggctttaattcctcttacggagactcactacctacgcctgagaaatttcggaccgacgccatcgcccacggacaactaaaagaaacagctgaagcgcaacggcttacagaagacaaagtcattgagagagtatttacgtgcattgacacctacaaaaagctatacgaacttgccacaggataa

SEQ ID NO: 343107 - DNA, 216 bp, Pseudomonas aeruginosa
gtgagcaaggacaaatggaatctggacctgtgcggcataaccctcttcgcggagatgtgtggcgtgacgtatgacgaagcggcccagtgggcagaagacggcacagtccccagtattcaaatggggtgcttccgcatgatcaacctcgcccgtttccgcgacgatatggatcgcggaaaaaccatcttcagagcaggaggttacggcgatgactaa

SEQ ID NO: 343108 - DNA, 828 bp, Pseudomonas aeruginosa
atgaaaaatgaaaacagcaaaatactagcaatagtaatattagcattactactgccaatggcattcatggctggaatggtattagcaaactctcttcaaactgaactcacgctaactgctgactctatttcatcgtggatatccgccattgctactgccgcaatagctgtgcttacctttattcttgcgaaagaaacctggtacttacgcgccgctcagaatcagcagatcgcagaaatgcagcgagagagcataagaccacacatagacctctctctgacccacagtattgtaggcatacacttcatcgaactaaaaatagcaaactacgggagagggattgctaaaaacataaaattcaaaataataaaccagcacagaaacaataacgaacccactaaaaatccaataattaacagcatccttggacttggcgcaatctcaaatggaatttcgcacctaggaatagaacaggtctataaaacttttgttttcagctttctagacgtcctctcgaaaattggagaagaagcagtattctccacgaagttctcaatagaaataagctatacagacatgcaagacaccccatacaaagacataatcttaattgacatgtcctcattccgaggtgtaattgaaatcggtggcggatctcccaattacaaaattgcgactaacattgaaaagattgcaaaatgggtagagtcgttaacgagagggaacaatggccgtatagatgtaaactcctttacggacgaggatcggcaacgtgagcgccaaactctggaggagcacatattcaaacaaaatgagaagaatcagtga

SEQ ID NO: 343109 - DNA, 1197 bp, Pseudomonas aeruginosa
gtgaaaatcgaatcagaaaaattcaactcaattagaaaatcacttattaaactcataccaaagcagaaggcattcctccaaagcctcgaactaatctactcattccaagaaggcagcaccaatcaacacaaacacacactatctcacacagattcagaaggaaacaaaacagaaataatcaccatatccactaacactcctcacgtagaaccgtacgcaatagagctagccagatacgccttcttataccttgtcgccgacttattaagctacagagatttagcctcatacttcctacaatctatatcagcactttacaagcacttcagcatagaaggaaaagaagaccatacaattataaagtacagctcaataaaattcgatacaacaagtgggattttcgctacgacccttaaggaaaactccttaatatttttttccgacgacttcgacgtagataatttttcatacaaaccagaccatatcggaaacataacttatttctgcaaaacacacaaaacatcttttaatcgctacaacttaatttcagccctctcaatccctccagcgttcacccacagcgacttcatttacaagaaggcgcttggcgttaaaaaaacatcaaccattctaaacataatagaaactctgaatcccggagaagactccacgccctacctactgaaaaaaagactaattgaaacgccattaagtgacggattagcatttgagagcatctgcgaagaaattctggcctatattttctcctcagcctatgacaacttaaaactacgtaaacaagtccctacccaccaaggagttcgtcgcagagacttcataatagataatatctctcccaaacacccatggttagccgaccttaggaaaagcggcgtaaaatatatactattcgacgccaaaaactatgagaagcccctcgccaccaatgacctagatacgttttttagttatatccaagagcaaccaagatttggaagtttcgggataataatcagccgaaaaggagttaaagaaaatgcaaaaacccacatactctatagaatgcttagcaagcatgatgagataattgtactagacgagaatgatttgatcagacttattgacttactagcaatagggcatgacccaatttctttgctgtcagaaaagctaagcgaattacatctaaaatgctga

SEQ ID NO: 343110 - DNA, 933 bp, Pseudomonas aeruginosa
atgacggcaaggcatcatcactttctctcgcaatgctatctccgaggcttcaccaataacgggggtaagaaatcaaaccttagggtcataaacgtcgcggatgggacccacttcgaaacgaagccgaggaatgtcggcgggatacgcgacttcaacaggatagacgctgaaggcgttgaccagaacatccttgaaaaatcgctagctgattttgaaggagaagccgcaacagcgataaaggccttagtcgaaggggaggatttctcaggagaaaggcgggaaatcgtcctacatctcatcggactgcttgcggtgcgctcaccgcagcggcgcgagcagatgcgtgcatttcaagcacagatcattgagcagatgatggatctcagcttggactcgaaagaacgctgggattctcaaatcgaagatttgcgagcgagtgggggaaaagtcctcgatagcgtcacttacgaagatgtaaaacgtttccatgagagcaaggcatacacaatccaagtggcgagggagcatcacattcgaatggaaatgggcatgctccagaccattgtccctctgctttcggcacgcaactggtctctgattcgctccgataatgacagcggctccttcattactactgatcgtccggtcgtactggagtttgaggagccggaaaagatccccgccttctaccgcaggtctccgggctttggcttagacaagacctacctctacttccccgtttcgaagcatgtctccctcctcgggcagttttctgagcgtcaagcggagatgggggcgacacgaactattgtggccagtctcaactctgcaatgttggggtcggtttaccgccaggtgtacgcgcccggcttagatttcccagtgatgtcagccgatggcaaagtcataagcggaaaggcgttggtcaagtaa

SEQ ID NO: 343111 - DNA, 1155 bp, Pseudomonas aeruginosa
atggcgatagcctccggtgcctacaagaaagccctagagggcaaccagcagccgaaagaggtgctggtaaagatcgaccgggtaaccaagcagttcgacgagacgctggcggtggacaccgtgtccctgaccatcaacaagggcgagatcttcgccctgctcggcggctccggttcgggtaaatccaccctgttgcgcatgctcgccggtttcgagcggcccaccgaggggcggatcttcctcgatggccaggacatcaccgacctgccgccctacgagcggccgatcaatatgatgttccagtcctatgcgctgttcccgcacatgagcgtggcgcagaacatcgccttcggcctcaagcaggacggcctgcccaaggccgagatcgacgagcgcgtggccgagatgctcaagctggtgcacatgacccagtacgccaagcgcaagccgcaccagctctccggcggccagcgccagcgggtggccctggcccgttcgctggccaagcggccgaagctgctgctactcgacgagccgatgggcgcgctggacaagaagctgcgctcgcagatgcaactggaactggtggagatcatcgagcgcgtcggcgtgacctgcgtgatggtgacccacgaccaggaagaggccatgaccatggcccagcgcatcgccatcatgcacctgggctgcatcgagcagatcggcagcccgatggacatctacgagaccccggcgagccgcctggtctgcgagttcatcggcaacgtcaacctgttcgacggcgtgctggtggaggacgtgcaggaccatgcggtgatcgcctgcccgcagctggagaacccgatctacatcggccacggcatcagcacccgcgccgaggacaagcgcatcacctacgcgctgcggccggagaaagtgatgatcagcgcgcagaagccggacaacctggaacacgccgggcacaactgggcccagggcaccgtctacgacatcgcctaccttggcggccactcggtgtactacatcaagctggcctccgggatgatcgtccaggccttcatggccaacgccgagcgccacgtcgcccggccgacctgggaccagtcggtgtacatcagctggtacgacgacagcggcgtggtactgcagtcatga

SEQ ID NO: 343112 - DNA, 2940 bp, Pseudomonas aeruginosa
atggacgacgtagtagtaacgcattcggatgtgtatcagagttggcaaaaccacctcttcaatttcaatctggacgatcctaaagccaagacgcctggcctgcgaaagccgcaactagccgcgctgtatgcgacccttggtcatcttgtgatcgaccccacagctacggccaccgtggtcatgcccaccggcacagggaaaaccgacacaatgctcgcgctgatcatcgcggcgagaatgagtcgaacactaatccttgtaccttcggacgccctcagagctcaattggtgaacaagtgcgctgagatgaagacgcttcgtaccgtgggggcagtatcggagacggcgcacaatcccattgttgcggccatagattcgaagctgtctgaagcacaggttgctgaattggctactgccaacatcattgtggccacccctcaggccctgctgctattcgaagacgccgccttgggggcgctggtgaacatgtgcagtcacctgatgatcgatgaggctcaccatgtcgtagcaaccagttggaaccggatcagaaccgccttcaggggcaaaccttgtattcagttcacagcgacgccattccgggaggatggtctagctctggccggcaagatcatctacaactaccctctccgcgatgcgcagcttgatggctatttcaaaggcattgagttccatccggtacgagaatacaacctcaggctgtccgaccaggccatcgcagacaaggctgttgagctgctccgggctgacctcaaggcaggctataaccatttaatgatggttcgggccaagtcgcacaagcgggccgcagacctgtttgaaatttacaagcagcaccccgatctcacgccagtcttgattcacagcaaggttccgaaccaagccagagtgatggcggaaatcgtccagaagaagcaccggattatcgtatgcgtcgacatgcttggcgaaggcttcgatctgcctgagctcaaaatcgccgccattcatgatcaacaccaaagccctgcagtcacgctccagttcattggccggttgacaagggttgatgccgtcctcggtgatgccaagttcgtggcgaatatcgctaaccagaagactgaccatcagatggcagatctctataaggagagcgctgattggggggcagtcattcgcaacgtgagcgagcaaaaggtcaacagggaaattgagaaggcagacttcaacgagcagtttgctgacggtgacgatgcccaagtgattttcgggctaaacccgaaccccaaaatcagcgccgtggcgtatcacgtctccccccaagactggacaccacagcgtgcgcaggggctggatggacgcagagaaacactgcagtacatctcgatcaatgagcaggccgataccgtcattgccgtgactcggcgagagacgctggttgggtgggctcagaccgaagaaatcgtcgataccaactggaatctgtacatcgctttctataacaaggcgcagaaaaccctgttcattcacacctcaggtgacgacacccaggcagctcgttttctcaacctggtagccaaagaccctcgtcgtatcaatggtgagccgaccttccgtacgctccacgacatcaaactgatgaagctgcagaatgttggtctctcacgcgcccggaaagacttacggttcacgatgcacgtggggcgcgatatcaatcaagtgatcagcgatatcgagaaaggcaacgcgacaaaatccaacatcttcgccaccggctttgaggatggagaacgaactaccgtgggctgctcgcacaaaggcaagatctgggagatgaactcctctccaatcaactactgggtcgagtggtgcaagcgcatgtcggtcaaactcaacgacaacaccatcgaccctgctgacatactcaaaaatgtcatgcgtgctgagcaaatcaaggacagctggccagaaggcctgttttacgccgactggcctgagtcgatcgcaatcgaaaacgagcaaaggatctcgctgtattttcagggagagactttcaaccttctcgacgttgagcttggtaagcctgagtacagtgacgcgcggacgctagatatccccgtcttggtcgagggtaatgatggcgaggagcgtcgcctcacttccatcaccattaagttgttggaagacggatacaagacctcatgcccaggcgtgaagattctttatccccacgaaatgccactggactcctacttggatggagagccgcttgtattgctcaaggtcgacggttccatggtgcagggcaactaccgtcagtattcgctcaacagcatggatgtaaaactgcctgccggtttgcttgagccctggaactggggaacgacgaaaatccatcaagagtccatgcgtgcggagcgacgtgaggattctgtacaaggcttcacctttgccaagatcgttgacgactactcaatcgtcttcaacgatgatggcaaaggtgaaatcgctgacctagtggcaatccgggaaagcaaagacgctatctatgttgacctctaccactgcaaattctgcccaatgactgatggcgtggccgcgccaggcgcgcgcgttgccgacgtctatgaggtatgcggccaggcgtcgaggtcggtgaaatggctgtacaccggcgataagttcttcaaccgactgatggaccgctaccagcaatcattgcttaaggacttcgacagaatcctgaaaggcacgcctcagcagctggagatactgcgcaacaaatgtcacgaccacgagctgatcttcaaatttgtgatcgtgcaacccgcgatatcagcgaagaaggtgtcgaaggagcagttggccatcttgggaacgagctactcatacatcaagagcatttccggatcagacatcaaggtcattgttagcccttaa

SEQ ID NO: 343113 - DNA, 837 bp, Pseudomonas aeruginosa
atgagcgaggcgctcctcgacgctcgcgggatcgccctcggctatccgcgcggtgccggctggcaggcggtgctcggcgatttcgacctgcgcctgggcgccggcgaggtggtctcgatcctcggtcccagcggggtcggcaagtccagcctgctgcgcgtgctggctggcctgcaggagccggccgccggcagcgtgcgggtactcggcgagcccctgcgcggcccgcatccgggcgtcgcggtggcgttccaggaccccagcctgttgccttggctgaacctggagaagaacgtcgccttcggcctcgatttcgcccgccagccgcacctcgacgcggccacccgccaggcccgcgtcgaccaggcgatcgccgcggtcggcctggagcacgcccgtgcccgctacccggcacaactctccggcggcatggcccagcgcaccgcgctggcccgctgcctggctcggcagccgaaggtgctgctgctcgacgaacctttcggcgcgctggacgaagtgacccgcgccgacatgcagcaactgctgctgcgggcgatccacgagcgcggcaccgccgtggtcctgatcacccacgatatcgacgaggccctgctgctctccgaacgcatcctgctactgggtgacagcccggcgcggaccctcggcgagtggcgcatcgacctgccgcagccacgcgcggagctggtcgaggaactgggcgcgttgcgcatcgagatcctgaaaaccctacggcgggcgagccgcacccatgcccatcccatcgctcagccggaggcctcccatgtgcctggacgacccgacccattcccgacgtga

SEQ ID NO: 343114 - DNA, 195 bp, Pseudomonas aeruginosa
atgaagatgtgtgaaaacttaatcgaggactggctccgccaaaatcaactcagagccaagctgcttgctgacctggagtatcttcgaaacttgtttattattttcttcgacatacctttcagagatagcctttacaatcagatcagtaccaacaataagccgaaaattaccacccatcttattaaagtattctag

SEQ ID NO: 343115 - DNA, 693 bp, Pseudomonas aeruginosa
atgattcgagcctatttccatgcgcgcaggtcagcaggtggtccgaagacttgggctcaattcatagagcaagtggttacgcattcagctcttcgttccaaagctgagtcggctcggcaagatttgaaagcattcttggttcagaaatttggaatgaagtttgttacgtccgttgatctttccacatctgttaacttggaaatggtgaagcaaacggccgctaaacttgatgaggcacgacaatcaaagcatgaggatcttgcttacaatgatgctctcatggcttatgcgacctatgcccagcgaaaacgcaatgaagaaagtgcaatttatgatggctttggattcagaacatggtggctaacaaaagaaacgcatgtggtaaatttcaccaaggccttggtggaatctgagggtggggtaccctacatcatgcgtccagaatttatcctaaactttatttccttagcagctagcgcagataatgttaggaggtcgttcgcggaccttctgcccacgacggctggattgcaacttggccggcacctgccctccactgttatgcaccaaatgatgggtgacgcagaagagtggggcgataagccagccgagcgcatcagtaccctgattacagaaaaagcaaataaactgaagcatgatcagtttaagcaatacattgataatattgagtga

SEQ ID NO: 343116 - DNA, 363 bp, Pseudomonas aeruginosa
atgacagagaagaaaaagacggcctacggcacccggccacggaatcaatacatcaaggtatttgtgaccgagagcgagcaggcccagctgatagagcgagccgccgaagcgggcatgtctcaatcggcattcctgcgcgcgctcggattgaacacgccaatacggtctgtcttagacctgactgccgtagccgatctggccagggtcaatggcgaccttgggcgggtcgcggggctgttgaaactttggctcgcagaaaagcgcggccaaggcgcaagaccgatggacgttgaagcgatgatgaatgacttccgcaagttgcagggcgaagtcctcgctattatgtcgcgagctgtaagatga

SEQ ID NO: 343117 - DNA, 210 bp, Pseudomonas aeruginosa
atggcacgcaaaactctcgctgagcgccgttctgacgccatttccgaactggaaaccgctaaggcgcgactcgcaaaactcgacaatgaagccgctgagagaattggcagaattgcaataaagtcaggattggttaatctgaagcttacggacgatcaagtccgggaagaatttgaccgaatcgtggaaaagatcagcaagaggaattga

SEQ ID NO: 343118 - DNA, 225 bp, Pseudomonas aeruginosa
atgaagacagctcaccgtatcagcgcatttgccagtcgactcgacgaattgcaagcctgcctcggtcgagccagcaaccgggctacggaaaatgttaccgaagcccagcgcatcgcggctgagctggctttatccctcgaagactggcatctcgacgcgctgcgtatccctaaggcggagcgtgccccctaccgagcgcagaatccatattactcagcacattga

SEQ ID NO: 343119 - DNA, 798 bp, Pseudomonas aeruginosa
atggaaagggaattgctcataacagcgtcctcccgtgtacgcaaagccgggcgtcatgtggctttgagcattgcgatggccggaaccagcttagttggtggaaccctatacactacacctgccacggcttacgccatctactgcgcaaattgctccacgttttatcagcaaatgtttgagtacgctgaggcggttaacacggctctgaacaccgccgagcagctgcaaacccaggttcagcagtatcaaagcatgatcacgcagggcacgggcttgccggattcgatgttcggcagtattgcggctgatcttaaaaacgtgatgaacatctacgaccgctcgcaggcgttgggtcgccaaattcagaacatggattcgcagttcaacacggctttccccggtttcaattcgtacctgaatcaagctgccaactcggctgagtcaccggcacaagaccgttatcagacgtggtctgagcaaggccgcgataacgtgaaagctgcgctagaagcggcaaacctcaatacaagcacctttgagtctgagggcgagcagcttgaccgcatgatgacccgttcacagtcggctgcgggccggatgcaagcacttcaggcgggcaacgaaatagcctcacagaacgtacagcagctgcaaaagctacgcgatctggtggctacgcaaatcaacatgcagggcaactatctggctcagcagggtgaccgtacagcagccagcgaagctaccgaacagcagtttgaagcgcgcaaaaatacacgcggcggcgtgaagggatactga

SEQ ID NO: 343120 - DNA, 321 bp, Pseudomonas aeruginosa
atgaatgacattctgatgctcgctggattcgtagtactcgcctcgaccttggccataggtatgtgggcgctcggccggtggctgcgtagcaagggctacggagcgcagttggatgatttgaatcgccaattcacggccttacagcttcgagtcaggccgcttgctctgtcggcctcctatggcatgtttgcgggaacgcagaccctgaatcgtctacctctgctgggaagcaagagtagcgctgctatgaaccatcaattgttgatggccatccaggctgcgcaggaagcacagaaacgagagaagcccggcaatcgctga

SEQ ID NO: 343121 - DNA, 984 bp, Pseudomonas aeruginosa
atgtcgcagccgcatattaggccagcttacgctcggctcgatcctgctcatgcgttcgatggactattcgtacccacgaagggcaagccacgtggacgtttgctcgtggagccgcgccgcttcggcaggctcgaaataggctttcaaggcttcgagcagctcggagccgatgatcaatcgatcctgctggcattgactgctcagcttggcatagagcgcctcgtaatcgaagctaccccagccgggtctatcagcaaacagttacgcctcgcactggactttaaccaagacgaaggcgcacctttggcaaccaagcgtaccagcctgcgaagcctcctaatcgacgcaggatatcgagatcccgagagtggagctgcgcttgcaagagcgaaaaaaagtctcaaccggctacgggcaacacaaattcgggaaatcgatagggaaacgggatgggataggggctgcaacctgatatcgcttagcttcaaccataaaagcggggagatttatgtcgccgccaaccctcgcctgacgggggcggtttttcatgggcagcatgtccgagtctcgttgttcgagcggaacgcactggaaacggaggtcgccaagctgctgcactgctggctctgctcaaatatccgacttggccgagcgctggggaacggcaatggagcacaccttgacacccttgcgcctcacgtctggggccgaggggcatgggagcgcttctcagcatcggaccgcagtaagaggcgcggccagttgagagcggcattggaggaaatcgcagagcgcacatgcggcctgcaagatggaatgggctgggccatcgatcaaactagaagtgggctggtgttggtcggccgccccaaggcactgccacttattgaaagcgagcatgacacgcctgccgccggactatacgaactcacgagacagtccgaccgggaaccgtccagcttgtcagattggacgccgaattga

SEQ ID NO: 343122 - DNA, 882 bp, Pseudomonas aeruginosa
atggccatcgatctaaccgcagcttttgaaagtgacccaccggtgcttgatttcatatggcccggcttcctcgctggcacagtaggagctttggttgccccaggagccaccgggaagagctattgggcactcgaagcggccatgtcgatcgcatgcaacgttgccggtggtgatctagtagggcttggtcccacatgcgctggccgcgtggtgtatttcgctggagaagacccagaagtcgcactggtccgccgaatccatgccatcggccagcacctgaatcagcaggcacgtcaagccatcacggagaacctgatcatccagcccatcatgggaaaacggatgaacgtgatggatgaccagcatcttgcccgcgttatcgaattctgcgccggtgcgcgcttgatcgtactggatactctaagccggattcacgatagggacgaaaacagcaacggcgatatggcacgacttgtcgccacgctggagtgcgccgcgacgagcaccggggcctcagttctgtatctgcaccatgtcagcaaaggcagtgcccgagaggggcagacgaatcaacagcaggcagcacgaggcgcatccgctttaatcgacaatgcccgctggtgcggtttcgttgcaaagatgaccgaggacgaggccaagagcctcagcgaccgcgcctatgaccgtcagcccatcggcaacgaccggcgcgggttctttgtccgttttggtgtaagcaaacagaattacgacgctaccccgcttgaccaatggtatcaacgccacgacggaggcgttttgctgccggtagagctgttgccagccaagcaggagggtgcgaaacggacccgaggtaagggccatgtcgcagccgcatattag

SEQ ID NO: 343123 - DNA, 975 bp, Pseudomonas aeruginosa
atgagcgtaagcgaaacagaaatctcagtctggcccaactgttcaccgatcatggaagcggcggtgcgagagctcgtcgctaactggcggccatactcaagcagcgcgagacgttttccgatacgcaggctgattgagcgactgatcgacccggctatcgcgctgctgtgtgtggatgcggtgtttcagcgatacatgttgggtgcaccgggaactaccgccctgagtgatttgatgcattcaactcattacaagggagctatgcaggctcagcgagttctgatccgtcagtacatgagcgcgacgcgtcatactggagagcaatcgagagaagtgatcgggacgcttgaaacattggtggaggtaatcggagcttgcggtcgcaagcgtccagctcgctcacgatgtaccgttgagggcgtaactcaaaatgcgcagcgcaacagagacttttgtgaggtgtgcgggcagccgtctgaactcgctcatttgatcaatacaggtgattggccagaaagcgcggataccgactacgcactgcacctcagtaatcggtattgcgcttcccatcgacctcggcatgttgatgggacttggaacccgcagtatcaacgggcaaagcgttcaaagaatctctttaatctcgaactggcccggctcacaaaacaaagtgctcagcgcactctgtcaccgaagcatgacattcctgctgccgaactttttgcgttccatatcacgcatagcaacggtcttaccgccgcagatgaaggtgcactgcgggagcaagcccgccttatgattgatgctcgtctgactgacgccaagaagcagatgctgattcttcgggcgtccggtttgaaccagagcgagattgctcggaggatgggcatcagtcgtcaggcagtgtcgaaggcgctggggtcgattccttcttctttccagttcgccgacgcgccagaacatccagttcattga

SEQ ID NO: 343124 - DNA, 798 bp, Pseudomonas aeruginosa; identical to SEQ ID NO: 336296

SEQ ID NO: 343125 - DNA, 621 bp, Pseudomonas aeruginosa
atgcggggaatacggcggcgcgctactgcgcagggggatcgcggtgaagcgcaggcgcggacaggccgggatggcgaaaggctcgccatcgagggcgatcggccggtggcgcaggccgccgttccagtgggaaagcatggggaacagcgggaagccttcgctgaggtcctggtggaccatctgcgtgcaccagacttcgtgcgggcagccttcgcgcaggctgagcaggccggtggtgtggtcgatctggctgtcgagcaggacgatcgcgccgatcgccgtatcgcgcggccgacgcgccggctggagggccgggaaggcggcgatctgggcacggatgtcgggcgaggcgttgcagaggatccagcgctcgccgtcgtcggacagggcgatggaggattgcgtgcgtggctgggccgctacgctgccgtcgcggaccccgcgacagttgcggcagttgcagttccactgggggaagccgccgccggcggccgaaccgagaatacggatgtgcatgggtctgccccgcgggctggagggaggccccggaagaccggggccgaacggatcagcggttggcgaagtagagggtcacttcgaaaccgagacgcaggtcggtga

SEQ ID NO: 343126 - DNA, 885 bp, Pseudomonas aeruginosa
atgcaggcagagagtcacgttcaggcggcaatcgcgaggatcttctcctccgccgtctttcgggagctcgtaagagacggtcgctcgtccctttttgcgcggctggtgcatgagatttatcgcgaagaaaatatctgcacttggagtgtcggaagattctttgatgagtgtttcaattttttgaaacgttcagatcttcggaatgaatatgcatataaatcagctatcattcagaaagtcttactgggttctcactctctcaataccgcttctatcgttgatgagttcagagtaggtgggaataaggctgatctcgtgatgctcaacggaacctcgaatgcctttgagattaagtctgagagagatcgtctggatagattgtgtacgcaagtctcatcgtacagtgaagtctttgcagaagtcactgtgctttgtgctgaaaagcatttgagggcagttcaagataccgtgccagattttgtcggagtgtcggtcctcactgagcgctttcaaatctcaaagattcggaagggagtgaatgatcctgaacgaactaattctgtttctatattcaacagcattacaaaaaaagaggcagttgaggttctaaagcgtttaggtgtcgctgtgccagatctacctaatacgctaatgcaccacgcgttggagttagagttctctaagctaccttcggcacaggtgcatgatgaaatggtaaaggtgctaaagataactagaagtttgtctgggatgtccgagtccttgcaggaagtaccccggtcattgagggttttcgcactgaccgttccgatgaaaaagcgcggaaaggaaaatctgcttggagcattggatactcctctaatggatgcattgaaatggggatga

SEQ ID NO: 343127 - DNA, 2076 bp, Pseudomonas aeruginosa
ttgctacgggtcctgttgctgcgcctgtccgccgaggaacaggtgctggtggtgaccctgcaccacatcgtctccgatggttggtcgacgccgatcatggtggaagagcttatgcagttctacgccggctaccgtgaaggccgcgccgtggaactggagccgttgccgatccagtacgccgactatgccctgtggcagcgcagctggatggaagccggcgagcgtgagcgccaactggcctactggcggcagcagctgggcggcgagcagccggtgctggaactgccgaccgaccggccgcggccgagcgtacagagtcctgccggcgacagcctgcaggtggagctgggcgaagacctgggtcgctcgctgaaacagctggcgcagcagcagggcgtgaccctgttcatgctgttgctggccagtttccagaccttgttgcatcgctacagcgggcagccggaaatctgcgttggggtaccgatcgccaaccgcacccgggtagagaccgagcgtctgatcggcttcttcgtcaacacccaggtgttgaaggccgacttcgacctggagacccgtttcgacgccttgttgcagcaggtcaaacgtaccgcactggaagcgcaggcccatcaggacttgccgttcgagcaactggtggaggcgttgcagccgcagcggagcctgagccacagtccattgttccaggtgatgtacaaccaccagaacgcgggtcagggcaaggctctggagctgccggggctgcgggtggaggcgttggagcgggcgagcgcgacggcgcagttcgacctgaccctggatacctatgaaagcggtgacgcgctgagcgcgtcgctgatctacgcgaccagcctgttcgagcggtcgacggtggagcgtctggcggcacactggcgcaacctgctggaggcgatctgccaggacgcgagtcagcgtgtcggcgaattgccgatgctggctgaagcggagtacgtcgagcttgttcgcggctgcgagtccgccccctgtgccgagcctgcctgcctgcatcccttggtcgaggcgcaggcggcgcggaccccggaggcgacggcggtggtgcatggcgagatcgagctgagctaccgggaactgaaccgccgggccaacgtactggcgcacaggctgcgggccgaaggcgttggtccggacgtaccggtgggtatcgccatgcagcgcagcccggagttggtcgtggcgttgctggcggtgctgaaagccggtggcgcctacgtgccgatggatcccggttatcccgccgagcgcctggccttcctggcagaggacagcgggattggcctgttgctgacacagacgttcctgcaggatgaactgccgttcaacgcacagctgacgaacctatgcctggacgacccgagcctgttccagaacgtcccggcgcagtgggacgggaatccggagcagcgtgcctgtccggagcatctggcctacgtcatctatacctctggttcgaccgggcgcccgaagggcgttggcatcacccatggcgcgctggtcaatcacatgcgctggatgcaggagcgcttccagttggcggcgcacgagcgggtgttgcagcggacctcgagtagcttcgatgcctcggtgtgggagttctggctgccactgatgtccggcgctcgcctgcacttggcgcctgcggagctgggtacctcgctagagagcttgtgggggctggtcgaggcacaacggatcaatgtgctgcaaatgcctccgtcgctgttgcaggcgctgctgcctttcgccggcgacgaccagttggactcgctgcggctgctctgctgcggtggcgaagcgctgagcggcgcgctgctggaacaactgggccgccgctggaacggcgagctggtcaacctctacgggccgaccgaagcgaccatcgatgcctgctgcttctcggcgccggtgaaggaggtgggggggaaattcccattggtgcaccgatcgcgggggtgcgcgcgcgcatcctcgatgcggcgggtggggtctgtccggtgggttgccgaggcgaactgctga

SEQ ID NO: 343128 - DNA, 810 bp, Pseudomonas aeruginosa
atgaaagaagcactgcaactggtcctcgccaacgccatcgctgccgcaggcacccgtatcaccggctcggccggcgccatggcggttgtcccggagggcttcaagctccaaagcctggaacggctggaagcgcaccgcaaccgtttccgtggtgccctgaccacctcctcgctcgcagatttcgtaacctacgtgaacgagcgcgccggagaagaggctcgcggcttcgtcgacaaggacagcatgtcctgccgggtgatcttcaacctgggtgataccgaactggccgggcacgccgacgatatcgccaccttggcgctgcagcccacggccgcttatgccgctctgcaagacatcgctggccagcgtctgtcgcagaaggacctggctgagtggatggaagactggcgcgacttcctgaaggcgatctccccggatgatcaggaaatgcccctggtccaggccatcgcggcagtacgcaacatcaccatcaaggcttccagcgagcgcaccagcgttgagggcaacttcaatgcgtcgcgcagcgccatggaccagatcgaggctgccagccaggacacgctgccggcctcgctgatcttcacctgcctgccctacgacggcctgccgctgcgcagtttcgtcctgcgcctgtcagtgctgactggcgaagccaaaccggtaatcaagcctcgctgggtagctgaacagcaggtgcgagaggaaatcgcgcaagagttcaaggacatgctcgctaccgacatcacctccaccgatctgaccatcggcaccttcaaggtcggcgaataa

SEQ ID NO: 343129 - DNA, 348 bp, Pseudomonas aeruginosa
atgaaaaagaccgacgtgaacgacttcttcagctcgctgaatgcgggcgtcttcgccaaccagatcggcacggccctctccgacgtcggctccggcgtggtcgagttcggcaagaaaggcaaagtcgtcatcaccttggagctcagtcagatcggcgaatccaaccaggtaaagatcaaccacaaactcgactacaaggtgcccaccaagcgcggcagtcgcagcgaagacaccgcgctggacaccccgatgtacgtcacccctaacggcctggagctattccagaccaacccgaccgaccagttgttcaaccgccagcaggcaccggtcgtcccccaggacgcttaa

SEQ ID NO: 343130 - DNA, 210 bp, Pseudomonas aeruginosa
atgcaatcggcacagcacacgcccaaagcccgctgcccggtgtacctacacccggcagcggccaccagccccgccactgttgaggccatccaggcccgcaccgggctgctggtgatcatcagcacctcccagcgcgcctgcctctaccagccgcgccctgtcgcccccagcacggatgccgacagcggcccgtggggaggtgctgcatga

SEQ ID NO: 343131 - DNA, 687 bp, Pseudomonas aeruginosa
atggacatcaacaagctcagaatccgcgcccttggcgccctcatcggcgatcagaagaccaaggattttgctgagaagcacaaccttgacgcttcctacatctcgcaactgctgaatggccatcgcccgatgggcgagaaagccgcacgaaacctagaggcaaagattggcctagcaccgaactctcttgtgatgccaacccaattcccggacgtgcatcgggctcaagggaaagacctaccggtgagcaacctggaagaggaagccctaccggtgctgaaaggaagcgtcccagtagtagggaaagctaagttgggtgtagatggatacttcgaggccctagactatccagtgggccatggcgacggcagcgtcttaatcagcagcaccgatcccaatgcctatgcgctgcaggttgtcgggcatagcatgcacccgagaatcaagcacaaagagtatgtgatgatcgagccaaaccgctcctttgcgccaggcgacgaagtgctggttaagacagttgatggccgcgcaatgatcaaggaatacagctaccgccgagagggcacttggcgcttcgacagcgtgaaccccaacgaatctcccgtcttcctggaagacgacgagatcgtctatgtccatttcgttggagcgatagtcaagtcctcacgctttattccctccgcctga

SEQ ID NO: 343132 - DNA, 231 bp, Pseudomonas aeruginosa
atgaaactactcgactacctcaagcccctgagtaaagacgcaaaggcagcgcttgcggcccgttgtgggacgactgtggggcaactgacccaggtggcttacgggcatcgtcgggcgaatgccgccctggcaattgatctcgatagggagactggcggtgttgtggcatgcgaagagaccaggcctgacatcgactgggcctatctccgcgggaagcagcgagcggcatga

SEQ ID NO: 343133 - DNA, 222 bp, Pseudomonas aeruginosa
atggacatattcgcggataacttcggtgtggcccccggcctggaggtggtgatgcgccacctcgatgacggcctggtcatggtcatggcacggcacaaaggggaggccttcgaaagctatcgcgccgtcccggtggagaaggccttggaagtagctggctacctcattcgaggctctcaaccaccacgcgccctgttttgtccctgtacacctgctcgctga

SEQ ID NO: 343134 - DNA, 204 bp, Pseudomonas aeruginosa
atgccctccaagaagcctcagacaatcaccgtcggaatgctccgggagcatctcgccgtctaccccgatcactacgaagtcgacttcagcggcctagagttctaccgcctaaaacagcgcggccccgaactggtccaggtcgaattcagcgagcaggtgtacagggacaaaacagggcgcgtggtggttgagagcctcgaatga

SEQ ID NO: 343135 - DNA, 492 bp, Pseudomonas aeruginosa
atgttctccggcgccccggacaagtacgactggcaactagtgggcaagaaggaactctatgtgccctacaacagctaccgcctggcggccaagagcaacaagtacagcgacatcgtcaaacgcggccacatcaatccggacctgctgcgctacgagttgcaccgggtctggcatgtacgggccacgctgaaggcggggatgcgccaccagtacaagcagcgcgatatgtatttcgacgaggacagctaccagatcctgctggttgaccattacgacaaccgcggcaccctgtggcgggtcggcgagtcctacaccatcaacctctacgatcagccactgatctggaccaagggcgatgcggtatatgacctgatcggaggccgttatgtcatcggaatattgtccaatgaagaaccggccaatcagtttgatattgccctgaaaccttcggactttacccccgcgcaattacgccgggacagccgacgttaa

SEQ ID NO: 343136 - DNA, 621 bp, Pseudomonas aeruginosa
atgtacagcatttccaggccgactcaggctcgcagtaaaaaggcccttgaacgctttctcaacgtggcagccgaactgctggcggacaaccgtttcgaagacactggcatctcccagatcgcggtgctggcggaatcctcggtgggcaccttctaccgcctgctgggcgacaaggacgtgctgctctatgccgtgcacgagcgcatcgtcgagcagggccgcagcgccatcgatagcctgatgcaggacctcggccagcgcgagctgccgctcagcggccagatcgaagcctttatccgcggcataatcgaaatgttcgagggccgcgaaggcctgctccgcgccctggttcggcgcagttcgacggacctgcaattccgccagcgcttccaccagctcaatgcctatatgggccagacgctgtgccagctcgtgctggcccggcgcaacgaactgcgccacccgcagccgcagcaggctgccgacctggcggcgcatatgctgctggccagcctgaattacctgaccatggttggcaccctcggcgaaacgcctcgggaagttattcccgaggaactttcccggctgatctgcaattatctggaagttgccaaacattaa

SEQ ID NO: 343137 - DNA, 786 bp, Pseudomonas aeruginosa
atgcactatattcaattgcgcaatggtcgctgcgcctatatccgcaagggtcatggcctgccggtattgttgctgcacggcctgggctcatcctcccaggactggcagccacagatcgatgcgctgtcgcgtttcgctacggtttatgccttggatctgcgcggccatggggccagcaagcccctgcgcgccccggtctgcatggccgaactggccgacgatgtagccgagtttatccgcgtccaggccatttctggctgtgtgttggtgggcatctccatgggcggcatggtgagcttccagctgttggcgcaacagccggaactggtcggccgcctggtggtgatcaacagcgcgccgagctttcctctggactcctggagcctacgcgccaaggtgctgctgcgcctggggttgatccgcctgattggcctaaaggccatgggccggctgctggcgcgcaagctgtttccttatgccgagcagggcgagttgcgccgacgcaccgccatgcgtatcggggccaatgaccgagtgtcctacctgcatgcgatgcacgcgattctcggctggtccgccctgccggcggtcaacggcgtcgacacgccgatgctgatcgtcgccggcgaccgcgactacaccccgctggcctacaagcaggcctacgtggcgctgctgcgcaatgccgagttgcaggtggtgagcgattccggacatgccacgccgctggaccagccggagcagttgaacagtctgctcgagcgatttattcggccacggcaatag

SEQ ID NO: 343138 - DNA, 204 bp, Pseudomonas aeruginosa
atgacgaaagagcagttttcagccctggcggagctgatgcgcctgcgtggaggaccgggacaggatgccgctcgactggtgctggtgaatggtctcaagcctaccgaagccgcacgacagacgggtatcactccccaggccgtgaataaaacactcagcagttgccggcgtgggattgaacttgctaagcgggtatttacctga

SEQ ID NO: 343139 - DNA, 894 bp, Pseudomonas aeruginosa
atggccaggcaagaaaaaaagataactccggtgatttctgttattaacatgaaaggcggagtggggaaaaccactatttctgcccacctgtttcgtgagttttatttgcatacggcaaagagtgtgctgataatagattttgacccccagtttaatcttacgcaaacattatatagcgaagcagtttacgaaaaactgaaaagccataatagaacagttctctcagtaatggagtcgccggaagataattccttgtatagtactcacaaaaaaattggggcagtcccggatcctggcgaggtagcagttaatgcaaaatacttttttgataaacaacgtgatgataagaaagtaacgctagatatagtccctggcgattttagtctttgcaaattttcgcttatggatgatagggaagtcctaaaaactgctgcaaagcgcttttcttcttttattgagaaggcaagagaggtttatgatctgatatgcatagattgtaatccaagctcgtcgtttctcactacgtgtgctctaaaatcctcaactcatttattgatacccgtcaggcctgataggtattcaatgttaggcctgaggatgttagataattttgtggatagctttaaaggacttaccgttaagcctaaaaaaataataattttaaatggcataccgacctcgcaatacgatccggtagttgagaatgagttacgtgccgatccgatatatggtcgattaacgctgacgacttctctctatgcaacaaaacttctggaggcaagccctcgtcacactggttttgccactgatcgaaaagttgcttactcaaaatctcttaagcgtagaatgagaagcctcgctactgaactcgctgaggccctggggttgaaatga

SEQ ID NO: 343140 - DNA, 612 bp, Pseudomonas aeruginosa
atgaactatcgtcacgcttaccacgccggcaaccatgccgatgtcttcaagcacctggtgctggcgcggatcttcgccctgctggggcgcaaggacacgccgtacgcctacctggacagccattccggggtcggcctctacgacctgcagggtgacgaggccagccgcaccggcgagtgggagcagggcatcgcccgcctgtgggagcgcgaaggcctgcccgagcaactggacgattacctggacgtgatccgtcacctgaacccggacggctccctgcgctactacccgggctcgccggaactggcgcggcgcctgacccgcgcccaggaccgcgtgctgctcaacgaactgcatcccgaggacggccgcctgctcaaggccaacatggcgggcgaacggcgggtcgccgtgcaccagggcgacggttggctgctgccgcgggcgttcctgccggcgccggaaaagcgcgcggtgctgctgatcgatccgccgttcgagcaggccgacgaattgcagcgttgtgtcgctgcgctcgacgaggcgatcgggcggatgcgccagacggtggtggtgatctggtatccgatcaaggacgagcgccagctctag

SEQ ID NO: 343141 - DNA, 207 bp, Pseudomonas aeruginosa
atgaacatcactgaagccattgagcattttggctccaagaaaaagctggctgccgccttggggattcagccgagcgcggtcacccagtggggcgactcgatacctgtcggccgccagtaccaaattcaggtgattagcaagaacaggctgaaggccgagtctggagcggttcgtgatgaagagactacggggccggcggaagcctaa

SEQ ID NO: 343142 - DNA, 702 bp, Pseudomonas aeruginosa
atgaccgccatgcccgaagtacttcgcgaagatacgctgaacatccccgacagccgtgggctgaatctctacacctgcgatccggccctggagcggctgctggaggtatacctgccgccggcgttgctcgccgaatggcggccgctcctcgaacggctcggcgcccgtgccggcggcgagctggacgtgctggcgctggcggcggacaagaatccgccggtgctggcgccgcgcacccgccgcggcgaggatttgcagagcattcgcaagcatccggactacgtcgccctcgaacaggtggcctatgccgaacttggcctggcttccatgagccatcgcccggacggcccgccgccgctggtgaagtatgcgctcacccacctgttcgtacaggccgagttcggcctttgctgcccggtcagcatgaccgactcgctgacccgcaccctgcgcaggttcggcgcgccagaactggtcgagcgctacctgccgtccctcgcctcgcgggatttcgacgagctgttccagggcgccatgttcatgaccgagcaggccgccggctccgacgtggcgcggacccgtaccgtggcgcgggagcagggcggtgagtggaagctctacggcgacagtggttctgctccaacccggacgccgacctggcgatggtcctggcccgccccgaaggcgcggcggaaggaatga

SEQ ID NO: 343143 - DNA, 1074 bp, Pseudomonas aeruginosa
atgtccgatgcagcgttgttccttctccttcccgatgacgacaccctgtatgccgcgctgttggcgcgcgaccccgcctacgatggctttgccttcgtcggggtgaagagcaccggggtgttctgccgcctgacctgcccggcgcgcaagccgaagcgcgagaacaccctgttcttcgattcgatcaagggctgcgtcgaggccggcttccgaccctgcctgcgttgccggccgctggagcggctcggcacgcaggggccgctggtcagcgacctgctccagcgcctcggtcggcaaccgcagcggcgctggttcgaagacgacctggcggcgctgggctatgacccgtccaccgtgcgccgtgccttcaagcgcgagttcggcgtgacctttctggaaatggctcgcctgcgccgtcttggccaggtcgccgagcggctgtcctcgggcgcgcgggtgatcgacgcgcaactggatgccagcttcgactctgacagcggcttccgtagcgccttcgcgcgcctgctgggcgagccgccgtcgcagttgcgcgggcgcgagctgctcaaggcggactggctgcagaccccgctcggcgccatgctcgcggtggccgatgcgcaggccctgcacctgctggagttcttcgaccgcccggcgttgagcggggagctgaaacgcctgcagaagagcagcggatcgagcatcggtttcggccgtttcgcctccatcgacaggatcgaggcggaactcgccgactacttcggcggtactccagtgcgcttccagaccccgttggcgctgaacgcctcggccttcacccgcacggtctggcaggcgctgcgcgaggtaccgtgcggcagcacgcagagctacgccgggctggccaggtccatcggctcgccgttgtcggtgcgcgccgtggcccgcgccaacggagccaaccagatcgccatcgtgattccctgccaccgcgtcatcggttcggacggttccctgaccggttatggcggtggcctgtggcgcaagcgctggttgctggagcacgagcggcgcatgggcgctgccggctag

SEQ ID NO: 343144 - DNA, 1452 bp, Pseudomonas aeruginosa
atgagataccaacgagtgaccggcgcgacgctgggattggccttgatggcatcggccgcgccaggctgggcggcggacgagcaggcaaccccgccgaccccggacaatcccagctacgccgcccaggtgcagagcatccccagcgtggagaaaccgatcaagggccaggccggcgccagcgggctgttcgaggggcagagcctgaccctgaccacccgcaacttctactcgcgggaaaacatgaaggacagcttcaccttccgcattcccaaggccggcggcggctcccagcgcatccaccagcgcaacgcctgggtccagggcacggtgctcaagtacagctcgggctacacccagggcagcatcggcttcggcttcgacgtcgcagccttcaacgagatcgccctggagcgcggcaagggccgcatcggcggcggcggcaaccggaccctggcgaacagcgatggcgaggcgatcggcgagtggtccaagctgggcgtcgccaacatccgcctgcgcgcctcgaataccgaattcaaggccggtcgcttcctggtcaacactccagtgttcagctatatcgacaaccgtgccctgccctccagcttcaccggcttcgccgtgaccagcgaggagctggacaacctcagcctgcaggccggcagcttccgcaaggtcagcccgcggaccggttccggcgacgaggacatgaccaccgagtacggcacccgccaggtcaagggcgaccgcctgaactacctgggcggcaactacaagccgctcgacgggctggaaatctccctctatggctcgcatttccaggacgtctggaaccagtactacctgggcgtgacccacgacatcggcgacctcgagaacggcatcgccctgcgcaccgccttcaacggctaccacaccggcgacaccggcgcgcgcgaggccggctacatcgacaacgacacctggagcctggccttcactctcggccatcgcgcccacgccctgaccctggcctaccagcaggtcgacggcaacgaatacttcgactacgtgcacgagacctcggcgatcttcctggccaactcgatgctggccgactacaacagccccaacgagaagtccgcgcagatccgctacgagaccgactggagctactacggggtccccggcctgagcaccggcgtgtggtacgtgaagggctgggacatcgacggcacccactacgacggcgatcgcaacggtgcctacggcaactacgccgaggtgcgcgcccaggacggcgagaagcaccacgagctgggcctgatggcggcctacaaggtgcagaacgggccgatcaaggacagcaccttcaagctcacctacatgatgcacaaggccagccagaaccaggtcgacggcagcgtcaacgaactgcgcctggtcagcaccttccccttcaacctgctgtaa

SEQ ID NO: 343145 - DNA, 1452 bp, Pseudomonas aeruginosa
atgcgaccacgctctgccctgcgctacagcctgctgctgctcgccttcgccgccagcgccgccatccaggcccagccgaagaccctggcggtgtgcaccgaagcggcgccggaagggttcgatccggcccgctatacctccggctacaccttcgacgcctcagcccatccgctgtacaacgcgctggccgcgttcgctccgggcagcgccacggtgatcccggccctggcggaaagctgggacgtctccgctgacggcctcgtctacaccttccgcctgcgccagggcgtgaaattccacagcaccgactacttcaagccaacccgcgaattcgacgccgacgacgtgctgttcagcttccagcgcatgctcgatccgcagcaccccgcccacgacctttcgcccagcggctacccctacgccgacgccatgcaactgcgcgacatcatcgagcgcatcgagaagatcgacgagcaccaggtgcgcttcgtcctcaagcacccggaggcgccgttcctcgccgacctggccatgccgttcggctcgatcctctccgccgaatatgccggccagttgatcgccaggggcaagggcgacgaactcaacagcaagccgatcggcaccggcccgttcgtcttcacccgctaccgcaaggatgcccaggtgcgctacgcagccaaccccgactactggaagggcaagccggccatcgaccacctggtgctggcgatcaccctcgaccccaacgtgcgcgtgcagcgcctgcgccgcaacgaatgccagatcgccctgacgcccaagcccgaagacgtcgccgcgttacgccaggacccgcaactgacggtgctggaagaagcggcgatgatcacctcacacgccgcgatcaacacccggcacgaaccgttcgacgacccgcgcgtgcgccgggcgatcgccatgggcttcaacaagtcgtcctacctgaagatcgtcttcggcgaccaggcccgcccggccatcggcccctacccgccgatgctgctcggctacgacgacagcatccgcgactggccctacgaccccgaacgggccaaggccctgctgaaggaagccggcgtcaccccggacacacccctgaacctctacatcagcaccggcagcggccccggcggcaacccggcgcgagtggcgcaactgatccagtccgacctggccgccatcggcatccgggtgaacatccgccagttcgagtggggcgagatggtcaagcgcaccaaggccggcgaacacgacatgatgctctacagctggatcggcgataacggcgacccggacaacttcctcacccacaacctcggctgcgcctcggtggagtccggggaaaatcgcgcgcgctggtgcgacaagggcttcgacgaagccatccgcaaggcgcgcatgagcaacgacgagagccaacgtgagagagagtga

SEQ ID NO: 343146 - DNA, 918 bp, Pseudomonas aeruginosa
atgaacaccgatagcccgatcaaccgcgtcgaacaggtacaggtcgacgacctggcctgctggcgcatccacaccgcccatggcgaggcgctgatcgcccagcagggcgcgcaactgctcagctaccagccccacgaacagccgccgctggtctggctcagcgacgaggccggctaccggcgcgggcagtcggtacgcggcggggtgccggtgtgctggccgtggttcggtccgctggagcgcaacccgcaggaagtccgcggccaggtggaagatggcctgaaggcgcccgcccacgggctggtccgggcagtcgactgggaaatcgacgacatcgccgaggaggacggcgacctctgcgtcagcttccgcctcgacgcccccgatggcctccccggctggccgcacccggcggcgctgcgcatgctgttccgcttcggcgagcgcctgaccctgcgactcaccagcgagaacctcggcagcaagccgctggtgctcagccaggcactgcacacctacttcgcggtcagcgacagccgcgagatcgccatcgagggcctggaaggcgcgcgctacatcgagaccctggagaactgggaagaacgcactcagcacggcgcggtacgggtcaagggcgaactggatcgcatctacctcggtctcgaacgcgacctgctgatcaaggacccgcgctgggaacgcagcatccacctgcacgccctcgactcgcgctcggcggtggtctggaacccctgggtggacaagtcccggcgtctctcgcagttcgccgacgacgcctggcagcagatgctctgcatcgagaccgggcgggtctgggacgacctcatggtggtcgcccccgggcgcagcgaaagctttggcgtgcagatctggagcgagccgctgaaacgaccctga

SEQ ID NO: 343147 - DNA, 1074 bp, Pseudomonas aeruginosa
atggctctggataagatcggcggttttattgacgaaaacggaaagcctgtaattaagaagccgcaaggggaagttccgattgatgtatttggctatagaagttctgcctggagcttctgcaatacgtctgtatatccgtctcctatgggttatatggcatgcgctcagccgcgcatagagtcttacgtgagttctgctatttcttacaagcttcagccagtcccaaatagtagcggttatcgtgtcctctggactaataacaagactggtcaagagtcgcagttctatgttgaggcggtaggtaattgtccgggcattttggttgattcgacctgctatcaggaagaggtaataagtcctttcactgattcggattatgacagcctaaccgatacgttgtcgggggtggtggacccgaattggctcaaggacttgttaacggcgacttgtgaggggtctttgaatccggctgcttgctatgaccagatgtctgaaacgacgcaccttagcggtccgtcctcggtgtcggggcctaagacttcaagcacgacgacaaccacgaatcctgatggcactaccagtacgacgacgaaggacactcaaactaagtatgagattaagtatggcgataactatatcgactatacggaaacgaccacgactactacgacgaaagacggtgataaaactgaagagacgactacgaccgacactgacgacgtgacggtagaagttccttccgaagagaaagaggaggagggtggtggttttgaagatgccgaatttccggaagttaagccgttctatgaacagaaatatgaggatgggttggagggtgtatggcgtgacaagcgcgccgaatttgaagatacggagtttatgaagtttcttcaggggttcattccgtcgttttcggggcggtgtccggcatttgggctggatatgaatattgcgtcctgggcgaactatggttatcaacaattcgggtctatctgctatgtgcttgatttcgtgaaggcgattcttatggtttcggccttgttcttgtgtcgcgctctgattttcggaggttga

SEQ ID NO: 343148 - DNA, 174 bp, Pseudomonas aeruginosa
atgggcttgcacgacagggaatggttcaacgaaagccggcacaagcccaaaaacgccaccagcgcaccgcagcgacctcgcagagtcctgttcatccactacctggccgggttctggccgggcgtcctcatgggcttcctggcaggcctaactgtcggcctgctgatcagctag

SEQ ID NO: 343149 - DNA, 261 bp, Pseudomonas aeruginosa
  misc_feature (174)..(174): n is a, c, g, or t
atgcttgtcaaactccccgatgaatcccccgatttcgtagagaaactcaaggaacagaccggtgcgaccacggctgccggtgcctatcggttcgccgctgagcggtacgggtcgctgacctatcagctcaagcaagccatggatgaactggcgaggttgcagacccggtgcaangtccagcagcagatcatcgacaacgcccgcgcctctgccccttcgctgcttgaccacgtcgctcagggcgatcttctccagggctga

SEQ ID NO: 343150 - DNA, 1074 bp, Pseudomonas aeruginosa; identical to SEQ ID NO: 343147

SEQ ID NO: 343151 - DNA, 135 bp, Pseudomonas aeruginosa
atggctgatattttcggtgcggtagatttttccagcgtttccacctgggtcgtaagtgccggtgttgcgatcatcggtattgcgatggcgttcaaagggatcgacctgggcaagcgcggcgttaagaaggcctaa

SEQ ID NO: 343152 - DNA, 309 bp, Pseudomonas aeruginosa
atgcccttcgtctatctcggcctgacccgtgacgccggaacctcgaaaaagaccggcaacgcctacgacatttcggtcgttcacttcgctgtcgatgccacgcaatcgacccgccccgatcgcaagtttgccctcggcctggagccgcaaaacctgccgatcgcgccggaagcggtgagccagttccagcgcgttgagccgctgtcgtcggtgaacttcgagttcgagccggaccctcggaacatgcagcgcaaccgtatttgcggcgttaagccggtaccgaaagcgggtgctcaggcggcgtcgtaa

SEQ ID NO: 343153 - DNA, 330 bp, Pseudomonas aeruginosa
atgacccttgcagcaaacctgaaaaaatttcgggccgcccgaggcttgacgcaacagcaggtatacgaggccgcaggcgtgagcaagtccagctatacgggctatgaagcgggccatggaatgccatccgcagacaaagccctggccatggcaaaggtgctgggcgtaaccacagacgaactcttgatggacgagagcgaactactgatatctgacgacatgcgtccgatactgcggagattcgaagccctgccggtagagatcaggaatcaagcacggatagcactgaaaggagtgctattcgggtacgagcaagaagcacttcgttag

SEQ ID NO: 343154 - DNA, 672 bp, Pseudomonas aeruginosa; identical to SEQ ID NO: 321489

SEQ ID NO: 343155 - DNA, 273 bp, Pseudomonas aeruginosa
atggaagagtctggaatattggggttcaccgttacaggtgctgtggagaaggtcacggacttccgcaccgcgccgttctgctcacaggcggtcttcgcccagatgctgggcctggaagacatcacggaagacgtggtgcggggctgggtggaaaccaagacgatcccgaccgccaagattggtcgtcgccgcgtggtgaacctgcaccgtattcgccgtgacctcgaccggggcaaatcgatcttctgccagggtgattacgatgccgagtga

SEQ ID NO: 343156 - DNA, 180 bp, Pseudomonas aeruginosa
atgaacggcacgaagcgcatgcagaagcgcgtcgccgccgcgaccatgatgatgttcagcgcctgcggcacgccgaagaaggccagccccgccgcaatcggacccggcagcgcggcgtacatgctgcggatcatctgcggcacgccaaggctgtcgatcagttcgcgggcggcggtgtag

SEQ ID NO: 343157 - DNA, 1245 bp, Pseudomonas aeruginosa
ttgagggagcacggcgagccgttgcgcagccgcatcgaggcgctgtaccgcgaggagtcgcggcgcgtgctggcgacccttatccgcctgctcggcgatttcgagctggccgaggaggccttgcacgacgccttcatcgccgccgtcgagcagtggccgcgcgacggtatcccgcgcaacccgcgcgcctggctggtttccgctgggcgcttcaaggccatcgacaacctgcgccggcgagcgcgtttcgacgcctcgcagcgactgctcgccgagcaactggaagagcaggccgaggcgccggcggaggagggcgatgcggtggaagacgaccggctacgcctgatcttcacctgctgccacccggcgctgacccccgaggcacaggtggcgctgaccctgcgcgaggtctgcgacctgcgcaccgaggagatcgcccgcgccttcctcgccgcgcccagcgccatcgcccaacgcatcgtgcgggccaagaacaagatccgcgaggcccggattccctaccaggtaccgaccctggaggaactccccgagcggctgggcaacgtcctgcaagtgatctacctggtgttcaacgagggctactcggcctccaccggcaccagcctgacccgcgccgatctcagtggcgaggcgatccgcgtcggccgcctgctggtcgaactgctgcccgaccccgaggccctcggcctgctcgccctgatgttgctgcacgactcgcggcgccaggcgcggacctcggccagcggcgaactggtgcggctcgacgagcaggaccgcgcgctgtgggatcgtggactgatcgtcgaggggctcggcctggtcgagcgggccctggccagccgccgtttcggggcctacaccctgcaggcggccatcgtcgcggtgcacgcccaggccccgcgcgccgaggacaccgactgggcacggatcgtcgccctctacgacgcgctgctgtacctggcgccatcgccggtgatcgaactcaaccgcgccgtggccttggccatgcgcgatggcgtcgaggtcgggctggccgcggtcgatgcgttgctggcgcggggtgaactggccgattaccacctggcgcactcggcgcgtgccgacttctgccgccgtctcggtcgccgccgcgaggcccgcgaggcctaccgcgcggcgctggccctggcgcgccaggagccggagcggcgcttcatcgagcagcgcctgcgcgaactcgattga

SEQ ID NO: 343158 - DNA, 2250 bp, Pseudomonas aeruginosa
gtgccggccgacctgcggctgttcgaaacgaagaacttccatgtcgacgagtcggccctgaccggtgagtcggtgccggtggagaagggctgcgtcgcggtggccatcgacgcgctgctcggcgaccgccgttgcatggcctattccggcaccctggtgaccagcggccaggcgcgcggagtggtggtcgccaccgccggggataccgaactgggccggatcggtacgctgttgcgcgaagtccgcaccctggccactccgctgctgcgacagatcgccagcttcagtcgctggctggccctggcgatcctgctgctggccggcgccaccttcgtcctcggcaccctctggcagggccagccgatggtggacatgttcatgctggtggtggcgctgaccgcctcggcgattcccgaggggctgccggcgatcatgacggtgatcctcgccctcggcgtacagcgcatggcccggcgcaacgccatcgtcagccgcctgccggcggtggagacgctgggttcggtgacggtgatctgctcggacaagaccggcaccctgacccgcaacgagatgaccgtgcagcgtatcgtcaccgccgaccaggtgatcgaggtcagcggcgccggctacgctccgctgggtggtttcagccacaacggcgaaggcctcgatcccgccggacgcgacgatctgcaggagatcggtcgcgcggcgctgttgtgcaacgaggcgcgcctgcaccaggagggcgaggcatggcaactggagggcgaccccaccgaaggcgcgctgctcagcctcggcctcaagctgggcctcgatccgcaggcgctggcggcggaacggccacgcagcgatgcgattccgttcgagtccgagcatcgcttcatggccaccctgcaccacgaccacgcgggccaggcgatggtctacctgaagggcgcgccggagcgcatcctcgacatgtgcgaggctgaacgggtgggcgactcggtgcggtcgctcgacccggattactggcggcgcctggccaccgacaccgccgctcgcggcctgcgcctgctggccatcgcccggcgggcgatgccggcagagcagcgcacgctggatttcgccgacgtggaacatggcttcaccctgttggccctggtgggcatcatcgatccgccgcgcgaggaggccgtggccgcggtcgccgaatgccaggcggcgggtatcgcggtgaagatgatcaccggcgaccacgtcgacaccgcgcgggcgatcggcgccatgctcgggatcggcatcgaccggccggcgctgaccggcgcggagatcgaactgctcgacgaccagcgcctgcgcgaagtgctgccgggcgtcgatgtgttcgcccgcgccagccccgagcacaagctgcgcctggtgcaggccctgcaggccagcggcgaggtggtggcgatgaccggcgacggggtcaacgatgcgccggcgctgaagcgcgccgacgtcggcgtagcgatgggcaacaagggcaccgaggcggccaaggaggcggccgaggtggtcctcgccgacgacaatttcgccaccatcgccaatgccgtgcgcgagggaagggcggtctacgacaacctgaagaaattcatcctcttcatgctgccgaccaacggtggcgaggcgctgatcgtgatcgccgcgatcctgttccagttgaccctgccgatgacgccggcgcagatcctctggatcaacatggtcacctccagcaccctgggcctggcgctggccttcgatccggccgagcgcggcctgatgcagcgtccgccgcgcccgccggcggagcccctgttgtcgctgttcttcgtctggcgggtgctgctggtctcgctgctgatgatggcgggcgccctgggcctgttcctctgggagctggagcatggcaccgggctggagcgcgcgcggaccatggcggtgaacagcgtggtggtgtgcgagatgttctacctgctcaacagccggcatatctacgattcggtgctcagccgcgagggcctgttcggcaaccgccaggtcttgctggcgatcgccgcctgcgtggtgctgcaactgctctatacctacgcgccgccgttgcaggcgctgttcggctcggtcggcctggccccgggcgagtgggcgcgggtgctgctggccgggctcggcctgttctgtgtcgccgaactggaaaagtggctatgtcgccgggtccgtgcccggcaggcctga

SEQ ID NO: 343159 - DNA, 549 bp, Pseudomonas aeruginosa
atgagccccaatccctttctacgcggttacgacaagctgtccattgaactgatcgtgcacgacctgcaggcaggcagcacggtacgcgaaatgtcctacgtgattcatgcccaagaccaggaacacacgttagtgctcggtatacagccgacaccggagctagctcgcgacatcgtgcagcgcttgagctttgagaccgggcacttcagccggtgctgggaaatcagcgcagagcatctgccagagaacgtgctgaaccaacttttccttatgcgcaccgatctccacgccctacagctggagtttttcgagaacgccaatcaaagcgtaattggctgcaagctgcgtaacacaccctggacggatcagcacctgcacctgttcaacaccagttcggctgagctgcgtcagcagcagttggactatgggttgcccgccgaactcgtggagatcctgcacctggcagggcaggccgacgtgcgctttttgctgttcgacccggatgcggcgttgctggatgggctgcctgtgttcaaggatgtggcgtaa

SEQ ID NO: 343160 - DNA, 189 bp, Pseudomonas aeruginosa
atgatcttactgagatttttaggtctgctgttcgtgctcgtctgcctcttcgccggtaccgcagctgtcgtcgcgctggcggttctggcgctgcgcttctggccattgctggtggtcatcgtgctcgccctgctgctgtcccagcgcttcatgcgttggaccggcgtgcgcctgaatacatcggtctga

SEQ ID NO: 343161 - DNA, 180 bp, Pseudomonas aeruginosa
atgctcattctcacccgcagcattggcaaaaccatccgcattggcgatgacatcgagatcgtcattcttcaagtcaagggccaccaagtgcgcgtcggcatcaccgcgccacccgacatcgctgtgcatcgtgatgaggtctatcaacgcatccaggctgcacaggtcccgctgtcctga

SEQ ID NO: 343162 - DNA, 993 bp, Pseudomonas aeruginosa
atgtcggaaaccgtaaacgttggtgagattgccgagaagctttcagtcgatatcttcggcagctttttctggcaggtgaaggacaaatggaacgagaattttgactgccactgccctgcacacttgggcggcgatggcaagccaaaggcacagcatcctggcgatgccatcttctactacgaagacccctatctcggcagcacgatttacctgcacaccgacctcaaagcctacaagaaagaaagtatcggcaagcaaaagcttcgtgacgccttcaaatccttggcagtgactgtcgagtgcgccagggattcggagtcctggcgaagtactttcgcgattactgactgcgaaaactacgatgttcgcggccttctcttcgtgcataaccatgatcatgggtatgaaaagccattttatgacctgatcgaaaaaatcggctttgactcgatctcgataccgcccaatgtctatcttcactaccttgggccgcatgacatcaaccgtttgtttactatcgctaacgacatgcttcgcctgacgagccagaagagaatgtctagcgaatacaccttctactaccccgaccttgtgttgcgtcggcggcagggggacgtatgggggcaacctgcaaccatcgaagcgcttacaagcccttacctgattgtccagcacaaaggcacggacaagaccgagccaggctacgtggtgtactacaaccgtcccggcgcctcgcatgctgagttcgaatactttttggacagcctgtcgcgatatcagatgctggagtcaggcaagtcggttcagattcgggtcaccgtgccaaatgctgattctcagatggtggcgaacttcaaagcagccaaagagaggtacgccaaggcttggggcttcgatccgattcgggaaactgtcttgaacgcgatcagttttgagtcagttaccgcaatgacggattcgtacaatccgggatggatggggtggcgcaattga

SEQ ID NO: 343163 - DNA, 1101 bp, Pseudomonas aeruginosa
atggatggggtggcgcaattgaagaagaggaccttcggcccggctatgtactacgcatcggacaaaaatgtctttgatgcactgattcaacatcgagtggatgctcctaccctggcggtgctgtttgaacgccgcaacatgattgtctccaaaaagaccccgagagacgatctggcggagtatttttcccgccttcctcacgactactatgaccacaggatcatatcggagaagctgggtattcttcctcgcagagagcgcaccacctccatggatcttgttggaaccatcgatcccgaggagctgaagttcgctcttgaagagattaagaaggaaattgttgccaatggtgatgtcgcccacatcgttaggaatggcaatgacttcacgctgagaatccagtactcgctcattgattacaagaagaccgagtttgcacaacaacaaatcaaggatggtgtggtcgagtttatcaagagcgctgaaggctacctgatcaacaacgcacagaacgaattcatgaacgctgtgcgggatgaagttgtcgcaaaggtggacatgctaatccccgacgatattgagcgcgtcacagtcaatctgtacgacgtgattgaccctaagatgaggacgcgcttcttcattgatctcagtacaagcctggatggcttcagtcgtcgcgatgtgtctgacgtttatgtatataagccgaagctgggcatcgacgatgaggaattagcatccgatgagcacgagacacatatcgagaaagtattgcttaagggtaacggcgtaactcgctcgtccttgcttcttgatcttgtggatgaggatgcattctatatatttaagatgtgctggactgcgcggcgtgctcttgggaatggagatgtaattagcgtggaagttatgtttgcagatcccaagaattgcacggacttctcggtcttggtcaaatctgtatacccttatgtagacgggaaattgggtaaaaagcgcacgcccttgaagtctgaaatagactcgatatctaggttgattgagagagctgcacgtgaacagatgcagaaacttaggactgaatgcactcaaggagatgagtag

SEQ ID NO: 343164 - DNA, 669 bp, Pseudomonas aeruginosa
atgatttcacgctacaagtggtatcaggtgcgtttaccttgctctgtggccgaattcttcgctaggctacgagccgtagggtacgacaacgcaggtgcaacaggctttttgatcagtgaaagcgagtcgtcctttcgttatatttggccatctactatcaacgctgtccgcttagacagtgatgggaatgctgagtatcagcaggtcgtcaccgtcaactcccagtctgttactgtgctcaacgagcgctccacaatttttcgatttgagagcccggcaaggtcaatgcgtgaagttctgaatgccttggagagagcaataggatttggctttgcttgtgagcagatcgtcatcagtgacggtctggtacaagcggcactagaaaaagccactagcaaagtcctgaacagtctgaaagtttcaggcgcgatcccgaaggccaactcgctcgctcggattgagctggcatctaaagaaggcatcaatacagagaatgtaaaactactggggctagctgatttcctggtcgaggcagcctcctacgaggtcacctacaagggggttaaaggtcagataggattttcacgctcagccgcctgtaggatcagcggcccacttacaccattcatcctgagcaatatcgaaagcgccctgcaggtaaagcgctag

SEQ ID NO: 343165 - DNA, 1125 bp, Pseudomonas aeruginosa
atgagtgagcgcggagaccgcctgagctgggcggagattcgtcgactcgcactgcgccacaagaaagccctgttgctcgccaacctggtggcggtgctggccaccctctgcaccgtgccgatccccttgctgctgccgttgctggtggacgaagtgctgctcggcaagggcgacggcgcgctgcgtttcatggaccgcctgttgcccgccgactggcaggtggcgttcggctacatcggcctgatgctggcggcgaccctcctgttgcggggggcggcgctggtgttcaacgtgctccaggcgaagctgttcgcgcggctgtccaaggacatcgtctaccgcatccgcctgcgtctgatcgagcgcctccggcatatcgccctgggcgaatacgaaaccctcggcggcggttcgatcagcgcccacctggtgaccgacctggacaccctggacaagttcgtcggggaaaccctcagccgcttcctggtcgccttgctgacgctgctcggcaccgccgcgatcctggtctggatgcactggcagctggccttgctgatcctgctgttcaacccgctggtgatctggtccacggtacaactgggcaagcgcgtcaagcacctcaagaagctcgagaacgacagcaccgcgcgcttcacccaggcgctcaccgagaccctcgaggcgatccaggaagttcgcgctggcaatcgccagggctatttcctcggccgcctcggccatcgcgcccaggaagtccgcgactacgccgtggcctcgcaatggaaaagcgacgccgccgggcgcgccagcggcctgctgttccagttcggcatcgatgtgttccgcgccgcggcgatgctcaccgtgctgctctcggacctgtcgatcggccagatgctcgcggtgttcagctacctctggttcatgatcgggccggtcgaacagctgctcggcctgcaatacgcctactacgccgctggcggcgcgttgcagcggatcaacgagttgctggcgcgggccgacgagccgcgctacccgccgctgcgcgatccgttcgccggccgcacgagcgcgggctggatttcgcctacggcgaggacaaggtcctggagcagttggacctga

SEQ ID NO: 343166 - DNA, 420 bp, Pseudomonas aeruginosa
atgaggcagaaccggactctcgacaagccccgcctgctcggcctggtatggcccttcatcgtcgtggtgctgttgcaggccatgctggcgggcggcagtctctacgtcctctccgcggtgcgcagctatgtcggcggcgaaagcctctggtcgaagggccagaaggatgccatctactatctcaccctctatgccgactcacgcgccgacgaagacttccgccgctacgaggaggccatcgcgatccccctcggcgaccgcgagatgcgccttgccctggaccagcccgacccggacatcgaggcggcccgccagggcatcctcaagggcggcaaccatgccgacgacgttaccgcgatcatctggctgtaccgcaacttccacgacttcagttacttcgagcgcgccatcgagctgtag

SEQ ID NO: 343167 - DNA, 915 bp, Pseudomonas aeruginosa
atgaaccgaaacgacctgcgccgcgtcgatctgaacctgctgatcgtgttcgagactctgatgcacgaacgcagcgtgacccgcgccgcagagaaactgttcctcggccagccggccatcagcgccgcgctgtcgcgcctgcgcacgctgttcgacgacccgctgttcgtccgtaccggacgcagcatggagcccaccgcgcgagcccaggaaatcttcgcccacctgtcgccggcgctggactccatctccaccgccatgagtcgcgccagcgagttcgatccggcgaccagcaccgcggtgttccgcatcggcctttccgacgacgtcgagttcggcctgctgccgcccctgctccgccgcctgcgcgcagaggcgccggggatcgtcctcgtcgtgcgccgcgccaactatctattgatgccgaacctgctggcctcgggggagatctcggtgggcgtcagctacaccgacgaactgccggccaacgccaagcgcaagaccgtgcgccgcagcaagccgaagatcctccgcgccgactccgcgcccggccagctgaccctcgacgactattgcgcgcgaccgcacgcgctggtgtccttcgccggcgacctcagcggcttcgtcgacgaggaactggagaaattcggccgcaagcgcaaggtggtcctggcggtgccgcagttcaacggcctcggcaccctcctcgccggcaccgacatcatcgccaccgtgcccgactacgccgcccaggcgctgatcgccgccggcggcctgcgcgccgaggacccgccgttcgagacccgcgccttcgaactgtcgatggcctggcgcggcgcccaggacaacgacccggcggaacgctggctgcgctcgcggatcagcatgttcatcggcgatccggacagtctctga

SEQ ID NO: 343168 - DNA, 759 bp, Pseudomonas aeruginosa
atgcctggcgcttcgaactgccgttgccgcccagtgccgccgccgcgctgccgtcgaacagttcgaaggtcaacgccaggagcgcctgccgcgcgtcccgatgaaccacccgcagcgccaccgattcgcccaggccctgttcgccgagtgccgccagcaacccgcccggcgagcgatcgccgagcaattcggcaaacgccagcagggtctgttcgtcggtcccccgcaaagcgtcgagggcaaagcccagcaccagccgcggaggtcccggcaggcgcagcgccagcgcttcgccggcgaagggcagcaacggcggcggcggcggactcgcgcctggcgcgcgccccggcaggtcggcgcaggcacgctgcgccagcctctccagctcgtccagtgcctgcggcccttgcagccatagctggcaattgccggcgtgatagtgggcggcatggaattcgcgcagggcccgctggaacgcatcgctctccagggccaggctgtcgcggcgcccggcagcgaaacgccgcagggggtgtccggcgggcaggccgagggccagcgccgcgtcgatcagggtctgctcgtcggccgagcgcgccaggtattcggcctcgagtacttcgcgctcgcgccgttgcgcatcgatgtccagcaaggggcgggcgagcatgtcgatcagccgtgccagaccggcgccaaggtgctccgccgtcacctcgaagaaatagtcggtggtcctgccccgggtgctggcgttga

SEQ ID NO: 343169 - DNA, 1197 bp, Pseudomonas aeruginosa
gtgaccagccgctcggccctgctgaacgtcgacaccgtcagcagcggcgacaaccagatcgtggcgaagatcagcaccaagagccagggcgaggtgggcgacgtgatcggccagatcggtggctcggccaacgcccagcgtgcgggcgcggccttcagccaggtggtgaccgggctggcgcagagcaatcccaacgatccggtcttccaggcctacgtgaatgcctcacaggatccggcagcgctgaagaaactggctgagcaattggcccccgaagtaaacggtggcgcgacccaagccgccaccagtgggcaaacgctggtgagcaacgtcaccggcaatcgcaccagcagcctacggggtgcgtcctcgggcgatgtactgcagaacaccggtatctgggcccaggcgttgtacagcgatgccaaccaggatctgcgcgacggcgtcgctggctttaacgcctacagtcgcggcattgccatcggcgccgatggccagctcaccgaccagttgaccctgggggtggcctacagcttcctgcataccagcgtaaacagcgacaacggcaacaccaccgatgtggatggcaatgccctcaccctgtacagcggtttcgaacagggcaactacttcgtcgacgccaacctgagctatggcctcaacgacaacgagagcaagcgtcgcatcgccagcaccacggccaagggcgactacgacagccaggtgctgggcgccaatgtggtcggtggctacacctatcacctgaatgatcggttcctggtcgagccgcgcctggccgcacgctatgcgcgtgtcgatattgatggctaccacgagaaagggtcgtcggcagcgctcaaggtggatagccaacgctacgaagtggcggagctcggtgccggtgtgcgcgtggcgggcgacttccaggtcggcaacggtaacctgcagccgcaggccaagctgatggcctaccatgacttcgccgcggaccaagcccagagcacctcgaccttcgtgctgggtggcacgcccttcgtgagccagggcgccaaggccgtgcgcaacagctacgaagcgggtatcggtgcggactaccacctgggtgcggttacggttggggtcagctacgactacaccggcaagaccgacttcaacgccgacaccttcaccgccaaggtccgctacgacttctga

SEQ ID NO: 343170 - DNA, 888 bp, Pseudomonas aeruginosa
atgagccatcacctttccggcccacctctgtgggccggttttcttcgagttctcccggcgctgctgctcggcgcccttctcgccggctgccagtcgcctcgcgaggcgctgcagcagttggcggatgcgcatgggaggaaactggagatcctgccggggcagccgtttccgctggtcatgctggcgccgcagggcaccacgaaagccactcgcctgcgcgtctacctggaaggcgatggtcatgcctgggccaccgccacgcaacccagcctggatccgagcccgcacaatctgttggtggtgcgcctggccatggacgatccgacaccgaatgcctacttggcgcggccttgtcagttcgtgatggcatcggcctgcgaacctgacttctggacccatcggcgcttttcgcaggaagtcgtcacccgcctcagtcaggctctggaccagttgaaacagcgctatggcaatcgtgaattcgagttggtggggtattcaggcggagctgcactcgcgctgttgttggccgtccagcggagtgacgttgctcaggttcagactctagcgggcaatctcagcccacggctttgggcgcaaatgaaagggctgtcgcccctcggcggttcgctggatccgctggactatcggaatcgcctggcagcgataccacaacggcacttggtgggggacgcagacggagtggtcccaccatcactggccaagacctacctgaaacagctacgtccatatgcctgcagtcaggttgtagtctctccggctacagatcatcagaaaggctgggagaccgcttggcgaaaatggtgggggcagccgctaaattgcaagagcaatagagtccacagccacaagccgccgacgagacaatga

SEQ ID NO: 343171 - DNA, 294 bp, Pseudomonas aeruginosa
atgagtgagcaagacaatcaacacggccacgtgcaccaatcccacggcgcaatcgtcaaacgcctcaagcgtgccgatgggcatctgcgaagcatcatcgcgatgctcgaagatggtcgtgagtgcgtggatattgctcagcagctgtatgcggtcgaaaaggccgtgtgccaggcgaagcggaccctgatccaggatcacatcgaccactgccttgagcacgctctgcacgacgaggctgctcgcagcagcgatgcactggacgacttcaagcagatcgtgaagtacctgtga

SEQ ID NO: 343172 - DNA, 705 bp, Pseudomonas aeruginosa
atgttcaacagcaaactccccacgctcaatgagctgccgacttcggcgcaactgatccgctccaccgtcctcgcggcgattggtgctctggttcttctcgtcacttttgtcatgccgtcggaatatgcaatcgacccgacgggagtgggcaagatgctgggcctgacgcagatgggcgaggtcaagctccaactcgccaaggaggccgccgccgatgctgccgcagcggagcaacccaagctgaacgctgtcatgggggcagccgtcgccgcgacctatgagccgaccgacgaagtggaaacctttgccgaggcacccccggttgcctcgcagccgcaggagcccgctgcggtgcagcctgcccctaaggcaaccgccggccagcgccatgaactgagcattaccttggctccgaatcaaggggctgaagtgaagctggagatgaaggaaggcgcgaaggtcaattacgtctggagcaccagcggtggcttcgtcaactacgacactcatggcgatccctacaatgccccacgtggtttctatcacggctacggtaaggggcgctcgacgccagaggaccagggcacgctggaggcggcgttcgacggcaaacatggctggttctggcgtaaccgctccaacaagcctgtcaccgtcactctcaagaccgagggtgactacctcactatcaagcgggtgatctga

SEQ ID NO: 343173 - DNA, 1137 bp, Pseudomonas aeruginosa
atgtccggcttcgcagaaatcctccaacaaggtaccactcatgcctggctctacttccccagcgccatccttctcggggcgctgcatggcctcgagccggggcattcgaaaaccatgatggcggcgtttatcgtcgccgtgcgcggcaccgtgaagcaggcgaccctgctcgggctggccgcgactgtgtcccacactgcggtggtctgggcggttgcgatggtgggcatgtacttcggccaaaacctcaacgccaagacgactgaaccctacttccaactggcctctgcagcgatcatcatcggcatcgccttgtggatgctctggcgcacctggcgcggcgagcagacgtggcagttcgagcaggaggaaggccacggtcacgagcacggccacgctcatggccacgatgaaacacgccacattgataccggccacggccggatcgagctgtcggtgttcgaagaaggcgtacctccgcactggcgtctcaagaccctgagcgggaatcgctgggccgccaccgatgtcgccttgcagaccacgcgcgccgatggccgcatgcgccgcttcgcctttgtcgaccggggtgactacctggagtcgatcgacgagattccggaaccacacgagttcaccgttcggctgagcctcgggcacgccggccattcccatgactatgacctggagttcgtcgagcacgaacacggtcatgaccacgccgacctcgaagggctggaactgtcggtggaaggctaccaagacgcgcatgaacgggcgcacgccaacgatatccgcaagcgctttgccaatcgtgatctcaccaccggccagatcattctgttcggcctgaccggcggcctgatcccttgcccggctgccatcacggtgttgctgctgtgcctgcaggtcaaggagttcgccctaggcgcagtcctggtgctgtgcttcagcactggcctagcgctgaccctggttgcggtcggcgtggcggcggccatcggtgctcggcaagcctccaatcgctggccatggctgggtaccgtggcacgtcgcgctccgtacctgtccagcgtagtcatcatcgccgtgggcctttatgtcggttaccacggctggatcggtctgagcggttga

SEQ ID NO: 343174 - DNA, 438 bp, Pseudomonas aeruginosa
gtgtgggaggctggcggctatcttgggctgttcatctcggcgttcggtgccgccacgctgctgcccttgcagtccgaggcggtactggtcgccttgatattggccaaacaacacccggccggggcattactgctgatcgccacggtcggcaatgtcgcaggatccgtcgtgaactgggtgctgggtcgatacctggaacagtggcgcgacaagcgctggtttccggtctcgccccaacgtctgcgctcggtgcagggcacttaccaccgctttggaaggtggtccctgctgctgagttgggcgccggtgattggcgatcccctgaccgtgatcgctggccttatgcgtgagccgttgtggagcttcctgatgatcgttaccttcgccaaggccatgcgttacggcgcgctttatctgatcaccctggggtggctatga

SEQ ID NO: 343175 - DNA, 726 bp, Pseudomonas aeruginosa
atgagtgcgtcgacgcccaaggagcggaatctttctctggacctgatcaaatggttggcgatcatcaccatggtcatcgaccatctccaatacgtcctgccgaactccgggtatctgttcgtcatcgggcgcttcgcttttccggccttctgcatggcggtcgcggctaacgtgttccgctcgcaacgcggagaccttttcagcgatgcgaatgtgcgctacctgacctggctggtcgtcttcgcaacggcctccgaagtgccgtttcgctggttggcgaccagctccagcacgatgaacgtcatgccgacactggcattcggattggtcgcagcctggggctttcaccaccgcactcgcgatagcgcgatcctggccgcagtgaccctggctgtgtcactggtcctgcatcaaagcctgatgtatggcgtcttcggggttcttctgcccgcggccttcgtcgttgctctgcagtatccgcaggccggttggctggcccctgcgatcatggcagtgctcgccaatagcaggaaccactgggtactgacattcagctccgctcccatggcactcggtgtattggtggcggccttctccgcgccaattgcctgtctgtggttattgagccggccaactcacctcgcgctcccgccagtcaagcgctgggggtattggttctatccgctgcacatgctggccatcaagctcgccactcaaatcgcctag

SEQ ID NO: 343176 - DNA, 1299 bp, Pseudomonas aeruginosa
atgctttccgttctagccaaccgcacttatcggcacctattcatggcgcaggtcgtggccttgatcggcaccggccttgccaccgtagccctggggctcctcgccttcgacctggcgggcgcccaggcgggcgcagtgcttggcaccgcgctcgccatcaagatgacagcctacatcggcgtggcccctatagccgcagcctttgccgagcgccttccacgcagaaccatgctggtcaccctcgacttggtacgcgccggcgttgcgctgctgctgccgtttgtgacggagatctggcaagtctacgtattgatcttcgtactgcagtccgcctccgcggctttcactccgactttccaggcaaccattcccgacattcttccggacgaacgcgattacacccgcgcgttgtctctgtcgcgcctggcgtatgacctggagagcgtcatcagccctatgctggcagccatgctgctgaccatcatgagcttccataacctgttcgccggaaccgtggtcggcttcctagtctcggcggccatggtcatttcggtgaggcttccgatcgcccaagctggtccaaaacgcggcatctacgatcgaaccacccgaggcttacggatcttccttgcgacgccaagattgcgaggcctcctggcactcaacctcgccgttgcagctgcaagcgccatggttatcgtcaatacggtggtcatggtgcaagggagtttcgggcttacgcagagctccactgccacggcactcatggccttcggcggcggttcgatgctggtcgcgttgatcctaccgcgcctgctggatcgtctggtcgaccgcaacgtcatgctgtttggggcgttggccctagtcattgggctcttcgccggagcatgggtctccggcttcaatcagcttctggttttatggttcgtgctgggcgccggctactcactggcgcaaacaccctcagggcggattctgcgccgctcctccaactccctggacaggcccgcgctttttgctgctcagttcgcgctgtcacacgcctgctggctgatcacctatccgcttgccgggtggctgggtgccaacatgggattgaaagcggcgttcgtggggctggcagtgacggcggcggtatcgctgggggttggcttccggatctggcttccggagcatgacagggacgaagtggagcacagtcatgatgacctgcccggcgaccacacccatatcacggatggaaaaacacactcgcataccttcgtcatcgacgacgaccacccacgctggccttga

SEQ ID NO: 343177 - DNA, 234 bp, Pseudomonas aeruginosa
gtgattgtagaagcggattgcaacaaggccatggggcgtatcgcaatgataaggcagtggtctaggcataactatcactacgggatgaggccggatatcgccaagatcatttccgtggtgccggagttcggttgcggcgtggtgccggttcgcatgcgctacctggagtctagcggtgccgagcagaccatcgaatatcgctccgagcgggcctgttgcagccgcatcatgtga

SEQ ID NO: 343178 - DNA, 681 bp, Pseudomonas aeruginosa
gtggtagctgaatcgctctcactgctgcacccgttgaaagttgagatcgtggaattccttgaggatgaacatgatcttcaattcaaagtggagtttcctgctccagagttctgcacagcctgtggcgctattggccagtcgatccgcttttctaagaagctgaccaagtacgttgacctgccaatcaggggcaagcgcacggtgctctggggtatgcgtcggcgctacaagtgcaagacgtgcagcaaagtgttctcgccggccctgctggatttcgacgagaagcaccgcatgacgaggcgctgccatgcctacgtaatcaagcaagccatgaccagcacaaactcagcggtagcccgcgatctaggcgttgatgagtcggtggtacgccgggctttgcgcgactactgcgccgagcaggaagcggggtacaggcccatgcttccgcgtgttcttggcattgacgaactgcttgttggcggcgagtaccgatgcgtactgatcaacctggaagaaaagacgatcatcgacgttctgcctaaccgcaagaagatcgtgatccataactacatctccaacatgcgcggacgggatagggtccagatcgtctgccaggacatgttccacccatacaaagacgtctcgctagtgttctgtctcaaaaataagtattccatttga

SEQ ID NO: 343179 - DNA, 762 bp, Pseudomonas aeruginosa
atggcgcgtgtcgctggtatttctcctgccagcgttcagcggatctgggctgcaaacgacatcaagccgcacctcacccgcaccttcaagctgtccaacgatccgcagttcgaagaaaaattctgggacgttatcggcctgtacctggcgccaccggataaggcgttggtgctctgctgcgatgaaaagagccaggttcaagctctgcaacgcacgcaaccaggcttgccattgggcatcggccacatccgcacgcaaacccatgactatgtccgccacggcacgctaacgttgttcgctgccatggactatctgcaaggtcggctgatcagcagcatcgaaacccagcatcggcatcaggagtggctggccttcctgaaaaagatcaaccgagaaacccccaaaggtctgcaactgcatttgatcgtggataactacgccactcacaagcatcccgtggtcaaggaatggcttaagcggcatccacgattccacctgcatttcaccccgacctcaagctcctggatgaacatggttgagcgcttcttccgggatatcaccgtttacctgcgcgacggcagcttcagttccacacgtgaactggccagctccattaccacgtttttagcgctgcacaacgcccaaccctctcggtacgtctggagcgcgaaaggtgaagacatcttgcgcaagatccagggtgcccgagaggcaatggcacgcgagaataaagagaacgttttatctgagacaggacactag

SEQ ID NO: 343180 - DNA, 630 bp, Pseudomonas aeruginosa
atggaccagatacgcaagcgaatcaagcgaggtcttaccgctccccagaagcgcaccctgaaaggcgaccgcaagctaatgctgatgcgacggcgtgacctggacgtttgggcgcacctgaaaatcaagacgtggttcgatcagtttcccgagctaggcaccgcctacaatctcaaggaaggcttctacaacatctggaatagcaagacccaccatgcagctaggcaagcctatgacgattggcggcagcgcatccccgctgagcaggagaaggactggaaggtcgtcacgaccatgatgaccaactggggcgagtacatttttaactacttcaaattcatccctcagcggtacaccaacgcgctaaccgagtcggtcaaccgctacctgcgcgacgtaaaccgtaacgcacgaggcctgagcttcgagatgttccgcgccaagatcatgttcacccttgagcacaaggttaaggcgccggagaccaagcgcctagcgccgttcctggccagggaaatcatggcggtcgagcccatcgaggacgaactggtggactacggggttccgattttcagcctcctgcagctgtactcagaaccagaaacaggagctttccaagaggaaggctaa

SEQ ID NO: 343181 - DNA, 207 bp, Pseudomonas aeruginosa
atgaagacccagcccaggagttgcgccgtcatcagcagtgtcgtggcgttggcgcaggcgctgggaatttccctggtggtggaaggggtggagagcgacgaacaacgggtacgcctgatcgaactcggttgctccatagcccagggctacctgttcgcccggccgatgccggaacagcactttctcgactattgctccggatcctga

SEQ ID NO: 343182 - DNA, 591 bp, Pseudomonas aeruginosa
atggccgacctgaccagcctgagcatcgagcatctgcgctcgccacggctgtatacccaccgtctgatcctgcggccctggctggtgcaggaccgagccaggttcgccgagctgaatgccgacccgcgggtgatggagttctttccgtcctgcctggatcgcgcccagagcgacgcgttgctgcgccgcatcgacgcgcacttcgccgagcacggttttggctggtgggcgctgcaggtcaagggcggcgatcctttcatcggctacgtggggctggaggtcgtggacttcgatgcgcccttcgtacccgcggtggccatcggctggcgtctcgccgccgagcattgggcggagggcttcgcccacgaggcggccgaggcggcgctgagctacgccttcgatacccttggcctggatcaggtggtggctttcaccgtaccggccaacgagaactccctgggactgatggagcgcctggggatgcatcgcgatcccaccgacgacttcgagcatcccgacctgccccccggccaccgcttgcggcatcatgtgctgtaccggttgacgcgcgaggactggcttcgcagatga

SEQ ID NO: 343183 - DNA, 1020 bp, Pseudomonas aeruginosa
atgaaaattagggcattcgccggcggggcaatagcctattctggggctgttgcaaaagctgtcgccatggctgacatagtagaggcatctttgaatgaaggaatgcccccgaaagatgcagtgagaagggcctttatgaatgtccagccaattgaagaaagtgaacatacttcattgcttctggcatgcgatgaagcgggagcgccagccttatatcattttgatacccagggtgccggcagcatacaaagtattgaagggcttgtgcaaatcggctcgataagcacccatcatagaattaacacggaaaacataataaaagggctggaaatcgagatttcaaaaagatttatgccagatgttcatacccggaaaaatatactctcgcgggtcttagggtatctacaaagtatcggtgttcacgacccgattctgagcgagggggttggcggagcttttgttgggttatgttactcattagatggggttgaatggcagccagatacgttatatgtcatccaccccccagagcccaatgcagaggaaattatattttgcggtgtcttcgtcagaaatcaagtgcttggtttggtaagcacggcgtctcagttaaacaaatttgtagcatggagatttgcaagtgaagacgttagtggtgctcgcgatagagcgctaaaggtatcgggtgaaattataaaaaaatatgactcaggaaaatttgatgccattgtttttttgaataactacattcatgcagttacagtgatagagatgagggataacacgcatcaccatttcacggttgttgatgcatttaatccggagagtggcaggattggtattgtttggatgcctgggctcctgaggattgttaataccattccaaaagatgaagatggaagtcagccggatttatcagtgaggtggctgccttatatggaacttgacgcctcaaaaatggcagaaatagatcaatttcttcaggatcagtatgattctgagttcaattggccgcaatga

SEQ ID NO: 343184 - DNA, 1773 bp, Pseudomonas aeruginosa
atggccagcaatcttgccgttggcaccatcaataacggtggcgaccttggcaaagggctgcaacacgccaccagctccagtgctctcaagagctacgccatcgcggcggccacggcttacttgaccaccgagtacttcgacaaggtgctggacaccaagaccaacgtcgataccagcaaggtcacggtggacctgagtaccgtcagcggtgccagtcgcttcgccgccaaccaggcgatgcagaacctcaccagcacggccttgggtaaggctatgggacagggtggcagcttcggcgatgccctcaaggacagtctctacaatacctttgctgccgccggcttcaacgccattggtgacttcggcaagacccacaagctggaaaccggaagcgcgcaaatggtggtgatgcatgcgctgatggggggcttggccgcccaagcgcgtggcgacagcttcgctgctggagcgattggtgcaggactcaacgaagcactggtgaaggacctggacaaactggtcagcagctactcgccggaaaatcgcgaggcgatgctggccatggcctcgcaactgacggggctggtcggggtagtcgcgaaggaccccggtgccagttacaaggagcttgaaacggggagttgggcggcgaggaattctgtccaatacaactacctaaaccacgaagaaaaccaggaacgcttcgaggccaagaaggcatgtaacggcggagactcaaccgcttgtggccgcgtcgatgaattaaaccaactcgaccggagtcgcgatctggcactacttacggcctgttcttcggacggtagtagcacgacatgtacagcgctgcgtaaagaggcttgggaatctgcccagagtttgaaacaggccagttggactccagaagcacaagagcagtaccggcaagccatgcagaacccgcaactgatggcatacaccattgagggcgagctgcgcagcatctaccagatcaacgacccgataacggcagctgattccaagcggctggccgaggcgatggccagcttgggttctgacttcatcccaggttatggcgatggcaaggcgtttgtcgaagcgcaagaccccttcgactatacgatggccggaataggcttggtgccgggcattggggatggcgctgcgaagatcctggccaaggcgaaggcactttacaaggaaggtaaagtatccgaggctgctgatttggtcgagggactgggtaagctgccggctccgcaagggccaaaaggaactggaacggcgctgcgtgaagtagaagttagctctggcagcaaagggtcatggactaaggaactcaacaaaccagagccgaacacgatttataaagtggacgggaacaagacctatcagacagatagtcttgggcgtgttgagaaggttgagtccaacctctcgctgacgaagagtgaccggaatacttatcagcagtgcattgctggtaaatgcggggttagtggcgatgaaggtggccatctgattgcaagtatcttcaatgggccaggtgagaagctgaacctgcttcccatgaatgggaacttgaataaaggtgcctggaagtccatggagaacacttggtcatctgcgctcaagcaagggcagatggtcagtgtgaaaattgagcctgtctattctggctcatctgtgcgtcctgatagatttactgtcagatactctattgatggtggtcgccctgtcattgtcgatttcaaaaactcaccgggtggtatttga

SEQ ID NO: 343185 - DNA, 249 bp, Pseudomonas aeruginosa
atgaccgcagccgtgagccacctggtggaaaccggtcaactcaacccagcgcctttgctgaaccgccatctggcgggagattgggggacgctggaccaggaagactggaacaccaaccagagagccctgaagttcggcgataggctgctgtcgtcctacgacatcgatgccggcggcgaatccaggctctggatcatcactgaggcagaccgcagctcaaccacgcttttgctccctagcgactactga

SEQ ID NO: 343186 - DNA, 441 bp, Pseudomonas aeruginosa
atggacaccaccgacttgaaagcgctgctcagcgatctgcgccacgccgctgacttctggaatgcagtaaaggagtcagggccggagcaagacaccatcgccgatggctcattttcggacgctcgcgagtggctaattaccgccgcacttgcccttggcaaaacgctgagtgtccatcctgacctcggtgtcggggcgctccaggcggagcttgagcgggaacggctataccgggagattttgcactcggcaaatgccggattggccgacaaggtcaaccgccttggaggcgaacttgacgccgcccagtacgaggtcaaaaagctgcgggctgaggtatcaatgctccgcagctacgagactgattgggagcggcttctgtgtgcagcagagcagaagcaagacgcctccgaaactgaagcggggggcgaccatgagtga

SEQ ID NO: 343187 - DNA, 807 bp, Pseudomonas aeruginosa
atgaatccgtccccatcgatcgccgggctgagcgatatcgaagccctggaacgcgtgccgctggaacagcgcgacctgccgtccagcacctacgaactgttgcaacgctcgacccagcgccacggccagcgtatcgccctgagctgcctgctgcatggcagcgccgccgaagaaccgttgcggatcagctatgccgagctgttcgcccgcgtcactcagaccgccaacgccttgcaccggctgggcctggaaagccaccaggcggtgtccttcctgctgcccaacctgccgcagacccactacgtgatctggggcggcgaggccgccgggatcgtcaatgcgatcaacccgctgctggagccggagcacatcgccgagctgatccgcgcctccaacacccgggtgctggtgaccctggcgccgttccccggcaccgacctgtggcagaaggtcgccggcctgcgcgcgcagttgccggagctgtacgcgatcgtcgtggtcgatccggccaacctgttaccggcgccgcagcgcgaggcgctcaaggcccagcgcgggccgctgccggagggcgtgctggacttcgatacgctgatcgccgactgcccggcagaccgcctggagagcggacgggcgatccatccggacgacgtcgcttcctatttccacaccggcggcaccaccggcacgccgaagctggcgccgcacagccacttcaacgaggtggcgatggccgagatcatgggcctgaacgccgggacgacgtgctgctctgcggcctgccgctgttccacgtcaacggcgtga

SEQ ID NO: 343188 - DNA, 894 bp, Pseudomonas aeruginosa
atgctggacatcgtcaagcgcgcgatgaccggggtcggcgccagccgcaagggcaaccgcccgcgcggcgtggccttcctcgccgggcccaccggggtcggcaagaccgagctggcgaagaccgtcaccagcctgctgttcggcgacgagagcgcctacatccgcttcgacatgtccgagttcagcgccgagcatgccgaccagcgcctgatcggcgcgccgcccggctacgtcggctacgacgtcggcggcgaactgaccaacgcgatccgcgaaaaacccttcagcgtggtgctcttcgacgagatcgagaaagcccacccccggatcctcgacaagttcctgcagatcctcgacgacggcgtgctcacctccgggcgcggcgatcgcgtgtacttctccgaggcgctgatcgtgttcacctcgaacctgggcatctaccgccagggggaaaacggcgaacgggtcgccaacgtgctccccggcgagcccttcgaggcggtgcagggcaaggtccacggcgagatcgagcgctacttcaagctggttctcaaccgcccggaaatcctcaaccggatcggcgagaacatcatcgtcttcgacttcatccgcgccgacgtcgccgagcagatcttcacccagatggtcgacggcaccttcgccgacctccgcgagcagcgcctcgtcatcgaactggccgaggcgccgcgccaggcgctgcacgacctctgcctgggcgacctgtccaacggcggccgcggcatccgcaaccagctcgaagcgcgcctgctcaacccgttgtcgcgggcactgttcgaccaggacgcgcagccgggcgagcgcttcctgatcagcgccctggacgccgacggcctgaccctggaacgccgctga

SEQ ID NO: 343189 - DNA, 2067 bp, Pseudomonas aeruginosa
atgttcaacccggccaaccagacccacttcagcctcagcctcgacggcctccgtcacgacctgcaggtcctcgccttcaacggccacgaaggcatcagccggccctaccgcttcgaactcgaactggtcagcgagcgcgccggcctcgacctcgaagcgctcatgcaccggcccgccttcctcgccttcaccccgcagggccagggtgtccacggcctggtctacggcgctgcccaaggcgatgccggcaagcgcctgacccgctatcgcctcaccctcgtgccgcaactggcctacctcgcgcagcgcagcaaccagcggatcttccagcacctcacggtgccgcagatcgtcgccctgatcctcgaggagcacggcatcctcgccgacgcctaccgcttccagctcggcacccggtatcccgaacgcgaatactgcgtgcagtacgacgaaagcgacctgcatttcgtccagcgcctctgtgccgaagagggcatccatttccatttccggcacagcgccgaggcgcacctgctggtgttcggcgacgaccagacggtgttcccccgcctgggccgtcccaccgcctacgtgcacgacagcgggctggtcgccgacgaaccggtgatcaagcgcttcagcctgcgcctggccagccgcaccacgcgcaccactcgccgcgactacgacttcgagaagccgcggctgctgctggaggccggcaatcgccccgctgccgacgccccggccgagccggacctggaggactacgactaccccggtcgcttcgtcgatcgccagcgcggcaagctgctcagccagcgcgccctggagcggcaccgcgccgaccggcgcctgggcgaaggggtcagcgaccagccgctgctggtcagcgggcatttcctggagatcgccgagcacccgcgcgcggagtggaacgacctgtggctgctcagcgaaatcttccacgaaggcaagcagccgcaggtgctggaagagaacgttacctccgacacgtcggccagcacggacgacttccagcagggctaccgcaaccgcttcctcgccacgccctgggaggtgttcttccgcccgccgctggagcacccgaagccgcgcgtgctgggcagccagaccgcggtggtgaccggcccgccaggcgaggaaatccactgcgaccgctacggccgggtcagggtgcagttccactgggaccgcgagggccagggcgacgacaagagcagttgctggctacgcgtagccagcggttgggccggcaacggctatggcggcatcgtcattccgcgggtcggcatggaagtgttggtggacttcctcgaaggcgatcccgaccagccgctggtcagcggctgcgtctaccacgccgcccacccggtgccctacgagttgccggcgaaccagacccgcagcgtctgcaagagcctcagcagccctggcggcggaggctacaacgagctgcgcatcgaggatcgcaagggccaggaacagatcttcgtccatgcccagcgcgactgggacgagaacatcgagcatgaccagaagatccgcgtcggccacgaacgccacgacaccgtggaggcgaacagctacagcgagttcaaggccgaggagcatcacaccgtgcacggagagcgcaaggtcgagctgaaggccgatgaccatctgacggtcggcgacagccagcacgtgaagctcggtcgtgcctacctggccaaggccgggcgcgagatccacctgaaggccgggcagaagatggtgatcaaggctgacagcgaactgacggtgaaggccggcggcagcttcatccggcttgacgcaagcggcatcgccatcagcggcccgctggcacggatcaatgcaggcggcgcgccgggaagcggctcggggatcgcgatcaagatgccgcgggtgccgggcatggccgaccaggacagctccggcgcgccacccgaggcggtcgcggccaacctgccgccgcggcaaccggtctgcgaagagtgcctgctacaggcgaagaaaagaggccaggcgctcgccgagcgctga

SEQ ID NO: 343190 - DNA, 450 bp, Pseudomonas aeruginosa; identical to SEQ ID NO: 329774

SEQ ID NO: 343191 - DNA, 783 bp, Pseudomonas aeruginosa
atgccccgtttctgcgccaacctgtccatgctgttcaccgaggtggatttcctcgaacgcttcgacgccgccgccaaggccggcttcgccggcgtcgagtacctcttcccctatgacgtcgaggccgaggcgatcaaggcccgcctggaagccaacggcctggagcaggtgctgttcaacctgccggccggcgactgggccaagggcgagcgcggcatcgcctgccacccggatcgggtccaggagttccgcgagggggtcgacaaggccatcgcctacgccagggtgctgggcaaccgccaggtgaactgcctcgccgggatccggccgcaggggcacgactgcgccagcgtcgagaagaccttcgtcgacaacctgcgctacgccgccgacaagctggaagccgcaggcatccgcctggtcatggagatgatcaacaccctcgacatccccggcttctacctgcagaacacccgccaggccctggagatccgcgacaaggtcggcagcgccaacctgttcctgcaatacgacatctatcacatgcagatcatggaaggcgacctggcccgcaccctggaaaaccagttggcggcgatcaaccacgtgcaactcgccgacaaccccggccgccacgaaccgggcaccggcgagatcaactaccgcttcctcttcgagcacctggaccgcatcggctaccagggctggatcggctgcgagtacaagccggccaccaccaccgaagccggcctcggctggatgaagacgcacaacgtcgtctga

SEQ ID NO: 343192 - DNA, 1008 bp, Pseudomonas aeruginosa
atgtatataaaagaagagacattggatgatcttcttaataaagtatatgacaagctcttaaaaaagagagaaaaaataatagcgagcaaaggggcgtttactgagataactggggctttacttcatctaaaaaaccctcgtgcccgcttgagtcgggcggagggaaagggaaagttgtttagctgtcttggtgagttggcttggtacttggctggctctaaggatctaagctttatccgtcactatatccccatgtacaaggacagctccgatgatgggcgcactgtttatggtggatatggcccgcggatgatgggggagggaaataaaaatcagctccaatcagttgtaagattgctgagtgataaaaaaacatcgcggcaagctgtagtgcagctttttgatgctaaggatatcttgaagcctaggaaagatattccgtgcacatgtactcttcagttcttaattagaaagcaaaggctgcatatgttcacttcaatgaggtcgaacgatgtatatcttggcctgccgcatgatgtgtttgccttcacgatgatacaggaaatgttagcgcgctctttggggtgtgaaattggagagtataagcactacgtcacaagcctgcatctttacgaaaaaaactttgaagaagccagagcttatgtgaatagtggctttcagcagatttctgaaatgccagctatgcctgagggagatccgtggccaagtataaataagctgttagaggccgagagaaaaatacgaggcggcgaggagataagtgttaaagatctttgccttgatgactattgggctgatcttgcaagggttttccagtttttcacatatacaaaggataaagtggaagccgagaaaatagagagaatactacgtgagatgatctccgacgtgtatatgtcatatctagaaaaaagaagacaagacaaagttccctcaatagaggtagcacccgcacaactggaaatgctccttcatgctaaggcctaa

SEQ ID NO: 343193 - DNA, 204 bp, Pseudomonas aeruginosa
atgctcgattcgctccggaccaacgccctccaggtggtcaaaaatctgctgatcaagatcagccaagcagatgatctggcagaggcctgccagcttctcaatacagctccaagccgcatccccagtatcttgggcttcatcaacaatgactacaggatgagtgtctgcgaccagctcccggagcatctgacaccttcccagtag

SEQ ID NO: 343194 - DNA, 1662 bp, Pseudomonas aeruginosa
gtgaagcatatcgaccagaagaccgtttccgagaccatcgatgtcatggtcaaggccgatccgagcctcgcctggttgcgggaggccgaaaaacagggtgacgtcgattggcgcaaagtccgggaagtacatgacagcttcaagtacagccattcggggttgggcgctggcgcggcattggccatcgccattgtggttacctacctgacctggggtgcgggtagttcgatggcaggcgtcgcggccaaaagcgcaacaggtgtcgctgccaactccgtcgccagtgccgtagccaccaacgcggcgatcagcacggtgaataaccgcggcaaccttggcgcggtggcgaaagacgtgacctccagcgacagcctgaagggctacgcggtcgccggtatcagcggcggcttcatgcccagcagtctgggtgcccagcttgccgttcgctccgcgctgaacaccgtggtgaacggtggcaagttcagggacaacgtcgcgcaagctgccatcagtatggcggcggacgcgctaagcggcgcgatcttcgacaaggtcggagatgcgttggtcggcagcggccttcccaagaaggtagcggtccatgcgattgtcggcgggttgatcggcgaggctgccggcggcgatttccgtaccgcagccctggctgctggcgccaacgaggcattggtaagcctcgtcggtgaaaagatcttccctggcgaggctcatgagcgcgtgctggcgatgacctcgcagttgatagggatgacagtggctgcggcggccggaggcgataccaaggcccaagagaaagccgcctgggtggctcagcaggccacggtgtacaacaacctgaatcacgcggcggcggagagcctgctcaaggagatcaaggattgtcgcgcggcaggcggctgtggcgaggagaagttgcaaggcatcctcggcaagtacgaaaagctgtcggccgagcgttcaaacgctatcggccagtgtgcttcgcgccagtgtgtggacgacatcgtcgacagttcgatccggatggacgatccggtttccaaagagctgctcagcctactgcggcaaaccacctacgatacacccggcttgttgcagggcaatcctgatgcgatcgtgtcgcagacgccgaatccaagtggctggggagatctctttgccctggacaagcaactggcgttcgccaagaacctcaaggaaggctggctgacaccggaggaaacggctgatctggatcgctggaatgcgtccacttcctggctggatcgcactgctggccgacaactggatcccaaggagaaggcttacctgctctcggagctggggggcgcggcggctatggcgcttcttggggggagggggagtgttgggagtggagcaggtggaataaggaacacatattcttcaataaaagaggctcctaaatacccccagggatttaaagatattaagaatggtacgcagaaatataagattaacaatcaagatgttttggaaagtttgagaggtgtagagccaggtaagtgggttaaggtgtatagggatggtttcgattctgctgggaataaaatttctgtacactactttcaaagtcaaagtggcaaagtttttgatgtgaaggttaaatcgggttggagtaactga

SEQ ID NO: 343195 - DNA, 441 bp, Pseudomonas aeruginosa
gtgctggtctggctgttcgacacggttcagttcgaggacggcctggaactggccctgttcgctatcgagcagggccaggagatgccggagcgcttcaagcgccgcgatatccagacctttgtcgctgatgccgtcatcgactgggccgaagccgagtacaaggccttgcgcagtcccgaaccctacgtctccaacctcctgccgttggtcgatggccagtggacgttgttcgagcggatcccggcgcgcttccacaaggtgctgggccagatcgcgatggataacgaggagtggacgcaggctatcgagcacttcgaccgagccgtggagctgtatccggaaatcggcgtcggcacccgccgagccaccgccgccaaggcgctggccaaggcagaagccgacgcgaagacaaccccggacgcgcccccggcggccccttaa

SEQ ID NO: 343196 - DNA, 444 bp, Pseudomonas aeruginosa
gtgctggtctggctgttcgacactgtgcagttcgaagccggcctggaactggccctgttcgccatcggggatggccaggagatgcccgagcggttcaagcgccgcgacgtccagacgttcgtcgccgatgaggtgatcgactgggccgaagccgagtacaaggccggccgcgcgccggaaccctacgtctcgaacctgctgccgctggtggacggccagtggcagttgttcgagcggatccccgcccgctaccacaagctcctgggccagttggcgatggacaacgaggaatgggcgcaggccatcgagcacctggaccgagccgtggagctgtatccggaaatcggcgtcggcacccgccgcgctgccgccgccaaggcgctggccaaggccgaggcggcaaagcagagcgacgagggcgacgagcccccgcccaccccataa

SEQ ID NO: 343197 - DNA, 510 bp, Pseudomonas aeruginosa
atgtcgcaactgtccttttcctcgttcgatgccgcgctgatggtgcgcgactcccaaggtcattacctgccggcgacggccgaccagattctggaggccgcgcgccaggccatcgagcacaagatgcagcgcggtgcctcattcagttcaccgtcggaagtcaaggagtacctgcgcgccaaactggccggcttcgagcatgaggtgttcgcggtgctgttcctcgattcgcagcatcgccttatcgagtatgccgagatgttccacggcaccatcgacagcgcatcggtgtatccgcgcgaagtggtgaaggaagcgctgcggctcaacgcggcagcggtcatcgtttcgcacaaccacccgagcggcaatccagagccaagtgcggccgacagggcattgacgttgcaactcaagagcgcgctggcgctggtggacgttcgcacgttggatcacatcatcgtggcgggcagcctcactacgtccttcgccgaacgtggcttgatctga

SEQ ID NO: 343198 - DNA, 348 bp, Pseudomonas aeruginosa
atgaactcactcatcaccgaggacgagcgccaacgcctgctgacccacggccaggcacgtgctgacggtcaggccggcgacccgctgcccgtggtgcgcctgttcacaccggacgcacacctcacctggctgctcgcttcgctcgacccggccgacggcgatacggcctacggcctgatcgacctgggcctggggatgcctgagctgggcaccgtgaagctgtccgatctggcatccatcgtcgggccgcgcaagcagcctgtgatgcgggatcggtatttccaggcggcgcggcccctgtcggaatatgtccggctggcccaggagaacggcggcattgtcgattaa

SEQ ID NO: 343199 - DNA, 780 bp, Pseudomonas aeruginosa
atggtcaatcctcaccatatcgcgcattggtatccgaccgccgcgtacctctacatcttgtgcctggacacgctcgcactggcctgggagtacctgcgccgccaccccgattaccggctcgactggcagcgccaccagcgccgaccgcaagcggcgcaacaggcggcgcttcgctggggcttgcgtctgctggaagacccggccctggatgcgcgcgacgcgcatccggcctggctgcccggccacgatgccgtggtgcaactccatcccgatgccgatccgccgcccgatgcggcggccttcgcgttctggcacatccccggtcacaagcaactgctgcacgacggtaaagggctggcgctgatcgcgcacaaccccggccattgcgcgcgcttcgcgctggcgcccggcctggaagatggcatggcggtcgcctatgccaatcgcggaggtggcggcggcgctgccgcacctgcgcctacgcgcagcgcgacgctggccgcggccaggccccggcctacaccggccgcgatgctggagttgcacaccctgcaggcgctcgacgcgaccctggcgggtgcgtccttgcgcgacgtggccgaagggctgttcggtgccgatgccgtggcggcggactggcacgccgacggcgacctgcgcgcccgcgtgcgccgcctggtgcggcgcggcgatgcactgatgcgcggcggttatcgccggctagcacaactgccgccgcttgagaagggacgttttgatggggacgcaaaacgtccctga

SEQ ID NO: 343200 - DNA, 534 bp, Pseudomonas aeruginosa
atgaccgcatccgtttcgcctgccgctgtcgcggccacggctgcactggctgcgcctatcggccagcctgccagtgcgccgatgacgcgcgtggcgctcgcctacatcgaccagcgtttcgacctctatctgcgcttcggcgagccgtcgcgcatccttcgcctcgaccactggcggcgatgcgcgttgttcctgcccggcgcgatgctttgccgcatccgctggcaggccaacgcctacggcacgatccgctggcaactcatggtgatgcagacttgcacgccgctggccggcgcgcagcgcatccccggcgtgcagccgggcgcgcgcctgctgctacacgccgaaggcgacgccaacgtgcgcgccgtgctggaacgcatcgacggcgtcgaggcgctgggcatcgcgcccgcagacgcctcccccgcgtactggcgcacgctgggcaatcggctcgctgcgcgcttgccgctgccggactacagcgccgagcggcacgccgcctggctagccgggagggcgctgccatga

SEQ ID NO: 343201 - DNA, 576 bp, Pseudomonas aeruginosa
atgaccgccgcttccaccatcggcactgcgccgcgttctcgcgcgcgcctcgtcctggcgggcttgtccgcctgcggcctcgctgcgctggcctgggcgtccttcgtgcatccgctgccgcgcctgatctacaacccgtccgacagcgttcccatgggttggtatcgcgtcgatccgctgaaccatcggcccggctcgctgccacgtcccttgtccgtgggcagcatcgtcttggcctcgctgccgccagatgccgcagcgctggccgcgcaacgccgctacctgccggcgggcgtgccgctgctcaagcgcgtgggcgcgatcgcgccgcaggaggtgtgcatcgctggcggcatcgtccgcatcgacggcgtgccttcggccgccgtgctgcgcgccgaccgctggggccggccgctgccatcctggcagcagtgccgccgcctcgaaccgggcgagttgctcctgttgagcgtgaccaatccggcatcgttcgatggccggtatttcgggccggtgcgcacgtccgccgtgatcggcatcgcgcacccggtctggctggagaagcgtccatga

SEQ ID NO: 343202 - DNA, 468 bp, Pseudomonas aeruginosa
atgtcttgttacgttcgttcgatggtggctggatttgtcgccactgtagcgctgtcgctgctgatgctgatgaagggcgccatgggcttgatgcccgaattgaatccaatcgccatgctcacggagatggcgcacgcaaaaatgggtatgccggcttcgcccatggtcggatgggtggcgcacttcatgattggcaccgtcgtgtggggcatcctgttccaactgctgtatggcaggctgccagggcgcagtgcgctgctcaagggaatgtcgttttccttgctagcttggctcatgatgatgatcggtccgatgccaatggccgacgcaggcctgttcgggatgaacctggggatgatggcgccgatgatgaccctgatgatgcacctcatttggggcgcagtgctgggctacacctatggtcggctcaatgccaattcgtgcgctgttcggactgcaacttcttaa

SEQ ID NO: 343203 - DNA, 564 bp, Pseudomonas aeruginosa
atgggcacccctgttggcgaccgcaacaatttaatcatggcggcacagactggagacgcggccgccctttcccgtctgctggcagtgtgccaagccgatgcacgccgctatgcgtacaagcactgccatgcgagcgacgttgatgatgcggttcaagaatcactactcatcatttctcgcaaggtcagcgggctaaaagcggctgcggccttttcatcgtggctgttcacggtcatcaagcacgaatgccgcaagctcgcgcggatgatgttcaagcacgagccactgcctgatgaagtagccgaggagctgctgcttcatcgtcccgacgatgaattgagaatcgatcttgccaatgccctggagtcgttgcctgcccattacctcgaagtggtacttctgcgcgacttcgaggaattgaccattgccgagatcgctgctcagttgggtgagcagcccggcgcgatcaagagtcggctccatcgtgcccgcgagctagtgcgcgaatacatgctcagttcagaaccatcctcggggcacggacaccgcacaccgacgaaatag

SEQ ID NO: 343204 - DNA, 336 bp, Pseudomonas aeruginosa
atgtcaaaccgtatgttgtccgccgccgtcgccacggcgtttgtcgcagccttcgccgcccccgccttttcgcagggcatgagccaggccgacatgcagaagaagatgcaggagaaccaagccaagagcatggagatgatgaagaccggcaagttcgacaagtgctatggcgttgccctgaaggggcagaacgactgcttcgccggcgccggcacaagttgcgcgggtaccagcaccgccgactaccaggggaacgcctggaagctggtcgccaagggcacctgcaccacgatctcgacgcccaacgggcacggcagtctcagcgccaagtcctga

SEQ ID NO: 343205 - DNA, 894 bp, Pseudomonas aeruginosa
atgggcattcaccaaactgcgcacgccgccgggcggggaatccctgcgcgagccggcgtaggccttaaggccgaccactaccgaaccatcatcgaaacgcggccggatatgggcttctttgaagttcatgcggaaaactacatgggcgctggcggcccgccccatcgctacctgacggccatccgagaacactatcccctgtcgttgcacggcgtgggcctgtccatcggtgccgacaggccactcgaccaagcgcatttgctgcgtctcaaggcgctgaacgagcggtacgaacccggcctgctttccgaacacctggcatggtcttcacatggcaccagctacctcgatgatctgttgccggtgccgtacaccgacgacacgctgaaccgcatctgcgagcacatcgaccaggtgcaaacagctatggcccggcaaatgctgctggagaaccccgcgacctacatctggttcaaggagagcacatggcgcgagacggatttcatcagggagatcacccggagaaccgggtgcggtctgctgctggacgtgaacaacgtccacgtggcgagcacgaatcagcaatgggacgcgcgcgcctacatcaacgatttccccctcgaccatgtgcagcaaatccacttggccggccactcccttcagacggacgagaagggacgccctttgctgatcgactcacacgaccaaagagtggatgagcgggtgtggaacctctttaggcaggtcatccaatgcatcgggccagtccctacgctgatcgagtgggattccaacattcccgcatggcccgagctgcaaacagaggccgtgatggccgatgtgctgatgggcatgtccaacgtacaggagcgacgccatggcacgcttggctga

SEQ ID NO: 343206 - DNA, 789 bp, Pseudomonas aeruginosa
atggcacgcttggctgaacgcctggaggaattcgcctcggcgctgctcgacccggaacgcgcggtgcccgaggggctggtcggccccgacggcgagccgagcgcacggcgctttgccgtctatcggaacaatgtgttcgttggcctgacggacgcgctgcgcgcgggctttccctgcgtcgtcaagctggtgggcgacgaattcttcgcggcgatggcccgcgtcttcgcggccgccacgccgcccagctcgccggtgctgctgcactacggcgccgagttcccggacttcatcgcgtcctttccacccgcggaacccttaccctatctcgccgacgtggcccgcatcgagcgcgccgcgaccgaggcgtaccacgcgcacgaggcagaacccttggcgcccagcgtgcttgcaggagtaccgcctgaccaagcttccatgctgcggtttcggctccacccttccgtgcgcctggtgcgttcgccattcccagccttcaccatctggaggatgaacacctcggatggcacgccagcacccgttgacctctccgaagcgcaggacacgatggtgctacgccccgacgccgaggtggacgtgcgcaagatacttcccgcgagccatgacttcgtagccgcgctcggccagggcctgacgctatcgcaggccatggaaacggccctcgccaccgacggcgattttgacctgtcggagaacttgcgggaattgatccagatgggcgcctttgtcggcttcgcgttggaagccggggagaacgatcatgagtaa

SEQ ID NO: 343207 - DNA, 510 bp, Pseudomonas aeruginosa
atgagtaacttccaagtgccgaaaggttggcccggaatacttggcgcggcgaactgtgcattgcactggctggcaaagatcgccggcatggccgcgccgctgttccttcgggtggcgctggccttgcccttcttcaagtcgggcctcaccaaatgggacggtctcctgtcgctgtcgccagcggcgagttttctgtttgaagatgaattcaagctgcacatcctggggaaggtctatgacctgcctgcgccggacgtactcgccttcgccagtggatcggccgagatcatctttccgatcctgctgattctcggacttggcacgcgcatgagtgccctgggcttgctcggcatgacggcggtgatccagctcatcgtgccggacgggtgggcgaactttcatttgccctgggcgacgatggcgattgccctgatcgctatcgggccgggccggctttcactcgaccatgggattcgcggcttcttggagcattgcgaggcttcggcctga

SEQ ID NO: 343208 - DNA, 456 bp, Pseudomonas aeruginosa
atgcttgcattgcgcgccatatccctcgtgatggcaggtttctttgcttcgggggccggagctgccgatgggctgattgcggtacaaagcccgtacagtgtcaaggaaacgattgaccgtttcgagacggccgccaagtctcggggcatctatatcttcctgcgcctcgatcacgcgcagggcgcgaagaaggtcggcaaggacttgcggtcgaccgagcttctggtgttcggcaatccccagggcggcacccccttgatggaatgcgcgcagactgccggtatcgaccttccgctcaaggccttggcctggcaggacgcgactgggcaagtgtggcttggctacaacgatccgaagtatctcgcatcgcgccatggcgccgacaactgcggccccgtcgtggaaaacatctccaaggcgctgggcggcatgacgcaggaggcgattcggaagtga

SEQ ID NO: 343209 - DNA, 408 bp, Pseudomonas aeruginosa
atggaaaacaccttggaaagcctgaccatcggcgccttcgccaaggcagccggggtcaacgtggagacgatccgcttctatcagcacaaagggctgctgccgacgccgaaccggccctacggcagcattcgacgctactgcagcgccgacgtggcgcgggtgaagttcgtgaaggcggcgcagcggctgggattcagcctcgatgaaatcggggagttgctgaagctggaggacggcacccattgcagtgaagcagccgaccttgccgcactgcggctggccgatgttcgcacccgcctgaacgaccttatgcggatggaacaggcgctgtcaaaattggtgaacgaatgctgtgcgcatgagggccatgtgtcctgcccgttgattgacgcgctgcatggcggttga

SEQ ID NO: 343210 - DNA, 276 bp, Pseudomonas aeruginosa
atgaaaaaactgcttgcctcccttgcgctcgttgccgtcaccgttccagtgtgggccgctacccagaccgtcacgctggccgtgcccggcatgacctgcgccgcttgcccgatcaccgtcaagaaggcgctctccaaggtcgagggcgtcagccaagtcgatgtgaccttcgagaagcgcgaagcggtcgtcacctttgatgatgccaaggccagcgtccagaagctgaccaaagccaccgaagacgcgggctatccgtccagcgtcaagcgctaa

SEQ ID NO: 343211 - DNA, 423 bp, Pseudomonas aeruginosa
atgaaaccgattgcgcgtatcgccgacaaagccggggcattgggcaccctcgtctccgcgatgggctgcgcaatgtgctttcccgcactcgccagcctaggcgcggccatcgggctgggttttctccagcaatacgaaggcttgttcatttccaggctgttgccattgtttgctgcattggcgcttgcggccaacgcgctcggttggctacgccaccggcaatggcaccggagtctgctgggtatggtcggtcccgccatcgttatcgtgggcgcggtctggctgcttggcaccgcttggatgcggcccctggtctatacggggatcgccttgatggccgtcgtttcggtctgggatttggtatctcaggccaaccgccgctgcggtcctgacggctgcgaactgcccgcgaaacacggctga

SEQ ID NO: 343212 - DNA, 1683 bp, Pseudomonas aeruginosa
atgacacagttgaagatcaccggcatgacctgcgactcctgcgcggtccacgtcaaggaagcactggaaaacgtgcctggcgtgcaatcggccgaagtgtcctacaccaagggcagcgcccagctcgccatcgcggccggcacttcacccgatgccctgatcgcggctgtcgccggactcggctaccgcgcggcgctggccgatgcgtcgaacgcgcttcccaaaggcggactgctcgaccgcatgcgcgattgggtcgacggcggcgacaaggccagccacgacggcggcctgcatattgtcgtcatcggcagcggtggggccgcgatggcggcggcgctgaaggccgtcgaacgcggcgcacgggtgacgctaatcgagcgcggcaccatcggcggcacctgcgtcaatgtcggctgcgtgccctcgaagatcatgatccgcgccgcccacatcgcccacctgcgccgcgaaagcccgttcgatggcggcatccaggcgaacccgccgctgatcctgcgcgaacggctgctggcccagcagcaggcgcgcgtcgatgagttgcgccatgccaagtacgaaagcatcctggacggcaacccagccatcatgcggctagcgggcgaagcccgtttcaaggacggccgcaacctcaccgtgcggctgaacgagggcggcgagcgcgtggtttcgttcgaccgctgcctgatcgccaccggcgcgagcgcggcggtgccgccgatcccaggcctcaaggacacgccctactggacttcaaccgaggcgctggtgagcgacacgattcccgcacgcctagccgtgatcggctcatcggtagtggctgttgagctggcgcaagccttcgcccggcttggggccaaggtcacgatcctggcgcgcagcacgctgttctttcgcgaagacccggccatcggcgaagccgtgacggtggcgtttcgcttggagggcatcgaggtgctggaacatacgcaagccagccaggtcgcgcacgtggacggcgagtttgtgttgaccaccaaccatggcgaactgtgtgccgaccggctgctggtggcgacgggccgcacacctaatacgcgcagcctcaacctcgaagccgcccgggtggcggtgaacaagcaaggggccatcgagatcgacctcagcatgcgcaccagcgccccggacatctacgccggcggcgactgcaccgaccagccgcagttcgtctacgtcgcggcggcggctggtacccgcgccgcgatcaacatgaccggcggcgacgcgtcgctggacctgaccgccatgccagcggtggtgttcaccgacccacaggtctctaccgtgggcttgagcgagcaggaggcgcaccacgccggcatcgagaccgacagccgcacgctcaccctcgacaacgtgccgcgcgcgctcgccaacttcgatacgcgcggcttcatcaagctggtgatcgaggaaggcagccaccgtttgatcggcgtgcaggcggtggccccagaagcgggcgagttgatccaggcagcggcgctggcgatccgcgcgcgcatgacggtgcaggaactggccgaccagttgttcccgtatctgacgatggtcgagggcctgaagctcgccgcgcagaccttcagcaaggacgtgaagcagctatcgtgctgcgctggatag

SEQ ID NO: 343213 - DNA, 972 bp, Pseudomonas aeruginosa
atggaaggcatgagattgtttggtatacggcgatcgtcgctgccgtggggattctttggggagttgctgacggcgctctacatgggtgtcatcgcgtggatcgcggcggccacgcatgttcactacattctttttcccgaactaggcgccctggcccatgacatcatcaagcgaccgcacggcacctgggccaaagcgccggggatgctggttctcacaccgcttcttaccgggctggtaggcacgatcttcgcccgaagcatgggcagcgggatcgtgccgatcctgctggcgaccgcagccgcgatgctcatcatccgcatattgaagtcatcgattgccccggccatttcggcgggcgtgctgccaatctcactcaacatcacaagctggtactacccggcatcgttgctggtcggcctgatattgctcgccgcgatctcccttgtctggcctcgcttcgtcccgctaccgccggtgcgaaccgcctccgatgtggccgatgacgttaccgaggaaactccaagcacctactcgtggctcccgttctttctggtgtttctggtaggcacggcgattctggccgaagccacgggttggcggttgatcctgttcccgccgcttatcgtgatcggctttgaaatgtttgcccatgcggacgtttgcccttgggtcaagaagccgctgctgctgccggtcgcgtgtaccctgagcgcattgatcggggttgcactggtcacgacgttcgggggcgccccgctggcggtgatctccagcgcggcatgcggcatcctaatcttgcgattattcgatctgcacgtgccgccggcgctcgccgtgggcctgctgccgtttatcatcccagccgtcgattaccgattcgcggcctccgtgggcattggcaccttaactctgaccatgctgttcctcgtatggggcaggctgagaaggatgcgcctttcaccgtcctga

SEQ ID NO: 343214 - DNA, 573 bp, Pseudomonas aeruginosa
atgaacgccaagctgacactgcctcttcttaccgaagacaccgcccctgaaaggagccgcgagttcctgagtaacacgcgcaggaagcagggatttgttcccaacatgtatggagaaatggcccacgcccctggcgcgctctcgacctacctccatgggtatgactggttccgcaaggaatccggcttcacgccggccgagcaggaagtcgtgctgctggtcatcagtcgggaaaacggctgccactactgcgtggccgctcacagcatgatcgccgagaaggtatcgaaggtgccgccgcaggcgctccaggcaatccgtgagggcacgccgatggatgacccgaagctgcacgcccttaccgccttcgtcaaggacatggtgcagacgcggggcaatccgtcgcaggcgagtttgcagaccttcaccgacgcgggctacagcgagcagcaggctctacaggtggtgctcgccatcgccgtcaagacgatctcgaactacaccaatcacctgttcgacacacccgtggacgcggcctttgcgtcctacgctctgccgatagggacgaaataa

SEQ ID NO: 343215 - DNA, 765 bp, Pseudomonas aeruginosa
gtgggaaacatcttggacagcatcgcgcgccgctgtggagaaggactgagccgctacctcagtcggccccaccatgtgcatagcgtggccccgccgaccgatccagaccttctcatggcgtgcctgcagcccggcgacgtgctgctggtcgaaggtcagagccgggtcagcgtggccatcaagtacctgacccaatccacctggtcgcacgcggcactgtttgtcggcacggccggcaggccgaccgatgccgaagggcggccccgttgctttcttgaagccgatctacgcgaaggcgtgcgtctggtcagcgtggccgagttcgccgatctgcatacccgagtgtgccggcccgtgggcctgaccgctgccgagattgacaccctggtcggcacggcggtggctcggctgggccatcagtacgacttgaagaacgtgaacgacctggcccgatatctgttgcccacgccgccggtgccggtgcgttggcgccgtcgcatgctcggcctgggcagcggcgaccccacccgcgccatctgctcgacgctgatcgcccaagctttccagtcgattcgctatccgatcctgccgctgatcgagaccgtgccgtcgcaggacccgatgtgccccggctgtgtggccgagattcttcatgtgcggcaccacagcctgttcgccccgcgcgacttcgacgtctcgcccaacttcgccatcatcaaacccaatctggaagccggaatatttccacttaggagcactccatga

SEQ ID NO: 343216 - DNA, 729 bp, Pseudomonas aeruginosa
atgacgctcggcctcggttcctacggcctcggactgctcgcgggggtgctttccacgctgtcgccttgcgtcctgcccatcgtaccgatcctgattggctcggcggtcaacgcccatcggcacgcgccgttggccctggcgggcggcctcgctctgtcctatgccattgtcggcacggcgctggcctgggcaggcgcctcgctcggcatcgacacaacgatcttccggggcgtgggcgcggccgtcctgggactgttaggcgtggtgctcatgtccagcgccctccagcagctgtttgcgtcgctgacggccggcatcggcaatgccgggaacgacctgcttgcgcgtgtccaactggacgggctgacggggcagttcgtggtgggcctagtgctggggctggtctggagtccctgcgtggggccgacgcttggcgcggccatcgttctggccagccagggtacgaacctggcgcaagcaggctcaatgatggcggtgttcggtatcggcgcggcattgcccctggttgcactggcctatgtgtcgcgcagcgcgatcggccgcacgcgatccaagctcctgcacgccggcaaggccgggaaagtcctgttgggcgcgatcatgcttgccctggccgccctgatcctgacaggcgccgacaagccgatggaagcatggcttgtggaacattcaccggcctggctcacacaactgacgacgaggttctga

SEQ ID NO: 343217 - DNA, 387 bp, Pseudomonas aeruginosa
atgaaactacgtatgaccgccgcctttctcgctcttgccacgttcgccagcatcgccagcgccggggagatcaaaccgttcagccaagccgagttcgaccgtctgacgcaggctggccagcccgtggtagtggacgtcagcgcgacgtggtgcccgacctgcaaggcgcagaagccgatcttggaaaccctaatgaagcagcccgcctacaaggacgtgaccttgctgaccgtggacttcgacagcgaaaagagcaccgtccgggccttcaaggtcagcatgcaaagtacgctggtaggcttcaaaggcacccaggaagtggcccgctccgtgggcgacaccaccgaggccggcatcgagggcctgattcagaagaccacgcgctga

SEQ ID NO: 343218 - DNA, 213 bp, Pseudomonas aeruginosa
atgtattgcagcacttctgttaaagcgcaattggttcgtggcgcattggccgtgacatccattgcgggcgccatcgttttaacccctaacttttggcctgcggcagggctatttggtttggccatctatcttatgcgcgggtgtcccgcctgctggctcgcgggactaatggaagccattcgggttcgcaacgagcgcaagtcgctgctgtag

SEQ ID NO: 343219 - DNA, 906 bp, Pseudomonas aeruginosa
atggagctacgtcatctacgatgctttcttgcggttgcggaggaactccacttcgctcgtgccgccgaacgactgcacattgaccagtcgccgctatcccgtaccatcaaggaactagaggaagaacttagcgcacgccttttcgttcgcaccacccgcagcacgcaattgacccgcgctggccgactactcttggagcacgtgccgcgcatcttcgctgcattggagcaagcgcgcgatagcgtcaaatccgctgccaacggctttcacggtcagttgcgcatcgccttgtccgatggtgtgacgccttcgcgcttgccggccttgctggcacgatgccgtgaagaagatcccgaagtagagatacggctgtttgaagtgccactagcccagcagatcaagggtcttcacgatgacctatacgatgctggattttcgatggcagatgacgtgggtgatggcatcttggttgctcccgcctgggaagatgaattgatgctggcggtgccggcacgccatccggtgctggcctataagcgcgttccgttggaggaagtattgcgccatccgctggttctgggcgatccagccgtatgcgagggccatgcacggcaggtcgaacgtatcctgcgcaaacatgaacaagagccgttgatcgtccagcacgtcgccagcttcgatctgatgatgacactcgtttctgctggaattgcattggggttggccggcacggcgcacatcacaggcagccgcgagcctggcgtcataggtcggccgttagcgggacaaccaccgatgttgacaacctatctacttcgccgcgacatggagccatgcgagatgttgactcgcttcattgaacgagttgcttgcctcgattcaacagatgacattggcactgcctaa

SEQ ID NO: 343220 - DNA, 231 bp, Pseudomonas aeruginosa
atgaacaaattgctaccgctgctgatgatcgccgccgcattggcggcatgcggtcaatcccaaccttcggaaactgtggactaccttgtggcccatcctgagcgcatcaaggaactccagcgccaatgcaaggaggatcgcgcgaaggtcggcgacgaactctgcgtgcgcgcggccgaagccgccaatcggcgcttcttcggtgatcgacccgagcagaaatccaagtag

SEQ ID NO: 343221 - DNA, 1053 bp, Pseudomonas aeruginosa
atgagcaccactccccaatccatgaccactgcggcgcttgaccgacgtatccagatgctgcgcacggcaatggggccgctgatcgccgccgcgctcgaagacccggacgtggtggaaatcatgctcaacccggatcgcaccctctgggtggatcgcctgtcctcgggtcgcgccccgatgggcgtggagatgcccgaagccgatggcgagcgaatcatccgcctcgtcgcggcccatgtcggtgcggaagtgcatcgcggccagccgctgctatcggccgagttgcccgaaaccggcgaacgcttcgagggcatcttgccgcccgctgcaccggggccggccttcgcgctgcgcaagcgcgccatcggcgtcattccgctggagcggtacgtcgtggagggaatgatgacggccgcacaggcgggctttctggttcgcgctgtgcgcgagcgcaagaacatcctgatcgccggggccaccagcagcggcaagacgacccttgccaatgctctgctcgccgagatagccgccacgggcgaccgcgtgctggtgctcgaagacacggtggaactgcaatgcgcggcccgcgaccacgtaccgctgcgcacccgcgctggcgtggtgtccatgaccgagctggtgcgctcatccatgcgcctgcgcccggatcgcgtggtcgttggcgaggtgcgcggcgccgaggcgctggatctcatcaaggtatggggcacgggccaccccggcggcatcgccacgatccacgccggctccgcactgggcgcgctgctgcgcctggagcaactgattctcgaagtggcggtgaacccgccgcgtgcgctgatcgccgaggcggtcaacgtggtgatccacatcgctgggcgtgggcgcaagcgccgcatcgagagcatcgcccgcgtcgtcggcttcgacggcgtgggctaccaactggcggacgcactggagacgccgttccccgagctgctgccacttcccgatgccgcacccgctgcggcgatttccccgtcccctgaccaacctggagaactgccatga

SEQ ID NO: 343222 - DNA, 756 bp, Pseudomonas aeruginosa
atgaaaacccatgctcccaagctcgccgcgttgaccgccgcctgcgtgctcgccttcggcatcgcgcagcccgcgcacgcgctgttcggcgtcggcgacatcgtgctcgacccgaccaatctggtgcagaacacgctcaccgccgttcgcacgctggagcagatcaacaaccagatccgccagctccagaacgaagcgcagatgctcatcaaccaggcgcgcaacttggccagcctgccgtccagcgtggtgggccagttgcgcgcgaacctggcgaccacccagcgcctcatcgcgcaggccaaaggcctggcctacgacgtgacgaacatcgaccgcgagttttcgcgcctgtaccccgagaagtacgccgccacggtgagcggcaatcagatgtacctcgatgcgcaggagcgctggaagaacacgctcaacggcctgcagaccaccatgcagatgcaggcccaagcgtcgcagaacctgagcgacgacgaaagcgtgctggccgacctcgtgggcaagagccagtcggcggagggcgcgttgcaggcgatgcaggccatgaaccagttgctcgccctgcaggccaagcagtcgatccagacgcagcggctccagatcacgcaagaccgggccgcctcgctggagctggcgaggcaggccgcggccacggagcgcgggcgcgaggtgacgcgccgcttcctgggcgaaggcacgccgtacacgccgcagcccgtccatttctacaaccgctga

SEQ ID NO: 343223 - DNA, 300 bp, Pseudomonas aeruginosa
atgaagaacgcgcccgtcctgttcgctctcacgtccctgttggccggctgcgaccggccgcccgcggtggatgcactggccgctgacccgtcccggctgcacacgctgcgcgcgcaatgccgtgcgggcgagcacggcggcgcgttctgcgcgcaggtggcgcaagccgacctgcgccgctttctctccggcaaggccggccccggcgagtaccagacgcccgccgacctgccgccgattccgcccagcttcgatgagcccgccgatggcaacgggccagggcaggaggactcgccatga

SEQ ID NO: 343224 - DNA, 450 bp, Pseudomonas aeruginosa
atgcaagaattcgccactcaggtcgtcgacctgctcaacggccttatctggggcaagatcctcatctggctgctggtcggttgcggcctgtacttcaccgtgcgcctggggctgatccagttccgccacttcggtcataccttcagcgtgctcaagggcagccgccagtcggacgactcgggaatctcctcgttccaggcgctctgcacctctctggcggcgcgggtcggtaccggcaacgtcgccggcgtggcggtagcgatcacgctcggcggtcccggcgcagtgttctggatgtgggcgatcgccctggtggggatggcgaccggcttcgtcgaggcgaccctggcccagttgttcaagattcgcgacgacaagggccagttccgtggcggcccggcctactacatggaggggacgatagagaattcggaaaaaatcgtacgctaa

SEQ ID NO: 343225 - DNA, 918 bp, Pseudomonas aeruginosa
atgacaacgaacttcgtcgccatcgacctcagccagttgccaccaccacacgcggtggagcagctggactacgagcagatactcgccgagcgcaaggcctacgccatcagcctctggccggaggatcagcaggcggaaatcgccgcccgcctcgccctggagtccgagccgctgaccaagctgctcgaggaaaacgcgtaccgcgaaatgctctggcgccagcgggtcaacgaggcggctctcgccaacatgctggccagcgcccagggcgccgacctcgaccagctcgccgcgaactacaacgtcaagcgcctggttatccagcccggagatccgtcgaaggtgccgcccgtgccggaactgctggagtccgacgacagcctgcgcgagcgggcgcagatggcctgggaaggcctcagcaccgcgggaccgcgtaacagctacatcttccacgcccgcgccgctgacggccgcgtcggcgatgcctcggccgtcagcccatcgcccgcggtcgccgttgtcaccgtgcagtcggcgctgggcaacggtgccgcatcggctgacctgctgagagttgtcgagcagtacctcaacgacgaggaccgccggccggtagcagaccgccttatcgtccgcagtgcggaggtactcgaatacagggtcagcgcaacgctctacctcaatacggtcggtcctgagtccgagccgatcctcgaggccgctcgcatgcggcttctggccttcgtccagcagcgccgccgactgggcatggaagtctccgagtccgcgatccatgccgctctgcacgtcgagggcgtgaagaaggtcgagctatccgggtgggcggacatcatcgccacggaggcgcaggcaccgtactgcgcaggcgtcaccctggtacaggggcaaagctcatga

SEQ ID NO: 343226 - DNA, 2199 bp, Pseudomonas aeruginosa
atggatcgtcgcaacgagccgtcccccttgcccaccaaacgcccgctggcgccgctgatgctgttgatggccgcctgctcctcgccggccctggccgaggacgcggcgcgcaaggacgatcccctggaactgggagccgacacggtcaccggcgagcaggcctcgtccagggtcgaacgctcggcctcggccaagtacgccgtgccgctgctggataccccgcagaccgtcacggtggtgccgcaaaaggtgatccaggagcagaacgccctgagcctgcgccaggtgctgtccaacgtctccggcatcaccttcaacgccggcgagggcggcggcggttccggcgacagcatcaacatccgcggcttcagcgccaacgccaacatgcaggtggacgggctgcgcgacagcgcccagaccagccgcagcgacctgttcaacctggaggcggtggaagtgatcaagggaccgaactcggtgttcggcggcgccggcaccagcggcggcagcatcaacatggtcagcaagcagcccaaggccgaagccttcacccacctgggcgccgggctgggcacggaccgctaccggcgcctgaccctggacaccaaccagccgctggaagggcttggcgaatcgaccgccttccgcctcaacctcatggcccaccacaacgacgtcgccgggcgcgaacagatcgacaagcagcgctggggcatcgcgccatccctgaccttcggcctggacaccccgacccgcctgaccctgagctacttccaccagcgcgacgacaaccttcccgactatggcgtgccggcgctgaacgggcgcaagctggacggcgtcagccgccacgattatttcggctggcgcaacctggacgaggaacggatcgacaacgacgtcgccaccctcaagctcgaacacgatttcagcgacgacttccagttgcagaacctcatccgctattcccacctgcatcgggacacggtgatctccgcctcccacgtcaaccagaagggcctgccgccgggtcgctacctgccggcgggaccgcaagcctacgggcgcgattcgaagacgcggatgtggatcaaccagaccaacctcaccggccgcttcgataccttcggcctggcgcatacgctgatcggcggcttcgagctgtcccgcgagacctacgaccgcaccacctactcctacaacctgggcaagttctacccggccaacggcttcgacctgcacaacccgccgggctactggaacggccccaccgacaagcgcgacagcgcgcgcaaccggaccgaactggaggtcaaggcgctgtacgccttcgacaccatcgccctggacgagcgctgggacctcagcctgggcctgcgctacgactggatcgacggcacctcgcggagcacgccctcaggcaagccgacggtgcgcgccgacagttccgacggcaagctgagcactcgggcggggctggtattcaagccgctggagaacgggcgggtgtacttctcctacggcacctccttcaacccctcggcggaacacctggtcaccaccggctcgggcgtgaccgaggcgaccggaggcctggcgccggagaagaacagtacctacgagctgggcaccaagtgggagttcctcggacggcgcctggagctggacgcggcgctgttccaggtgaagaaggaggacgctcgcgaacgcctggccgacggcagctacgtgcttgccggcgaacagcgcgtgcgtggcctggagctgagcgccagcggcaagttgaacgagcactgggacctcttcgccacctacacctacctcgacagcgaaaccctgaaatccagcaacccgcagcgtgagggacaggccctgggcaataccccgccgcgctcgttgagcctctggagcacctacgaactgcccgagggcgtgaccctgggctatggcgcacgctacgtcagccagcgcaacgtcacctcggtggacaacggcaagctggatgcctactgggtgcacaacatgatgctcggctaccaggcgacgcgcgacctgaaactgcaactcaacctcgacaacctgttcgacaaggcctacgtcgagcgggtgcgccaggtgtacggcaaccagtcgcgctcctcggccatcgagtatggcgacggtcgcacggcgattctttcggcgatctacgcgttctga

SEQ ID NO: 343227 - DNA, 216 bp, Pseudomonas aeruginosa
atgcacggatactttgccgacgcaccctcgaacgcgcagcccaacgctgcgcgttcttcgttctggagcgccgcgaccgattgggctatgatggccgagcaagcctgccgtctgctggcaatcgccccgacgcagtacgctccggctttctaccgcgacgctcttatgtggctcctagcccacaaagccgcagccccgcaaagcggcccgaagtag

SEQ ID NO: 343228 - DNA, 279 bp, Pseudomonas aeruginosa
atgaaaaggatcatcccgcttttgctggtgaccgcgatgactgcctgcggccagtccgaagcgcctcagaagatcaacgcttccgaagcgaatattccaacagtggaagagcttgcggccaatcctgaacggctcaaggaactgcgccagcactgcaagactgaccgcccaaagttgggtggcgtgctgtgcaaccgggtggccgaagctacgcgcaagcggttctatggcgacggcgaaacgccatacacgcctccgaaggaaccgcccaagttctga

SEQ ID NO: 343229 - DNA, 1101 bp, Pseudomonas aeruginosa
atgcaattagtgaacctaaaggatcggtcgttcattctcgcgctgatcgtaattacgctgctcttcggcctactgctatggccgttctacgcagcaatcttttgggcgacggcgctagcagtgctgttctggccgctctacgagcgcatcttgtcatcgatgcctcgatccccggcactggcatctcttttgaccatagtagcgtgcgtgctgctcgtagtggttccgcttgcactggtcgctatatctgctgcgcaggaagtagtgcaactctacgatcacctactggctgatggcggcagcggcatcgaagcccgtatacatcaggccgtaaagacggctcctccttggttgcgggcgtggctggaacggatgggcctcaaccagttggatggcatccgcggcaacacagtacagatcctcgaacaagcgctgcaattcatcgcctcgcacgccgtcgcagttggtcaagatacgctgcggcttgcagtgagcttcacgttgatgctctaccttcttttctttgctttccgtgatggaacgaaggtggtcgagaatttacgtgacgcattaccaatcgagcgcagctacttgggtgagttggggcttcggttcgagaacatggtgaaagcgacgattaagggaagcctgatggtcgcgggcatccagggtgcgcttggaggcgtgctgttctggttgctcggaatccaaggagcagttttgtggggtgtcgtaatggcagtgctgtcactaatccccgtgctgggggcgtggttggtctgggggccggtggcactttatcttctagcaacgggtgaagtggcaaaagcggctcttatggccgcgttcggcgccggtgtaatcggattaatcgacaacatcctgcgaccgatcctcgttggtaaggaagctcgcatgccggattatatcgtcctgctatccactctcggtggaatctcgctttttggattgaccggtctcgtcgctggaccggttatcgcggccttttttatggcggcctggtcattgtttgtcgcaggaaacacaagtggcgaatccagcactccgcatgcttcagccgagcccgagaattcggggtag

SEQ ID NO: 343230 - DNA, 798 bp, Pseudomonas aeruginosa
atgaacaaatttgtagccatcatttttccagatgaagcgcgggcctacgaaggggtcctggcgcttcgcgagctgcatcgagagggcagtatcctcctttacggcgaaacggtagtcgtcaaggacgaagccggcaagctctcgatcagggaagccaagtcggcgggcgggcttgcaaccacgattggcgcagttactggtggtcttctcggcttgctggcaggtccgttcggcacaatcgcaggactgaccggcggcgcgcttctcggcgggcttaaagatatattcgatgctggaatttctggggattttatcaaggtcatctccgaagaacttacgcctggcaggagcgtggtcattgccgaaatcgatgagggctggacttcgccccttgatattcgcatcgcccctctaggcggcgtggtggtgcgtacgttccgtcacgaagtcgaggaagcccagatccgacgcgagatcaatgacatcacgaacgaattgacgtacctacgcgagcaactgctccaagagggtaagcatgctggcacagaactaaaggtgcgcatcgaactgttggacaaatccttggccgaagccagcaagcgaattcaagggaaggccaaagctcttcgcgaagaaacggaggctgtaatcgtctcattacaagcgcaggccgagggggctgtcgaatcggctggaaagcggattgaacaacgcattgccgatatccaggaagactacgataagcgcgctgccaaactcgaacaggcttgggaacaaaccaaggccgcgctgagatag

SEQ ID NO: 343231 - DNA, 1131 bp, Pseudomonas aeruginosa
atgctcatcccgtccctgcttctgccgccccggcaggcaatccagcccgcacttctggagcgagccggcagtttccatcgcgccaccgcgcccgctcgggggttgttcttactctccgtgctgtgctgggtctcgacggcactggccagcgagccatgccaagctcccgccacccccagaagtgcgagcacgctcaacctgcgcatggacaacgacctgctcggcggcaccggccaggatcagggatattccaacggcatattggcgacgctggtctcccctaacctagcagatcaagcgaattcgacctgcctgccgggcgtggcgcgctggctcagccagcagtttgccgaacgacaatcatcgaccatcgatgaatggcatctcactgccggattcggccacctgatgttcacgcccacggagcgaaagcggcggggcctgattgccagcgaccgcccctacgccggggcgctgatgttcagcttgggatacagcgcgcgcacgggtgatgtcctgcggacgtcccagttgcgcgtcggcgtggtaggcccctcggccaaggctggcgaagtacagaacgcgctgcaccgcgtcatcggtgctgacagctctcttggctgggacaatcaattgcatgacgagcccgtgatccaactgattcacgagcggcgagagcgtctgcgcagcagctcctcgtcccaggcttggcagtgggacgccatcggggcggtgggtggcagcattggcaacttcgcgactgccgcccatgcagggatggaactgcgcctgggcactgagttgtcggacgacttcggcatggcgccgctgcgtccggccggtgagaacaccacagcctttcaaactctcgcggatggcatgtggcgtagccacctgttcctgtccctcgatgcccgctgggtgatgcgcgacatcacactcgatggcaataccttccgcaacagccacagcgtcgataagcgccccttcgtcgccgacatcggctacggcatcgcggccgaccgcgggcgctggcggatcgcctttgcacgttatcaccgcacccgcgagttcgcagggcagcgacaacgaccggtctttggtagcgtcaccttcacccgaggcttctaa

SEQ ID NO: 343232 - DNA, 1209 bp, Pseudomonas aeruginosa
atgaagctgcgtacgctgctgtggccgcgccggcgtccgggctcgctatggtggtggttcggtctgcgcatgagcgcgctggccgtaggaaccgtgttggcggtggcgatcggcatgtgggcgtacttcgacatcgccgatacgctaacactgcgccaggcaccgccggagacgcgccaggagatcgagcggctgcgtgaggatcctcgcggcaatgagcctcggctgtgggagctgatggagcgctaccacaacatcgagcgattcggccccggcctgaccaatcctgactggctgatgttggccgtcatggtcgtcgtcgcaatccctgtcgtcatcctggtcgggctgtggttgtcgcgaccactttcgcgtcagttcgtactgatcgcagaagcagcccgcagagtcagtgaaggccatttcggtaatcgcgtcgatgcggtgactaccgcacccgacgaattggcgggccttgtgcgcaactttaacgacatgaccacgcggctacagcagtacgagcgcgaggtgcgtgactccagtgcgatgctggcgcacgaattgcgcacgccgctcaacgcggccatgggccgtgtccaaggcatgatggatgaggtcttcccgctggagcaggatcagcttggtgcgattcttcgccagctcgagcagatcaaccggctggtgggcgatctacacctggtttctctggcgcgtgccgggcagctcccgctcgaaatggacagcttcccgctgcaggaactgattgcggagcggctggaatgggccgcagctgacctggatcgagcaggcattaagccggttgtgtcggctgcgacccatatccaactgtatgccgaccgagatcgcatagggcaggtactgacgattctcgtcgagaatgtcctgcgttacgcggcgcgcggcaagacactggagatcgacgcaaatagtacgccgttgggcacaacgattaccgtctcggaccacgggcctggcgtcgcaccagaacatcttcccgcgatgctcgaccgcttctggcgcgccgaaacctcgcgagcgcgtcattccggtggaagcggacttggcctggcgatagctgcggccgtctgccgggcacacgggggcgagctggaatgcggcaatcgtagcgctggcggcttgatcgtaagcgtgcgcctgccgacgcggacttttgtctcgaccggttga

SEQ ID NO: 343233 - DNA, 690 bp, Pseudomonas aeruginosa
atgtctcaacagaaaatactggtcgtcgaggacgatctggacagcgccagcatcctggaggcctacctgcacaaggacggcttccaggtcagcaaggcacacgacggcgcgcaggccctgcagttgcacgcacagtggcgccccgacctggtcctactggacgtcatgctgcccaaggtcagtggtaccgacgtgctctccgctattcgccgtgttggcgacacgccggtgatcatggtcaccgccatcggcgacgagccggagaaactcggcgcactgcgctacggcgccgacgactacatcgtcaagccctacagcccaaaggaagtggtggttcgcgtgcacgcagtgctgcgccgcgcacgcccctcgccgcggcccgatggtctactgcgccacggcaacgtcgtagtcgataccggtgcggttttggccagcgtggaggatgcatcgggacagccaattccgctgtccctgacgcctgccgagttcaacctactggccaagctgttgaagacgccgttcaaggccttcacccgtcatgaactgctcgacgcctgcttgcccgaaagcgatgcactggagcggtccgtcgacgtgcacatgcacaacctccgccgcaagctagaacagcgtggtgtgagcggcgtactgatgacagtacgtggcgtcggataccgtttccaatga

SEQ ID NO: 343234 - DNA, 1458 bp, Pseudomonas aeruginosa
atgttcccaaaattgtctggcgatgtcccggcctggttgatggcctccgtgctggccgcgccgtggctcgctggatgctcgatggcaccgcattatgagcggccgccgcaggcagtaccggcgacgttcgggcagcttcgcgctgcagcggccgccaccgccgcagagcaggccgcgcccgcggcgctgacggatcaggagcgtgagttcctgggcgccctgacgcccgacggcgccctggcgccgctggtagtgcgcgctctggcgcacaacgccgactatcgacttgcggcgcttcgggtcgagcaggcgcgcgcgcaataccgcgtcgagcgctctgcgcgcctgcccacggccggtatcgatgcgcagcagacccgacagagcttcgacgatcccgcgctacgcgagcgctaccagcaggatctgtcgcgtgccggcatcgccatcagcgactacgaactggacgtattcggacgactgaagtcgctatccgatgccgctcgcgaacattatctagccagcgaggctgggcaggaggcagcgcgcggcgcgttggtcgccgaggtactaagggcctatgcgctggtctgcgcggcgacgcaggcgcaccagcgcctgcaggccgtgcatgcggacaacgcggcgctgctggagatcgcgcaagggcagtacgacatcgggctgatcgcacgcgacgcgctggaccgccggcgtgccgccaccgagcaggcgcaggtggccgcactgcgcgccggcgacgatgccgcagcagcgcggcgggcgttgcagctgctgaccggattcgatgcggaggtggcacccggcccgctggcaccgctcgccgaggcgcccgacgcaatggcggcactgcgcgatctggattcgaaggtgctgctgcagcgtcccgacatccgccaggccgaggccgagctgcgcgcggccaatgcgaacattggcgcagcccgcgcagccttctttccctcgatccgcctgagcacctcgctgggtagcgccagcaactcgctggacgatctgttcagctcgggcagccgcagctggtcgttcatgccgcagttggtgctgccgatcttcgacttcggccgcaaccgcgccaacctcgacctggcctggacccgcaggcacgccggcgtgatcgagtacgagcgcagcatcgaggccgcattccgcgaagtcgccgacgcgctcgacgcccgcgccaccttcgccgtgtccgaagcccagttgcgcgagcaggatcggctcgcggcgctgcgtctcgaacgcgccgagcgccgcgtctcgcgcgggctggcggatcgccaggacctgctggccgaccgtatcgaggcgacccgcaccacgctcgaccacctgcacgctcagcgcgatctggcgctaagccgcatcgcactgttcagggccttctacggcgtcgaactgcccgcccggctttga

SEQ ID NO: 343235 - DNA, 1104 bp, Pseudomonas aeruginosa
atgcccattgcgcgctccattgtccccgccggcctgctggtcgcgacactactgctgtcggcctgcagtcccgacacgcccgcgcccgaaccgctgcgcacggtcaagctggaggccgtcggggccggttcggccgccgccgcctcgcgcttcgtcgccaccctgcgccaggagcagcgcgcggaattggcgttcgagaacggtgggcgcatcgccgagatcgccgtggacgtgggtgaccgcgtgcgcaagggccaggtgcttgcgcgtctggacgccgagccggcgcggctgcggctggcacaggccgaggcgaacctgcgcgcggccaccgtgcaggccagggaacggcagatccaattgcaacaacagcaagcgatgttcgaggacggagcgatttcgcaagcgacgctgaccagcgcccaggtcgccgacgactcggcacgggcgcaattgcgcgtggccgaatccgaccgcgcgttggctgcacgcgcgctgcgccagagcgagctgcgtgcgccgttcgacggcagcgtggtggcccgccaattgcagccccaggccgataccttggtcgggcagaccgtgctgcaggtcgagggccagggccagccgcaggcgctggcgacgctgccgagctcggtcgcgcagggcctggcgccaggcgcgctggtgcgggcgatgcgctcggacgcgccgcaggcgacgttcgagctgcgcttgcgaagcgtctcctcacggctggaaggcggtgccagcgtccaggcaatcttcgacgtgaccgaggcctcggtaccgctgcgcagcggcgacagcctgctgctcgcgctttcgaatgagtccgcagtcgacctgtcggtgccactgcaggcggtagtcggacaacagggcgaggatgcggtgtacgtctacgataccaaggtgggcaccgtgacccgccgccgcgtcgaactcggctcggtcgaaggcgagcgcgtgcgcgtgaccgccggcctgcagccaggcgaccaggtggtcaccgctggcggcgccttcctcagcgacggccaagcggtgctgccgttccgctccgcttcgcgcctgaatgaagcggggcgcccatga

SEQ ID NO: 343236 - DNA, 3105 bp, Pseudomonas aeruginosa
atgaagctgacccattcggccctcggtgccagccgcctgaccctgttcgccgcgctgatggtactggtcggcggcatcgtcacctttctcggatttccttcacaggaagaacctacggtcacgattcgcgatgcattggtgacgatttcgcatcccggcatgcccagcgaacaggtcgaggccctgctggccaagccggtcgaggagcgcctgcgcgagatcggcagcctcaagaggatcgtcaccacggtgcggcccggcaccgcgactatccagctcaccgcctacgaccacgtcaaggacctgccggcgctgtggcagcgcgtccgcgccaagtcggctgaggccggccaggccctgccagccggcagtttcgggccgttcgtcgacgacgacttcggacgggtggcggtggcctcgatcgctgtcaccgcgccgggcttcggcatgagcgagatgcgcgagccgctacgcgacctgcgcgcgcagttgcataccttgcctggcgtcgagcgggtgacattctatggcctgcaggaagaccgggtctacgtggcgttcgatcgcgggcgcctggtcgaggccgggctgagcccggcctcggtgatgcagcagttgcaggcgcagaacgtggtcgcgcccggtgggctggtgtcggcttcggggctggcgatgacggtggccacttccggcgagttgcgcagcaccgaggagttgcgccactttctggtctcggtgtcggacacatccggtgcgggcggtacgcgcgaggtgccgctgggacatcttgcccggatcgaggtgatgccggccgatccgcccgagagcgccgcggtctacgagggcatgccggcggtggtggtcgcggtgtcgatggccaccggctacaacatcggcgacttcggtgcgcagctgcgtactaagctggaagagaccgcacggcagttgccggccggcttcgagcagcacgtggtcaccttccaggccgacgtggtcgcgcgcgagatgggccgcatgcaccaggtcatgggcgagacaatcctgatcgtcatggtcgtcgtgatgctgtttctgggttggcgcaccggtctgatcgtcggcgcgatcgtgccgctgaccatcctcggcgcactgatcgccatgcgcgcgctgggcgtggaactgcagacggtatcgatcgcggccatcatcatggctctcggcctgctggtggacaacgggatcgtcatcgccgaggacatcgaacgacggttggccgccggcgaagagcgccgccatgcatgtatcgaggccggccgcacgctggcggtgccgctgctgacctcctcgctggtgatcgtgatggcgttctcgccgttcttcatcggccagaccgccaccaacgaatacctgcgttcgctgccgatcgtactcggcctgaccctgctcggctcctggctgctgagcatcacggtgacgccgctgctgtgcctgtacttcgccaaggtgcatccgtcccacggcgagggtgctggccagtacgattcgcgcttctaccgcggctaccgccggatcatcacccgggtgctggaccacaaggcgctgttcatcggcaccatgctggtgctactgaccggcgccggcgttgtgctggcgtcgatcccctacgacttcctgcccaagtccgaccgactgcagttccagatgccggtgaccctgcaacctggtagcgactcgcgcgaaaccctgcgcacggtggaggcgatgagccgctggttcgccgacgacaaggtcaatccagaggtgaccgatagcatcggctacgtcgccgacggcggtccgcgcatcgtgctgggcctgaatcccccgctgccgggcagcaacatcgcctacttcaccgtcagcgtcgcgcagggcaccgacatcgagcaggtgatcgaccgcacccatcggtacatgcgcgaggcgtttccgcaggctcgcgccgagcccaaacgcttcccgctgggtgcgaccgaggccggcgtggccatctaccgcgtggtcggcccggacgaggcggtgctgcgcgagacgggcgagcgcatcgccgcggcgctgcgcgggttgcctggtattcaggacgtctacgacgattggttgccgcgcgtgccgcgctacgtggtcgaggtcgaccagctcaaggcgcgccgcgccggcatcagcagcgaagacgtggcccaagcactgcaactgcgctacagcggcctgcaggcctcgctgatccgcgacaacggcgtggctgcgccgatcgtgttgcgcggcgatgcgcgcgagcgcgatgccgcgggcagcccggccgatacgttggtctatcccggcgcgggcggcgcgccgctaccgttatcggcgatcgcgttggtctccacggcgagcgagccctcaacgatcatgcgccgcaacctggtgcgcacgctgacggtcaccggccgccatcccagcatgaccgccaatggaatcgtcgccgagatcgcgccgcagatcgatgcgatcgagctgccgccgggctaccgcatcgaacttggcggcgagatagaggattcggctgaagccaaccagtcgctgctgcagttcatgccgcatgcgctgatcatgatcctgctgttgttcgtgtggcaattcaattctttccgcaagctgttcatcgtggtggcgagcatcccgttcgtgctgatcggcgcggccctggcgctgctgctgaccggctacccgttcggcttcatcgccaccttcggcctgctggcgctggccggcatcatcgtcaacaacgctgtactcctgctcgagcgcatcgaggctgaactggcctcgggcctggcgcggcgcgaggcggtgatctcggcggctgtgatgcggctgcgcccgatcgtgatgaccaagctgacctgcatcgtcggcctgatcccactgatgctgttcggcggtcccctgtggaccagcatggcgatcacgatgatcggcggcctagcgctgggaacgctggtgacgttgggcttgattccgctgctttacgaagtcctgtttggaatcaagcgaattgggccgtggaacctgagtgtcgccaccgcgcatggagatcgctcatga

SEQ ID NO: 343237 - DNA, 768 bp, Pseudomonas aeruginosa
atggctgacccgagcgccgaacactggtatccgaccgccgcgtatctctacacgctgcacctcgacggccccgcgctggcgtgggaatacctgcgccgccaccccgactaccgccgcgactggctgcgccgacgccgccggccagaggccgccgcgcgctggggactgcgcctgctggaagatcccgccctggatgcgcgcgacgcgcatccggcctggttccccgatcacgatgcggtggtgcagctctacccggatgccgacccgccgcccaatgccgatgccttcgagttctggaacgtccccggacgcaaacacctgatccacgatggcacgcgcctggtgctggtatcgcgctggcccggctgctgcgtgcggctcgcactcgcgccgggcctggaagatggcatggcctacctctatgccatccgcgcttgcgccacgccctgcgcgcgctaccgcgcattcgcggccgaactggataccttggccgtggtcacgggtgccgcgcctgcggcggcggcccgttcccggcccacgccggccgcgctgctggaactgcacaccttgcaggtgctcgacgcgaccctcgcgggcgcgtccttgcgcgtggtggccgaagggctgttcggcgcggatgccgtcgcggccgactggcacaaggacagcgccttgcgcgcccgcgtgcggcggctggtgcgccggggcgatgcgctgatgcgcggcggctaccgccgcctggcacagctttcgccaccgttgcactag

SEQ ID NO: 343238 - DNA, 753 bp, Pseudomonas aeruginosa
atgatccgggatgatcagcaccggattgcatgtccagcaccagcgttgtgtccagctttaaccggcacggctgtacagctgaaccggaatccgcaggctggacggcctgcgccgacctcatcgacattcaccccatcagcggccagcccttgccgcgttcggtgtggtggatcatcgaaaccaaggaatagcgagcggcaccggccccaagccgttccgccttggggacggtggtcgaaaatccgggcgcggcgatggccgcgcccggttccagcgtccaaagcaaaatcgccacgtcgccgccttcgaccaggcggcgacgtggcggacgtgcaagtgccttgcacgcggtacggcgatcggcgcccgctgcgcgggcaaggtttcgatggcgccccgccgcaatgggtggggcttgtggggctacgccccggcttgctgcggcaggttgtgccaaagcgtgccgtcctcgacgctggcggttcgcgcctgtacgtcacgaaggacggttcaccgacacgccacccggcttcgctatggagcatccacgccacgcctcaaccacgtcgttgcaatcagcggcaaggagcgttctcgctcgtcgttggggtgttgtccttgcccgcgtcagggcgcaagccggtgaaaccgtcacgcggggatgccgagtcggccatctctccattcgagagcgggcggcccgtgcgtccttggcttgtcgtgaatcctggcgagggagcggctgcgccttag

SEQ ID NO: 343239 - DNA, 744 bp, Pseudomonas aeruginosa
atgttcaggcccactggccgctatctgctattcttggccgcgtcgaccttgcttctcgtggagatccacgagcagggccacgccatcgccacgcgcctgctgtgcggtggctgggcagaccgcgtcttcgacaacgtgctgacctacagcgggtgcagcgcctccagcttggccgtcgtagatctggtcgggccactgttctcgtacgcgatgctgtggaccggcgcactgatgtcgcggcgccagtcgccggtgacgcgcggcctcggcctcagcctggccttcgcttcgctgcccctcgcgcgtgttgttccgcaggtcctggtggccttggtcgccggctccacgtctgacgagtatggctttgttcgtcgaatcgccggcgatgccatcgaacgggccggcgcgggcgggttggcgctgctggccgcgctggcgttgaccttgccgcccttgctgatggtgtggcgacagctgccgatcggccgccgcgggcgcacgatgagcggcctgttgttcctgccgttcgtgttcgtcattctctgggcggccacgctcaatagcgccctcgcgcacggcgtgctgcatcaggcgctgttgccgggttggcccacgctgcttgcggtgcaggccgccgcggtcgcaggcgtcgtctggctcctccgcgatgaggtccggcggctggttgaaggcgaccccgcccccgcaatgacggacatgagcggcgtcccgagtcgcccatag

SEQ ID NO: 343240 - DNA, 1218 bp, Pseudomonas aeruginosa
atgaagctcgattctggtccgcgtccgccatcggaacggcacgatgcgatcgacgcactgcgcggcttcgccctgctgggcgtctgcatggtcaacctggtatcgctgagcctgtacgagtttctcgatccacagcagcagccaggccacggcttcgacgccttggccagcgaggcgatggactggctggtgaacatcaagttcatcacgctgttttcgctgctgttcggcctgggcttcgcgttgcagctcgagcgcgcatcggcccgcgggcaggatggcgtccgccgctacgtgcggcggctggccgtcctgctggccatcggcgcggcccacgcgtggttcgtgtggtggggcgacatcctgttcacctatgcgatcgtcggcctgctgatgatcccgttccggaatgcgtctgaccgcatcctcctgatcgccgggctcgtcgtcgcgatgcttccgccgttgcttgcgccggcggtccgcgcggccctgccggaactggcgacgcaggcggcgatgtacggccgggcgctcgaagcgttctcgtccccatcgtggtcgcaggcgttcgcgttcaacatggagatgtccggatgggcgcgcatatccaactgggcactggtgtgcttcgtgctgggccggttcctgctgggctactgggccgggcggaaaggcctgctgcaatcgcccgaccggcacctccctctgctgcgccggatcctcgccggcgcgttggtggcgtggctgctttccagcctgctatcgctggtgcaggcgccgatgcgtgccgtctggccggccatcgacgtggaaccggtgaaaatggccatccgcatgctgttgcgcgtggggccgcttgcgctgggcattgcgtacgccgtcggcttcgtcctgctgttccgtaagccagcatggtcgcgcaggctcgccttccttgctccgctggggcgcatggccctgaccaactacctgacgcagagcctgatcggcatcgcgctgttctacggcatcggcttgggtctcggccctgcgcatggaatggccgtggtgctgctggcgtgggcgctggtactggcgctgcagatcgcgtggagccactggtggctcgagcgcttccgctacggtccggtcgaatggctgtggcgatggctcacatacggagagcggccacggttgctgcgtggctcgatcgcggaagtggatccggtgcattga

SEQ ID NO: 343241 - DNA, 612 bp, Pseudomonas aeruginosa
ttgacccgcgccgaaggcaagcgccccggccttgaccggggcgcttcgctggaaggagacgcccccatgacccgcaccaccaccagccgcccgcgcatggcggcgacctatgcgcccggcacggtacgcgctcgccgctggcacggcgaaggcgacgtgcgcggctaccgtccgccctcgggctggtgcggatgctggtatcaactggacaccgtgccggttagaactggacacggcgctggtgctggacaggtggcaggtgtgcaatccagtggaatgtccgccttcgactgcggtttcaacgggtcgatgcaacggtttgtcgaaatcgtgcgtccggcgtttcatggcctagcatcttccggggacgaccgttcaactctctcgccacggcatcgagcttggcctgcgatatcggcgacaggtccattcccttggggaagtaccgccgcagcacgccgttggtgttctctttggaaccgcagccgacagcggacgatgccagcccgattcgatcaatgcaccggatccacttccgcgatcgagccacgcagcaaccgtggccgctctccgtatgtgagccatcgccacagccattcgaccggaccgtag

SEQ ID NO: 343242 - DNA, 510 bp, Pseudomonas aeruginosa
atgtcgcaactgtccattccttccttcgattccccgttgatgctgcgtgactcgcgcgggcgctaccgtcaggcatcggccgaccagattctcgaagccgcgcgccaggtcatcgaccagaagatgcagcgcggtgacgagttcacttcgccggcggcggtcaaggactacctgcgcgccaagctggccggcttcgagcacgaagtcttcgcggtgttgttcctcgatacgcgccatcggctgatcgactatgccgagatgttccgcggcacgatcgacagcgcggaggttcatccgcgcgaagtggtgaaggaggcgctgcggctcaacgcggcggcggtcatcatttcgcacaatcacccgagcgggaaccccgagccgagcgcggccgacagggcaatgacctcgcagcttcggcaggcgctggcgctggtggacgttcgcacgttggatcacatcatcgtggcgggcggcaccaccacgtctttcgccgaacgtggcttgatctga

SEQ ID NO: 343243 - DNA, 2256 bp, Pseudomonas aeruginosa
atgacggacgctatcgcagacgcactgcataaacttcagcgacatcggggcttgacccgcgttggcgaaccaaaggtaatcggtgcatcgacgcagatagaggtcgatgttgccgtgcaactgccaaacaggtctcggcgtagcggcgtctccgaaaccggggtgcgtgccgtcgagacatgcgttctggtattcggcggtgactggcccctatccgcgcccaagcccttcttgcgtgcggacttcccactcaacttgccacacataaacccccatcgcgaaggcgagttggtttcgccatgcctgttcgaaggatctttgaacgaactgctgcatcggtttggtctcgacgccattgtcgatcagttggttgattggctgcacaaggctgctgccggaacgttgttggacctggagcaagggtgggaaccgacgcggcgagacagttgtccttcgaccgttgtcttcagtgccgaaaaggtcgcggccgccgcccccgttgacggcgcggttttggtggtttccgcgagctacgtgacgattgatggcgggctatacgccatcatcgatgacgagctgagcgcacaagtcgatcctgtgttttcccaaggcgttcacaacgacaagttgggcaagtgggggaatggccataccgcgaccttcattgcgcggggaccaatcaccgatggccacccgtatgtagtcgaacgctatcaaccggagacggttgtcgatcttacgacactgctagatcgagcagcagaacttggtatcgatcgtgacgctttagcccaaagcttggagggttattaccggcgctcgattctggatatgcaacaagactcgcgtggttgggtgcacggtttgtacgcgattgtgattctgactgtacaaagaccagcgccgcttgttggatcaccaggccggaatgtcgaggtattgccctatgtggtgcgctatgaactcaacgctcagtcgctcctagagcgaaatgccacggttcaccccgcctttcatgcgcatgcgttgtctcccgagctgctggcacggacatccggtatcccgtcagcagctacatcgcagtcgctggtcatcctcggctgcggtagtgtgggatcaaaaatcgcgatgcacctcgggcgggctggtttcggctcaatgactttcgttgacaacgaatccatgtcacctcacaacgcagctcggcatgcactcattgagcgagcatcggtgctggtcctaccgcgaaagtctgcgctgatgaagacggcctttggggaactgtcgcatcttcaatcgcgcgcgttcgacgctgacgctgtgactctcttggtcgatccggaaagattcgccacaattgttccgcaggatgctgcccttatcgtggacacgacggcttcacttcaagtgctggccgcagaaatgcaatcagaagcattggaccaatccccaactcgactggcacgggtagtgatgtatggccaggggcgttgtgtcgcggttttgcttgaagggccaagtcgcgctggtcgggttgatgacctcacggctttcttgttcgagtgctgccggtttgtgccagaacttcgtgcgtcgattgccggtgatacgtcggagccgacgcgcatttttgtaggggacaactgccgctcactgaccatgccaatgtcagatgccgttgtttcgcggtctgcatcactggctggagtgcaactggagcgctggctcgttgatgggcttccggaggaagcgacgctttgtgctggtatctcggacgccgaaggccttggcatggcatggagccgtgccagccttggcccgaccactgtgctcgatgtagcggacgatggcggctggagcattcggattctgcaccctgtggcgcacgcgatcgatgctgatgcgctgcactggggggcggtggaaacaggaggcgccttggttggccgtatctcgtttgaaaatcgaaccatcaccattgcaggccttgttgaggcaccgtctgacagcgttcgcgaggccgctcgttttgtccttggaaccagtgggcttgtccaaagtttgcgcgctgcaaacgcggcctctttaggatatctcgctttcattggcacttggcacagccacccgaaaggcggcgcgcattcagggatagaccgaaataccttgcgcagcatcgcagaggatgccggtggccttcccgccgtgtcgttggtctggactccgacaggactcacgtgcgcggttgaccgctggtaa

SEQ ID NO: 343244 - DNA, 789 bp, Pseudomonas aeruginosa
atgacaacaatttttgaactggtcaaggacccttatgagcgcaaggcgcgggttgttcctgggcttcttgtggccttgccggtactggttccgttgttgtgcgtctacggagccaagcatcctgtgcttacgagtgtgattggcctgcttggtggctgtggggccatttatgcacttgcgagcgttgcccgtggccgcggtaagaaactcgaagaaaccttagttgccaagtgggggggcatgcccaccaccattgcactgcgccaccgcgacaggtttctcgatggtgtcagcaagcagcgctaccacacggcgatcactgccaaacttggcatcgcgatgccaacagcggaagaagagttggcagcccctgaacaggcagacgacacgtacataggggcaaccaaacgacttcgcgaactcacgcgctcgaacaagcagctcttgctgaaggagaacatcgcgtatggattccatcgcaacatgttggcgatgaagcccgtcggtgtcgcgtcgtgtctcgtgggcatcctttacggacttttgatcgcaaaggtcctacgggtagcaccgcctcacttcaacccaatgaattttgctgatccagggctcgcagccggcttgacactactcatttccctagcgctgcttgccgcttggctgctgtatttcgatcaggattctgtcaggcgaatgggcttcgtctacgcagaacgcctattcgagtgcttgccatctttgtcttcttcggcccctcggaaaaaagcgcaaaaaacagctatagattga

SEQ ID NO: 343245 - DNA, 939 bp, Pseudomonas aeruginosa
atgccttgggcgttcaaggacgcggatgcgtctgactatccgctggaaggcaacttgctgctcggcgccgatcgggtggcgatcgagcacccgctggagacaccattcggcagcaaattccgactcgacgttgccgtgatcgggccgcctgtccagaccgagccgatggtgctggggggcgtcgaaatcgaactcaggcatgcctttgatgggcgcaaggcgctaatcggaaaatcgctcggattccccctcatctccatcgacattactgagatgacgctggcagaactcacaccagaatgggcgcagaaggtgctgaccgcaaccacgcggagtcatgagcaagggcgccggcagacctacatctacctgcatgatctgctgtaccccctctacgcgcagctaccggcatttctcgacgatgaacagcgccaccagtttctggtgtttgcggacgacaacactctaaacaagctggtgcgctggatgaacgcgctggccgaaaagctggagtactcgaagggtacggtcgccgttgccctggtcaatggcaagaacgaacagtcgcgcaagatgctggaacgcgccggacaagtggttggccccgactgggctgaattcaacgaccaacgatgcctgcgtctgactcttccgcgaccaaaaggtccggctgatctccaggctcatcgcttccacatgacgatggcgcgcgttctgctgtcgcgcaccgatgcgctggttggctacaagtattgcaacggtgtggacaacaaccaccccgaagaagatgtatgggttgcgcatcgctggatcgccgacctgaaaactcatacccagcaccgcgtattgcccaagcgactgtctgaaccgatcaacaggttgatcgcggtggtttcggacctgcatcgcaatcacgcggcaaccagccaagaggcgtga

SEQ ID NO: 343246 - DNA, 1977 bp, Pseudomonas aeruginosa
atgttcgggaaactgacactctcggccgtgccttaccacgagcccatcgtcatggtcacactggccgtcgtcgccctgctgggcctcggcgtggtcggtgcgatcacctactaccgcaagtggacctacctgtggaccgagtggctgacctcggtcgaccacaagaagatcggcgtgatgtacatcgtcgtcgccctggtcatgctggtccgcggcttcgccgacgcgatcatgatgcgcggccagctggccctggccgaaggcgccaaccacggctacctgccgccggagcactacgaccagatcttcaccgcgcatggcgtgatcatgatcatcttcatggccatgccgttcatgaccggcctgatgaacctggccgtgccgctgcagatcggcgcgcgcgacgtggcgttccccttcctcaactcgctgagcttctggctgctcgtggtcagcgccatgctggtcaacgtgtcgctgggcctgggcgaattcgcccgtaccggctgggtggcctatccgccgctgtcggagctggcctatagccccggggtaggggtggattactacatctgggcgctacagatatccgggatgggcacgttgctcacggggatcaacttcctggtcaccgtgttcaagatgcgtgccccgggcatgaagctgatgcagatgccgatcttcacctggacctgcaccttcgccaacatcctgatcgtcgcctcgttcccgatcctcaccgctgcgctgggcctgctgtcgctcgaccgctacctggacatgcacttcttcaccaacgagctcggcggcaacgccatgatgtacatcaacctcttctgggcctggggccatcccgaggtgtacatcctgatcctgccggccttcggtatcttctccgaggtcaccgcgaccttcgccggcaagcgcatgttcggctacaagtcgatggtctgggccagcgccgcgatcaccttcctcggcttcaccgtgtggctgcaccacttcttcaccatgggttcgggcggtgacgtcaacggcttcttcggcgtggccaccatgctgatctcgatccccaccggggtgaagctgttcaactggctgttcaccatctacaagggccgcctgcgcttcagcacgccgatcctgtggaccctgggcttcatggtgaccttcaccatcggcggcatgaccggcgtcctgctggccatcccgggcgcggacttcctgctgcacaacagcctgttcctgatcgcccacttccacaacaccatcatcggcggcgcggtattcggctacctggccggcttcgccttctggttcccgaaagcgttcggcttcaccctcgacgagaagtggggcaagcgctccttctggtgctggctggtgggcttctacatggccttcatgccgctctacatcctcggcttcatgggcatgacccgtcgcctgaaccactacgacaacccgctgtggaagccgtacctggtggtcgcgttcttcggcgccgtgctgatcttctgcggcattgcctgccagttgatccagctgttcgtctcggtccgcaaccgcaagcaactggccgacgtcaatggcgacccgtgggaaggccgcaccctggaatgggccacttcctcgccgccgccgttctacaacttcgccgagctgccgaaggtacaggacgtggatgccttccacgacatgaagaaggccggcaccgcctaccgcaagctgccggcctaccagccgatccacatgccgaagaacaccgccgcgggcttctccatcgccgtgttcgccttcgtcttcggcttcgccgccatctggcatatctggtggctcatggcggtcggcttcgtcggcatgatcggctccttcatcgtgcgcagctacaaccaggacgtcgactactacgtccagcccgaagagatcgagaagatcgaaagcgcccgtttccagcaactcgccaagcaggtctga

SEQ ID NO: 343247 - DNA, 501 bp, Pseudomonas aeruginosa; identical to SEQ ID NO: 323899

SEQ ID NO: 343248 - DNA, 192 bp, Pseudomonas aeruginosa; identical to SEQ ID NO: 331240

SEQ ID NO: 343249 - DNA, 297 bp, Pseudomonas aeruginosa
atgacaagcaagacaaagcgggcgcagtacacgctggaattcaagctggaagcggtacggctggtgaagagcgggcagagcatggcagtggttagcgcgaccctgggcatcagagcgcagacgctgcataactgggtcaaggcggagcgggaaggcaagctgactggtgcgggtatgaagccggtcagcccggagcagatggagctggcccggcttcgggcggaggtggcgcgcttgaagatggagcgcgatattttaaaaaaagccgcagcatactttgcgaaggagtcggtgtga

SEQ ID NO: 343250 - DNA, 639 bp, Pseudomonas aeruginosa
gtgaggtatgcgttcatcgagcgaaaccgacgttactggccggtctcggtcctgtgtgagctgttaggggtcagccccagcggctatcaccagcgcaagcaacgcacagtaagcaccgacaggccagatagaggccgactcagtgacgatgccttgttggcccacatcaaggcgattcacgccggggtcaagggggagtacggctggccgcgcatgtggaaggaactgctggcgcgtggggtgcgggtgggcaaggagcgtgttcgcaagctgatggcgctgcacggcatccgtgcccgccacaagcgcaagtacatcgcgacaaccaactcgaaccacgatttgccggtggcccccaatctgctgcaacgcgactttagcccagcagcacccaatcaagtctggacgagcgacataacctatgtggcgaccgccgaaggctggctctacctggtggtcatcatcgacctgttcagccggcaggtggttggctggtcgatgcaaccacacatgaaggccgaattggtcacggacgcgctgcgcatggcctggttccggcgccgcccggaagccggtgtgattgtgcacaccgaccggggaagccagggcggattcaaccggtcgtcgcaacacctttga

SEQ ID NO: 343251 - DNA, 480 bp, Pseudomonas aeruginosa
gtgcgcctcgctcaagtgtgctgccatgccttcggcacacacctgatcatctgtacctcctatttcgaaagcgcttcattcctattcgtcggctgcgcggcagcgccggaactgactggctacgcctaccaggtgctggaacgacagctgcagaaggcgcgcaaggacttcctgagcacacagaaacgctgcaagcggtccaccaaggtagcccgtggagatgccttcgcgcatggatggatcgaggccgtgtacgccaaggtcgaccagttcgcgggcgtcaacgacaacatcgccgacgcgatccaggcgtacatggcgaagcaccacgctgacgtcggcaagttcgagatgaagcgccgcaagctcaaggttcgtgacgaagtggccagtgaagcgggctatgccgcgggcaaacgggcccaactgcaccagggtattggtcatcgaccggtcgctcggctcactcagggggtgtga

SEQ ID NO: 343252 - DNA, 381 bp, Pseudomonas aeruginosa
atgaatctgtacgaccacaaccagacgatccgtcaaatgatggacgctgccgggcagagcagcgatgaacagttccagattttgcatattgctcttgatgatgaccgtgacctgattttggctctgatcgtgggtgagcaattggatggtcctgccgccattctcgatggcctacatacgctgcatctggagcgccagcaggctcgcaatgagatccgcgagtttccctatggaagcacggtaaagctacgttgggccggggcggagagagttatcggctgggcacatcgtggtgaacagggggagctattgagcgcctatgggcgtcaccctcttgatcctgacgcctggattgtcgtcgaagagcgagaggtgcactga

SEQ ID NO: 343253 - DNA, 171 bp, Pseudomonas aeruginosa
atggaacgctaccactcaacagccggcgatccgcctcggcgcgatgctgacgtaaagcggcaggaggcccaggagctgaatgaactcgttcagcagttcctggccgagaactcgtcgctcaaagcgaaggctgccgcaccgcgcgtggaggtgttccatggcactcgctag

SEQ ID NO: 343254 - DNA, 774 bp, Pseudomonas aeruginosa
gtgatctcgaaacgtaatacgccgcaacgtcgccatgccatcctcgcgctgctttccgagcagggcgaggtcagcgtggacgcactcgccaagcgcttttccacctcggaagtgaccatccgcaaggacctcgccgccatggaaagccacggcctgctgttgcgtcgctacggcggtgcggtgccgatgccgcaggaactgatcggcgaagccgcacagcccgtctcgccctacaagcaggctatcggtcgcgccgccgcggcgcgcatccgcgagcatgcgaggatcatcatcgacagtggcagcaccaccgcggcgatgatccccgagcttgggcacaagccgggcctggtggtgatgaccaactcgctgaacgtggtcaacgccctgcgcgaactggagcacgagccggtgctgctgatgaccggggggacctgggatccgcattccgagtcgttccaggggcaggttgccgagcaggtgctgcgttcctatgacttcgaccaactattcatcggtgccgacggcatcgatctcgaacgcgggacgaccacgttcaacgaattgctgggcctgagccgggtgatggccgaggtcgcccgcgaggtgatcgtcatggccgaggccgacaaggtcggtcggcgcattcccaaccaggaattgccctggagcagcatccataccctgattaccgacgagcgcctggaaccttccgcgcgcgaacagataaccgcccggggcgtcacgctgatctgcaccccggtcgaggcctga

SEQ ID NO: 343255 - DNA, 192 bp, Pseudomonas aeruginosa; identical to SEQ ID NO: 331240

SEQ ID NO: 343256 - DNA, 138 bp, Pseudomonas aeruginosa
atgtatcgccccagcggcgtatccagcctcttcaaggtcaccctggacgagatcaaaccagccatggacaagcgcttcaggagactgctcgccaaacaactctggagggcgccgctctctgatgagatggctccatga

SEQ ID NO: 343257 - DNA, 321 bp, Pseudomonas aeruginosa
atgacaacccctatcagtgatgagcagttggcggagttggaagggtattcgcagcatcccgccttcctcggcgacgaagattcagcaatcaccatgggagaactgcgcggactgatcgcccgcctgcgcgctgctgaggctgatgctaagcggtatcggtggctgcggaatcctgatcaggacgtatctctagtgctcgacaaggtttcaggtgaggttccagcggatgagttcggatgcggagggtatctcgcatacgagtaccgatctggggatgagttggacgcagccatcgacgccgcaatggagcgtacgccatga

SEQ ID NO: 343258 - DNA, 1092 bp, Pseudomonas aeruginosa; identical to SEQ ID NO: 324657

SEQ ID NO: 343259 - DNA, 237 bp, Pseudomonas aeruginosa
atgaagtctggcttcgatttttacttcggcggtcgagttagctcccgccaggaaatgcaacagcgcctgcgcaatctcagaactgagggcagcgttatggatgatctggagaaagttctttcgtccagaactccggttgaacaagtccaggccgctgaggatttcaataaggcgaatcgttctaagttgattagcaacaagaaaggcactctttatttgggggatgtattcgaatga

SEQ ID NO: 343260 - DNA, 531 bp, Pseudomonas aeruginosa
atgaacgttgaagcgtacatccgtggcatggcggcccgtggatttagccgctcggccgccgcagcggcactcgggattcactgggtcaagttcatggacctgctcgaacgcatgccagatatcgagtggggctatccctacaagtcctttgaccgccgcaggcatgccaagaacctgaaggggtaccggttccgggatagcgaaggacgccgacggtcggtggcggccttgcgggttgtcaaccaggcgaggcggcatgagtacaccgtcttcggcgtcaccgacagcttgagcaacctggtgaagcgcttcggttgtgtcgccaaaagcactgtgcagaagcgcttggccaagggcatgtccatcgagcaggcgcttacgacgcctcgctctgaccatctttctggcttgaagcgtaagccagagagtcatccctggaagcgggctgagcggcgcggagtgatcaaccaccgtgaacgccaactcaaggcgaaacgggatcaacgtcaagcgggggctggctatgactga

SEQ ID NO: 343261 - DNA, 384 bp, Pseudomonas aeruginosa
atgtacgtgcaactgaccatccgtgaatcccgcgtcgacgtgcagcgagacgctcaccttgtgcatggcgatatcaacttctcggcggggccagacagggcttggctcaaccaccgtttcgtcgaccagcacgggcggcccgacagtgaagcagccgcgctctggttgatcgacagcccagaggttgccgagctgttgaccagaacactggacgcagtcccccgcctacttgtcggtgagagcgctggatgggaggtcatttgcatcaccgatgggctgctaacgcgccgtgccgatatcagcctcgacaaggctgtcttgctgctccaggctctggcgccgcagaacgtcttggattaccagacgcatatcttcggggcttag

SEQ ID NO: 343262 - DNA, 321 bp, Pseudomonas aeruginosa
atggaagaacaggaaacgggccgggactgggctctggaaggcatcgagggactgatgcaactgcttcaggcgttggtgctggcactgggcaagacggggcagttggatacagcggagtacgcccgtctacttgcggactggcacaaccagcagatagagccggactcgcttcaggacgtgctgtttcagcgaatgcttgggatgctggttgatgaacccgaggtgctgctgcggcgttcaaggtttcaactgatgccggcaccaagccttgctggcgagcccaagcagccaggcgctggccagaagcctgaaaacgattga

SEQ ID NO: 343263 - DNA, 297 bp, Pseudomonas aeruginosa
atgtcatcgccgcaaccccggcgccgccgcgcgccgcgtatgaccagttggacgctggtcaccctcgtccttctgatcatcctcgccgccattcgcccggagcagctccaggtcgtcgcctataagctggtcctagtgacgctgggcgcagtggccggctactggatcgaccgcagcctgtttccgtacgtggcccgcccgcacgaatgctcggccaacctggtggtcgtgggtgcctggctgcgccgcgggctgatcgtgctggcctgtatccttggcctgacgctggggctctga

SEQ ID NO: 343264 - DNA, 726 bp, Pseudomonas aeruginosa; identical to SEQ ID NO: 341003

SEQ ID NO: 343265 - DNA, 237 bp, Pseudomonas aeruginosa
atgcgagtccgtgagtggttcgacgagggcgcggtagacccggcgattggcccgcgcaatggcttccgagcaggcccggtcaatcacgctcagcgccggcaggatgcgccgcttctgccgcagactctccagcgcctggccggccagcagcaaacccttatcggtctgctgggccaactcggtcagctcgcgcaccagggcgcggaagtcggacaggccgaacggggccagttgtag

SEQ ID NO: 343266 - DNA, 246 bp, Pseudomonas aeruginosa
gtgcagatcgaccagctcatcaatcacggtcgccgtactctccagcaccacggcggccagggtcgcgtagcgccgctgcggctcgaacttaccgaggtctttgggcgtcatctgcccaccctcgcgggccagcttgagcaggcggttctggtggatgtgccggcccagagcttcgggcaaatccaccagctgaaatgtcttcagccgctcgatgtgttcgagcatgtgccgggagttcggttttag

SEQ ID NO: 343267 - DNA, 792 bp, Pseudomonas aeruginosa
atgcttgtgcttcgcgccgctgaacagcttgaccaggatgcggtcgtgcagatcgaccaactcatcaatcacagtcgcggtgctctccagcactacggcggccagggtcgcgtagcgccgctgcggctcgaacttgccaaggtctttgggcgtcatctgccccccttcgcgggccagcttgagcaggcggttctggtggatgtgccggcccagcccttcgggcaagtccaccagctgaaatgtcttcagccgctcgatgtgcttaagcatgtgccgagagttgggtttcagcggtgcctggcgcagccaggtcaaccaggtgatgctgctgccggccttgagcttcagcagttcgtccagcttggcacggtgcgagtccgtgagtggttcgaccagggcgcggtagacccgccgattagcccgcgcaatggcctccgagcaggcccgatcaattacgctcagcgccggcaggatgcgccgcttctgccgcaggctctccagagcctggctggccagcagcaagcccttgtcggtctgctgggccaactcggtcagctcgcgcacgaggttgcggaagtcggacaggccaaacggggccagttgcaggtaggtgcgcagttcatgggcgtgctcgcggcgggtcacgtcgcgttcgccgtacttcgcccaactcgccgggtcggcctgaacctgcttggccacccacaggatgaccggctcgggcggctcgctgtcggtgcccaacgcatagccggggtagcgcagcaggctgagctgcaccgcgaagcctag

SEQ ID NO: 343268 - DNA, 1302 bp, Pseudomonas aeruginosa
atgcaggcgttgtacttgcttgcgctcgaaccagtctcggaaacgaccggggatttgaactcttacgggttccgccccgctcgctccacggcagatgcgatcgaacaatgcttcgctttactggcaaagaaagatcgtgctcagtgggtctttgaggcagacatcaaaggctgcttcgacaacatcagtcacgactggctgtccgagaacgtctcgatggactcggcagtgctacggaagtggctgaaagcgggatatctcgaaagcaatgctctttatccaacggaagcgggaacaccgcaaggtggcatcatctcgccaacgctggcaaacctgaccctcgatggtcttgaaccgatgcttcttcggcggtacttgaagaagaactggaacaagcagaaggtcaacatcgttcggtatgcggacgacttcatcatcaccggtgcaacgaaagaagtgctggagaacgaggttcgtccgatggtcgaagaattcctggcagcacgggggctcacgctctcgccagagaagaccaagatcacgcacatcgacgatgggtttgattttctcggcttcaacgtacgcaagtacgacggcaagcttctcatcaagccagccaagaagaacgtctcggcgttccttggaaaagtccgggagttcgtaaagagcaacaaggcactccgccaagacaaactggtgaaggcgctcaacccgatgattcagggctgggcgaactatcatcggcacgtcgtggcacgccgcactttcgagcgcgtcaggatggagatttggcaatgtttgtggcagtgggcaagacggcgccatccgcacaaaggggcatggtgggttcggaagaagtatttccagaccgacggcttccgcggatgggtgttcgcggtgaaaaccggggagttgctcagcaacgggaaaccgaagctgatagcactccgggatatctgcgatacgaagattcgtcggcaccgcaagatcaaggctgatgccaatccgttcgatccgcagtgggaaacctactttgagcagagattcggcttcaagttaaaggactcgctgcaagggcggaagaagctcattcggctttggatggaacagggcggtaggtgcccggtttgcagtcaacccctcaccgaaaccagcggatggcatgtccatcatctagtcaggcgggtagacggcgggccggacatcaacgccaacctggtcatggtgcatccgaactgtcataaccagattcacgtcaatggtctcaaggtggtgaagccggttcgcgaaagcgggctttga

SEQ ID NO: 343269 - DNA, 513 bp, Pseudomonas aeruginosa; identical to SEQ ID NO: 324026

SEQ ID NO: 343270 - DNA, 321 bp, Pseudomonas aeruginosa
atgagcacgacagcgaattggagttacaccaacactgcgacggttcggccattcctgcacttcgacctttcgacccaggaggccgtttacggccccgagtacgagatcgcctgcacctgggtagcgaaaggtgagcaggtccgcgataacaacggcgccgagttcgtgtcgcgccaccagatctacaccgaggaccgccggccgaagtacctggacctgatccagttcgacggatccaacggctgggaagagattcgctcggtgacgaactgggacatgtccttcttcggcgagcagccggactttctactggtgacctga

SEQ ID NO: 343271 - DNA, 402 bp, Pseudomonas aeruginosa
atgatcacagttgaacaggcccggcagtacctgcagagccagggcatcgacaacgtgcccgatttcatccttgcggcgtggatcgagcaattgcagcagatccaggactgcatggatgcccattacccggcatcgaccgcgctgctgattcaggcctacctgctggcgctattcgccttggcccaggccgacaagtacatcagcagccagacggcaccatccggcgcttctcgatcgttccgctaccaggcctttgctgatcgctggaaggcgcagttggccttgctgaacgccctggacaagtacggatgtgcgacggggctgattcccccgaacccaacccagaccgcacacggcggtctttggatcgcgcgcggtggctgcatgtgtggtgactcatga

SEQ ID NO: 343272 - DNA, 339 bp, Pseudomonas aeruginosa
atgctgatcaaactttccgactttgacgacgatttggccgagcgactgaagagccgcacttgccagaacactggctccaaggctgtgctgcgtgctgctgaggagtatttgccgctgctgctgaagctggagtatcgcgaccggcagattgccgagttggaagagcggttgcgagtggcaagccaggtgatcgagggcgctcgctcggctgctgcgctgctgctggaaaagactgctcagggcgatctgctcgccgctccggcatcgagcaagccgcgcatgacaggtgaagagatgttgaacgaactgcgccgcagtgcgggcttgcgtcagcgctga

SEQ ID NO: 343273 - DNA, 339 bp, Pseudomonas aeruginosa; identical to SEQ ID NO: 332086

SEQ ID NO: 343274 - DNA, 630 bp, Pseudomonas aeruginosa
atgaagcgcctgctcaccctcggcctgctgggcctgctgaccgcctgccagccggccttcgcgacggatcgcatccccactgccgccgagcagtaccggcgcaccctggtgcgcagcgcccatgccgaatggggcctgtcggcaccgatcgccacctttgccgcacaggttcaccaggaaagccgttggcgtgctgatgcccgctcgcctgttggtgcccagggtctggcgcagttcatgcccggaaccgcggagtggatcgccggcctgtatccgaccgccctcggcaccaatcagccgttcaatcctggctgggcactgcgagcgctggtcacctacgaccgttggctctacgaccgaaaccaggcctccagcgagtgtgatcgctgggcattcgtactgtccgcttacaacggcggccaggggtgggtaaatcgcgaccgtaggctggcctcgacatccggcgccgaccagctggcctggttcgactccgtcgagcgcttcaacgccgggcgctcggccgccaacttccgcgagaaccgcaactacccgcgcctcatcctgctgcgctacgagcggatctatctgcagtggggcgacggtgtgtgcggagagaggtacaccctgtga

SEQ ID NO: 343275 - DNA, 249 bp, Pseudomonas aeruginosa
atgctgccgaacacgcgaggcgaggtgatcagcaacggcgacgccaccgcgcagggctcgccgcagatcagcctgcagatcatcaacaacggtcctccggtttccgccaccgccaccatggacgggaacaacctgcgggtaactctcgatgcagtcgaacaggactttgccaacaaggtttcgtccggccaggggctttacccgaaagcaatcgaaggcgcatatggattcaagagggcagggcgatga

SEQ ID NO: 343276 - DNA, 375 bp, Pseudomonas aeruginosa; identical to SEQ ID NO: 324754

SEQ ID NO: 343277 - DNA, 291 bp, Pseudomonas aeruginosa
atggcgcagaccatgacaccgatcgacacatcgactctggtcaacagccaaacggccccccagatcactgttggcccaaacggggtcgagggcagcgtcggttacaccgctgcctacgcagcagcagtccacgatgcgccaggcactctcgccggccagccgcgggacgagaacgaccctagccggggggactactgggacccgaatgcggagcctgaatttctcacgaagggctttgaccagatcattccagcaatcccggccatcctccgcaggacctaccgcgtatga

SEQ ID NO: 343278 - DNA, 315 bp, Pseudomonas aeruginosa
gtgcaagaactgacgttcgagatcaacgacctgttcgggcacctgatgcgcatcggcgtggtcccgctgaaggccgagttcacggcaatctgggatgacctcaccgttccaaccaaggccgagcgcctggccaactccaagaccatgagcgagatcaacagcgccgcaatcggctctggcgagccggtattcaccacggaggagatccgcgaagaggctggctacgacccgctcgtgggcggtgacccgctgcctgataccgaaccggaggatgaagatgccgcgcgcaccgatcctaccggcgagcagcagtga

SEQ ID NO: 343279 - DNA, 1245 bp, Pseudomonas aeruginosa; identical to SEQ ID NO: 323352

SEQ ID NO: 343280 - DNA, 2625 bp, Pseudomonas aeruginosa
atgaaaagcgctgaaatccgtgaagccttcctccgcttcttcgaagagaagggacacacccgtgtcgcttccagttcgctgatcccggcgaacgatccgaccctgctgttcaccaacgcgggcatgaaccagttcaaggactgcttcctcggcctggaaaagcgcgcctacacccgtgcgaccaccagccagaaatgcgtgcgcgccggcggcaagcacaacgacctggaaaacgtcggctacaccgcgcggcaccacaccttcttcgaaatgctgggtaacttcagcttcggcgactatttcaagcgcgacgccatccattacgcctgggagttcctcaccggcgagaaatggctgaacctgcccaaggaaaagctctgggtcaccgtctacgccaccgacgacgaggcctacgacatctggaccaaggaagtcggcgtgcccgccgagcgtatggtgcggatcggcgacaacaagggcgcgccctatgcgtccgacaacttctgggcgatgggcgataccggaccctgcggtccctgcaccgagatcttcttcgaccatgggccggagatctggggcggcccgcccggttcgccggaagaggacggcgaccgctacatcgagatctggaacaacgtgttcatgcagttcaaccgcaccgcggacggcgtcatgcacccgctgccggcgccgagcgtggacaccggcatgggcctggagcgcgtgagcgcggtactccagcacgtgcactcgaactatgagatcgacctgttccagaacctgctgaaagcctccgccgaggccatcggctgcgccaacgacgacgcgccgtcgctgaaggtggtagccgaccacatccgttcctgcagcttcctgatcgccgacggcgtactgccgtccaacgagggtcgcggctacgtcttgcggcggatcatccgccgcgcctgccgccacggcaacaagctgggcgccaggggcaccttcttccacaagatcgtcgcagcgctggtcgccgagatgggcgatgccttccccgagctgaagcaacagcaggcacacatcgagcgcgtgctgaagaccgaggaagaacagttcgccaagaccctggagcaaggcctgaagatcctcgaacaggacctcgccgaactgcagggcagcgtgattcccggcaacgtggtgttcaagctgtacgacacctatggcttcccggtcgacctgaccaatgacatcgcccgcgagcgcgagctgaccatcgacgaggacggcttcgagcgcgagatggaggcccagcgcgagcgcgcccgcgcttccagcgccttcggcatggactacaacagcctggtcaaggtcgacggcgagacccgcttcctcggctatcagggcgtctccggcgccgggcagatcgtcgcgctgttcagggacggccaggccgtcgagcgcctggaggagggcgaggagggcgtcgtggtcctcgaccagacgccgttctacgccgagtccggcggccaggtcggcgacagtggctacctcgaggcggctggcgtgcgcttcgacgtgcgcgataccaccaaggctggcggcgcgcacctgcaccatggcgtggtcgcccggggcaacctgagcgtcggcggcgcggtcaaggccgaggtcgacgcctcggtacgccaggccaccgcgctcaaccactccgcgacccacctgctgcatgccgcgctgcgccaggtactgggcgaccacgtacaacagaagggctcgctggtggacagccagcgcctgcgtttcgacttcagccacttcgaggcgatcaaggcggaacaactgaaggccctggaggatatcgtcaacgccgaaatccgtcgcaacaccgaggtcgagaccgaggaaaccgatatcgacaccgccaaggccaagggcgccatggcgctgttcggcgagaagtacggcgaccaggtgcgcgtactgagcatgggcggcgatttctccgtcgagctgtgcggtggcacccacgtatcccgcaccggcgacatcggcctgttcaagatcaccagcgagggtggcgtggctgctggcgtacgccgtatcgaggcggtcaccggcgcggcggcgctggcctacctgaacggtgccgaggagcagctcaaggaagccgccagcctggtcaagggcagccgcgacaacctgctggacaagctcggcgccctgctggagcgcaaccgttcgctggagaaggagctggaacagctcaaggccaaggctgccagcgcggccggcgacgatctttcggcggcggcggtggaaatcaagggcgcgaaggtactcgccgcgcgcctcgatggtctggacggcaaggcgctgctggcgctggtcgaccagttgaagaacaagctcggccgcgcagtgatcctgctcggcggcgagctggacgggaaggtcgtactggtcgcaggcgtgacccaggacctgaccggccaactgaaggccggcgagcttatgaagcaagccgcggcggcagttggtggcaaaggtggcggacgcccggatatggcccagggcggcggcaccgatgcagcgaaattggacgaggccctggccctggcccagcgcttcgtcgagcaagggctctga

SEQ ID NO: 343281 - DNA, 1005 bp, Pseudomonas aeruginosa
gtgcctgtcatcgacctgcgcagcgacaccgtcacccagcccaccgccggcatgcgcgaagccatggccgcggccgaactgggcgacgacgtctatggcgaggaccccacggtcaaccgcctggaggccgaactggcggcgcgcctgggcttcgccgcggcgctcttcgtaccgaccgggaccatgagcaacctgctcggattgatggcccactgcgagcgcggcgacgaatacatcgtcggccagcaggcgcatacctacaaatacgagggcggcggtgccgcggtgctgggctcgatccagccgcagccgatcgacggcgaggccgacggatcgctccacctggacaaggtcgcggcggcgatcaaggccgacgatttccacttcgccaggacccgcctgctggccctggaaaacaccatgcagggcaaggtgctgccgctcgactacctggccgcggcgcgcgccttcactcgcgcgcgtgacctggccctgcacctggatggcgcgcgcctgtacaacgcggcggtgaagctgggcgtagacgccagcgagatcacccgacacttcgactcggtgtcggtgtgcctgtccaagggcctcggtgcgccggtgggctcggtgctttgcggcagcgtcgaactgatcggcaaggcccgccgctggcgcaagatggtcggcggcgggatgcgccaggccggcctgttggcggctgccggactgtacgccctcgaccaccaggtggcacgcctggccgacgaccacgccaacgccgcgcgcctgggcgacgggctgcgcgaactgggctatgcggtggagccggtgcagaccaacatggtctacgtcgatgtcggcgagcgggcggtcgcgctgcgcgacttcctcgccgagcgcggggtgcggatcagcgcggcggcgcgtttgcgcctggtcacccacctggacgtttccgccgagtccataggacaagtactggatgccttcgcggcctttcgtcgctcataa

SEQ ID NO: 343282 - DNA, 999 bp, Pseudomonas aeruginosa
atgctcgccctcggcaaactgctcgacttgaccctggccggccgcgagccgaccgagaagatccagctcaccgccgacggcacccgcctgcactggctggccgagggcgcgctggaagtcacgccgatcggcgcccgcgataacggcgtcgacctgttgctctcggccggtatccacggcaacgagaccgcgcccatcgaactgctcgaacggctgatccgcaaggtcgccgctggcaccctcaagcctgccgccagggtcctcttcctgttcggcaaccccgaagccatccgccgcggcgagcgctacgtcgaacaggacatgaaccgcctgttcaacggtcgccacgaggagggcagtggcaacgaggccttccgtgccgccgagctggagcgcctggcccaggtgttcttcagcaagaccgagcgagtccacctgcactacgacctgcataccgcgatccgcggctcgaagatcgagcagttcgccctctacccctgggccgagggccgccagcattcccgcagcgaactggcccgcctgcgcgacgccggcatcgaggcggtgctgttgcagaacaagccgggcatcaccttcagcgcctacacctacggccagctcggcgccgaggcctttaccctggaactgggcaaggcacgtccgttcggagagaaccaggaggtcaacctggagcgcctggagcggagcctggagctgctgatcgacggcagcgaggaacagccggacggctcccggctcgacggcctcaagctgttcagcgtgtcgcgcgaggtgatcaagcacagcgaccacttccgcctgcacctcgacgacgacgtggccaacttcaccgaactctcgccgggctacctgctggccgaggatatcggcggcacgcgctgggtggtggacgaggtcggcgcgcgcatcatcttccccaatccacgggtgaagaacggcctgcgtgccggaatcctggtggtgccggccaagctctga

SEQ ID NO: 343283 - DNA, 291 bp, Pseudomonas aeruginosa; identical to SEQ ID NO: 318559

SEQ ID NO: 343284 - DNA, 1347 bp, Pseudomonas aeruginosa
atgaatgcccatgaagtgaatttcgacggcctggtcggcccgacccacaactacggcggcctgtcctacggcaatgtcgcttcgcaaagcaacagccaggcggtgtccaacccgaaggaagcggcgaagcagggcctggcgaagatgaaggcgctgatggagatgggtttcaagcagggggtactcgctccgcaagcccgcccggataccgctgcgctgcgtagcctgggcttctccggcagcgacgaggaggtgatccgccgcgcggcgaaggaagcgatgcctctcctcgccgcctgcagctcggcttcgagcatgtggaccgccaatgccgccacggtcagcccgagtgccgacaccgccgatggccgcgtgcatttcaccgcggccaacctgaactgcaagttccaccgatccatcgagcatcccaccaccagccgcgtgctggcggcgatgttcaacgacgagcggcatttcgcccatcacgcggcgctgccggcagtgagccagttcggcgacgaaggcgcggccaaccacacgcgcttctgcaaggactatggcgatgccggcgtggagttcttcgtcttcggtcgcagcgccttcgacagtcgcttcccagcgccgcaacgctatccggcgcgccagaccctggaagcctgccaggccgtcgcgcgtctgcacgggctgagcgaggccggagtggtctacgctcaacagaacccggcggtgatcgaccagggcgtgttccacaacgatgtgatctcggtgggcaatggcgaggtgctgttccatcacgaggacgccttcctcgataccgagaaggtccttgccgaactgcacgacaagctgggccgccgcggcggccgcttccgcgccatctgcgtgccgcgcgaccaggtcgcggtggaggacgcggtgaagtcctacctgttcaacagccaactgctgtcgaaggccgacggttcgatgctgctggtggtaccggaggagtgtcggaacaacccgcgggtctggaactacctggaccagctcaccggcgacgacggtccgatccgcgaagtgaaggtcttcgacctcaagcagagcatgcagaacggcggcggtccggcttgcctgcgcttgcgcgtggcgctgcaggaacgggagctggcggcggtgaatccgggggtgatcatgagcgccggcctgtacgacacgctggtagcctgggtcgaccggcactaccgcgaccgcctgagcgagaccgacctggccgacccccaactgctgctggagtgccggacggcattggatgaactgacgcagatccttaaactgggctcggtttattccttccaactcgattga

SEQ ID NO: 343285 - DNA, 1464 bp, Pseudomonas aeruginosa
atgagtacccattacattgccggccagtggctggcgggccagggcgagaccctggagtccctcgacccggttggccagggcgtggtctggtccgggcgcggcgctgacgccacccaggtcgacgccgccgtgcgcgccgcccgcgaggccttcccggcctgggcgcggcgcccgctggagcagcgcatcgagttgctcgagcgcttcgctgcgaccctcaagtcccgcgccgacgagctggcccgagtgatcggcgaggaaaccggcaagccgctgtgggagtcggccaccgaagtgaccagcatggtcaacaaggtggcgatctcggtgcaggcgttccgcgagcgcactggcgagaaatccggtccgctggccgacgctaccgccgtgctacggcacaagccgcatggcgtggtggcggtattcggtccctacaatttccccggccacctgcccaacgggcatatcgtcccggcgctgctggccggtaactgcgtggtgttcaagcccagcgagctgaccccgaaggtcgccgagctgacgctcaaggcctggatccaggccggcctgccggccggcgtgctcaacctggtccagggcggtcgcgaaaccggcgtcgcgctggccgcccaccgtgggctcgacggtctgttcttcaccgggtccagtcgcaccggcaacctgctgcacagccagtttggcggccagccgcagaaaatcctggcgctggagatgggcggcaacaacccgctggtggtggaggaggtcgccgacctcgacgccgccgtctacaccatcatccagtccgccttcatctccgcaggccagcgttgcacctgcgcccgccgcctgctggtgccgcagggcgcctggggcgacgcactgctggcgcgcctggtggcggtcagcgctaccctgcgggtcggtcgcttcgacgaacagccggcgccgttcatgggcgcggtgatttcgctgagcgccgccgagcacctgctcaaggcccaggagcatttgatcggcaagggcgcacagccgctgctggcgatgacccagccgatcgacggcgccgccctgctgaccccgggcatcctcgacgtcagcgcggtggccgagcgaccggacgaagagttcttcgggccgctgttgcaagtgatccgctactccgatttcgctgcggcgatccgtgaagccaacgccacccagtacggcctggccgccgggttgctgtcggattcccgcgagcgtttcgagcagttcctcgtggaaagccgcgccggcatcgtcaactggaataagcagctcaccggcgccgccagcagcgcgccgttcggcggtatcggcgcgtccggcaaccaccggccgagcgcctactacgccgccgattactgcgcctatccggtcgcctcgctggaaagccccagcgtgtcccttcctgccaccctgactcccgggatcagcctatga

SEQ ID NO: 343286 - DNA, 1023 bp, Pseudomonas aeruginosa
atgatcgtacgtcctgttaccagcgccgacctgccggccctgatcgagctggcgcgcagcaccggcaccggcctgaccaccctgccggccaacgagcagcgcctgcagcatcgcgtcagctgggccgagaaggccttccgcggcgaggccgaacgcggcgacgccgactacctgttcgtcctcgaggacgacgccggcaaggtcgtcggcatctccgccatcgccggagcggtggggcttcgcgaaccctggtacaactaccgggtcggcctcaccgtgagcgcctcgcaggaactcaacatccatcgcgagatccccacgctgttcctggccaacgacctgaccggcaattccgagctgtgctcgctgttcctccacgccgaccaccgcagcggcctcaacggcaagctgctgtcgcgcgcgcgcttcctgttcatcgccgaattccgccacctgttcggcgacaagctgatcgccgagatgcgcggcatgtccgacgaggaggggcgttcgccattctgggaaagcctcggccggcacttcttcaagatggaattctcccaggccgactacctcaccggggtcggcaacaaggccttcatcgccgagctgatgccgaagttcccgctctatacctgcttcctctccgaggaggcgcgcggggtgatcggccgcgtccatccgaacaccgagccggcgctggccatgctcaaggccgagggcttcagctaccagggctacgtcgacatcttcgacgccggcccggcgatcgaggccgagaccgacaagatccgcgccatcgccgagagccagaacctggtgctggcggtgggcactcccggcgacgacgccgagccctacctgatccacaaccgcaagcgcgaagactgtcgcatcaccgccgcgccggcgcgggccgccgccggcaccctggtggtcgatccgctgactgccaagcgcctgcgcctgtcggccggcgcctcggtacgcgcggtgccgctgtcggcgcagaagcgcggttga

SEQ ID NO: 343287 - DNA, 1017 bp, Pseudomonas aeruginosa
atgttggtgatgcgccccgcccaagcggccgacctgccacaggtgcagcgtctggcggcggacagcccggtaggcgtcacgtccttgccggatgacgccgaacgcctgcgcgacaagatcctcgcttccgaggcctcgttcgccgcggaggtgagctacaacggcgaggaaagctatttcttcgtcctcgaggacagcgccagcggcgagctggtcggctgctcggcgatcgtcgcctcggccgggttctcggaaccgttctacagcttccgcaatgaaaccttcgtgcacgcctcgcgctcgctgtcgatccacaacaagatccatgtcctctcgctgtgccacgaccttaccggcaacagcctgctgaccagtttctacgtacagcgcgacctggtgcagagcgtccatgccgaactcaactcgcgcggtcgcctgctgttcatggccagccatccggagcgcttcgccgacgcggtggtggtggagatcgtcggctacagcgatgagcagggcgaatcgccgttctggaacgcggtcgggcgcaacttcttcgacctgaactacatcgaggcggaaaagctctccgggctgaagagccgcaccttcctcgccgaactgatgccgcactatccgatctatgtgccactgttgccggatgccgcccaggagtccatgggccaggtccacccgcgagcgcagatcaccttcgatatcctgatgcgcgaaggcttcgagaccgacaactacatcgacatcttcgatggcggcccgaccctgcacgcgcgtacctcggggattcgctcgatcgcccagagccgggtggttccggtgaagatcggcgaggcgccgaagagcgggcgtccatacctggtcaccaacggccagttgcaggacttccgcgcggtcgtgctggacctggactgggcgcccggcaagccggtggccctgagtgttgaagccgccgaggccctgggcgtcggcgaaggcgccagcgtgcgcctggtagcggtctga

SEQ ID NO: 343288 - DNA, 1221 bp, Pseudomonas aeruginosa; identical to SEQ ID NO: 318564

SEQ ID NO: 343289 - DNA, 261 bp, Pseudomonas aeruginosa
atgcccatcgagggaatcgactaccgtctcgtcttcgcctccgacgtcaatccgcgcgacggcctcggcctggagtgctggcgcggcgaacagccgctgttcgaggtctttcgcgacgacgtcggccggcgtttcgtggtcaacctgttcgccagcgacgttccgctggaactgctggaggcgatcattccgacggcccgtcgcgaactcggcgacttcccgaggcgatccgcctcccggggcgtcgcaaagcccggctga

SEQ ID NO: 343290 - DNA, 990 bp, Pseudomonas aeruginosa
atgactgcccaaccccaacgcatcggtttcctcctctggcccgccacccgcgcgctgacgctatcgcttgccgaggaagccctgcgggcggcccggcggttgcaccccgaggcgctctacgagccgctgttcctgctcgccgaagcgccggccgaagaggagggctggcgcctgccgggaacggcctggaacggcaggctggagcaatgctcgcggctgttcctggtcgccgacgaggcgccggcggcggtgtcgccagcgctgggcctggcgctcaagcaactggcgcgttcgggagcggcgatcggcgcgctgtccgccggcatctacccgctggcccagctcggcctgctcgacggctatcgcgccgcggtgcactggcgttggcacgatgacttcaccgagcgcttccccaaggtcatcgccaccaatcacctgttcgagtgggatcgcgaccgcatgaccgcctgcggcggcatggcggtactcgacctgctgctggcgctgctgtcccgcgaccatggcgctgaactggccggcgcggtctcggaggagctggtggtggagcgcattcgcgaaggcaacgagcgccagcgcatcccgctgaagaatcgcctcggctccagccatccgaagctgacccaggcggtactgctgatggaagccaatatcgaggagccactgaccaccgacgagatcgcccagcatgtgtgtgtttcgcggcgccagttggaacggatcttcaagcaatacctgaaccgcgtacccagccagtactacctggagctgcgcctgaaccgcgcgcggcagatgctgatgcagaccagcaagtcgatcatccagatcggcctgtcctgcggtttctcttccgggccgcatttctccagcgcctaccgcaacttcttcggcgtcactccgcgcgaggaccgcaaccagcggcgcggcggcagcgccttcgagacgaccttcactcccgtcgaacgcggctga

SEQ ID NO: 343291 - DNA, 765 bp, Pseudomonas aeruginosa; identical to SEQ ID NO: 324184

SEQ ID NO: 343292 - DNA, 360 bp, Pseudomonas aeruginosa; identical to SEQ ID NO: 324725

SEQ ID NO: 343293 - DNA, 339 bp, Pseudomonas aeruginosa; identical to SEQ ID NO: 332086

SEQ ID NO: 343294 - DNA, 204 bp, Pseudomonas aeruginosa
gtgccggtgaagaaactgtgtcgccgacacggcttcagtgatgcctcgttctacacctggcgggcgaagtttggcggtatgaccgtggcggacgccaaacggttgaaggatattgaactggaaaacagccgattgaagaagtggctcgccgaggcccacctcgacatcgagtcgctgaaagtggtcgcccggggaaaagggtaa

SEQ ID NO: 343295 - DNA, 1041 bp, Pseudomonas aeruginosa
atggaacttctcgtactaccgaacaatcgccgcttgccttttgattccggtgccaaccttttggaagtgctccgtgagcaccgtgtgggtatttcctacagctgtatgtctggacgatgcggtacttgccgctgccgagttatagatggcagcgtcattagttcggcggcgaaaagcggtgactcaaatcgcatcgaagagcattatgtactcgcctgtcagtcagtgctcaccagcaattgcgcaattgagatcatagactcagacgacatagtcactcacccggcgcgaatcatcaaaggcatggttgtcgccgtcgagtcgcccactcacgatattcgccgcatccgcattcgcctcgccaagcccttcgagttctcacccggacagtacgcgatgctacagttcagtcccgaacatgtgcgtccatattcaatggctggtctgccagatgaccaagaaatggagttccatatccgcaaagtgccgggcgggcgtgtcacggagtatattttcgagcacgtccgcgaaggtacaagcattaagttgagtgggcctcttggtacggcctatctgcgtcaggctcacaccgggccgatgctgtgtgtgggcggcgggaccggactcgcaccggtgctgtcgattgttcgcggcgcgctgaagtcgggaatgacgaaccccatccacctttatttcggggtgcgcagtcagcaagacctttacgacgcagaccgattgaaccaactcgcggctatccaccctcaactgactgtccatacagtgatcgcgacgggcccgattaatgagggccagcgggccggcctaattaccgatttgattgaaaaagacattccctcgctggctgggtggagagcctacctgtgcggcgcaccagcgatggttgacgctctatgcaccgtcgccaaagatcttggaatatcgcccgagcatatttatgccgacgccttctatcccagcggggtcttaattgccccgaccctgcacctctgtacatcgagaattcatcaggaagacacttaa

SEQ ID NO: 343296 - DNA, 1350 bp, Pseudomonas aeruginosa
atgaattacaaaaataaaaacttggtgagtgaatctgggctgacccaaaaacacctgattcatggcgacgaagaacttttccagcgcgaactggaaaccatttttgctcggaactggcttttcctgactcatgacagcctgattccgtcccctggcgactatgttacggcaaaaatgggggttgatgaggttatcgtctccaggcagaacgacggttcgattcgtgctttcctgaacgtttgtcgtcaccgtggcaagacgctggtacacgcagaagcaggtaatgctaaaggtttcgtttgcagctatcacggctggggcttcggcgctaacggtgaactgcagagcgtcccgtttgaaaaagaactgtatggcgaggcgctcgacaagaaatgtatgggattgaaagaagtcgctcgtgtagagagcttccatggcttcatctatggttgcttcgatgaggaagccccttctctcaaagactacatgggggacgctggctggtacctggagcctatgtttaagcattccggagggctagaactgatcggtcctccaggaaaggtcataatcaaggctaactggaaagcgcccgcggaaaactttgcgggggatgcgtaccacgtgggttggacgcatgcgtcttcgcttcgctcagggcagtcggtcttctcgtcgttagctggcaacgcagctttgcccccagaaggtgcaggtctgcaaatgacctccaaatacggcagcggcatgggtgtgttgtgggacggatattcaggcgtgcacagcgcagacctggttccggaattgatggccttcggcggtgctaagcaggaacggctgaacaaagaaattggcgaggttcgcgcacgaatctatcgtagccacctcaacggcaccgttttcccgaacaacagttttctgacctgctcgggtgtcttcaaggtatggcacccgatcgacgcaaataccactgaggtatggacctacgccatggtcgaaaaagacatgcccgaggatctcaagcgccgcttggtcgacgcggttcagagaacgtttgggcctgctggcttctgggaaagcgacgacaacgacaatatggaaacggaatcgcaaaacgccaagaaatatcagtccagagatggcgatctggtttccaacctgggtttcggcggggacgtatacggcgacgaggtttatcctggcatcgtcggcaaatcggcgattggcgagaccagttatcgtggcttctatcgggcttacggcgcgcacatcagcagctctagctgggctgaattcgaggatgcctctaaaaattggcataccgaactgacaaagactactgatcgctaa

SEQ ID NO: 343297 - DNA, 579 bp, Pseudomonas aeruginosa
atgattaatattcaagaagacaagcttgtctccgcccacgatgccgaagagtttcttcgtttcttaaattccggcgacgaggctttgcaacaagaagctaccacgttgctaacccgggaagcgcatcttttagacattcaggcttaccgcgcctggttagagcactgcgtggactcagaggtgaaatatcagattatctcacgcgaactgcgctcagcttccgagcgccgttaccagctcaatgaaaccatgaacattttcaacgagaattatgaacaactggaagttcgcgtagcgcatcaactggatccgcaaaactggggcaatagtccaaaggtgcgctttactcgtttcatcacaaatatccaggctgcaatggacgaaaatgaagatttgcttcacattcgctccaacctaattgttcaccgagcacgacgcggcaatcaagtcgatgtcttctatgccactcgggaggataaatggaagcgcggcgaagatggagcgcgtaagttggtccaacgattgattgattatccagagcgcacattccagacgcacaatgtgatgatctttatgtga

SEQ ID NO: 343298 - DNA, 780 bp, Pseudomonas aeruginosa
atgagcaatcaacaagtcgtttcgataaccggtgctggctcaggaattggtctcgcactggttcgatcctttaagtccgccggttattgcgtatccgctctcgtacaaaacgaggagcaaaaggcgagcctttgcaatgagttcaaggacgcactcgagatcgtcgtgggcgatgtccgggaccacgcaacaaatgagaagctgataaagcaaacaaccgatagattcggccatctcgattgtttcattgcaaatgccggtatttgggattacatgcttggcatcgaagagccttgggagaaaatatcgagcagttttgatgagatattcaacatcaatgtcaagagctatttcagcggtatcagggccgccctgcaggaactgaaaaagactagcggatcagtggtgatgaccgcttcagtgtcgtcccatgcggtcggtgctggtggttcttgctacatcgccagcaagcatgcggtcctgggcatgatgaaagctttggcttacgaattggctccccacattcgcgtcaacgccgtagcaccgggcggcactgtgacgactctgagcggtcccgcaagcgccggcttcgacaaaactcacatggaaaacatgcccggtatcgaggacatgatcaagggtctaacgcctcttggatttgcagccaaggccgaagacgtagtggcaccctatttgttgttggcgtcgcgagatcaagggaaattcattaccgggactgtcattaatatagatggagggatggcgctcggtcgcaagtag

SEQ ID NO: 343299 - DNA, 1230 bp, Pseudomonas aeruginosa
atggaaagtaaaacacccgagtttatcgaagtgatggccaaggaggtgggagcctccgctctttgggccggcttcaatgtccagatgtcagccaatgtgttccgtgaagcggcatcgctggctacacaaattcagggggaaactattccgacagacaagtctgacacgctctcaatgacgctacgtcagccggtcggtccgatcctgagcatcgtgccgtggaacggcaccgcagtgctggcggcacgagccatcgcttatccgctggtctgcggcaacgcggtggtattcaaaggttctgagtttagtcccgcgacgcatgccctgatcacccagtgcgtgcaggaagccgggctgcctgctggcgtgctcaactatctcaactcttcgcctgaccgttcgcccgagatcgccgacgcactgatctcagccaaggagatccgacgcatcaacttcacgggctccacccgcgtgggcagtattatcgcgcagaaggccgcgcaacacctcaagcgctgcctgctggagctcggtggcaagtccccacttattgttctggatgacgcggacatcgacgcagctgtcaaggcagcggtgttcggtagcttcctgttccaaggtcagatctgcatgtccactgagcgcttggtggttgatgagaagatcgccgacgaatttgtcgccaagtttgccgaaaaggccaagcgtttgagcgcgggcgacccatgcgtaactggcgactgcatcatcggcccaatggtctcgccaaattcaggcgagcggatcaatggtttgttcaaggacgcgatcgacaaaggagccacagttgcctgcggcggcatggcccaaggtgcggtcatgccggccacgatcctggatcacgtcaaatccaacatgcggatctacgatgaggagaccttcggtcccatcactgtggtgatccgttgcaacggcgaagcagaggccattcgcattgccaacgacagcgcctatggcctgtcgtcgggcgtatttggccgcgacatcaaccgtgctttgcgcgtgggcatgtccatcgaatatggttcagtgcacattaacggatcgactgtccaaagcgaggcgcaggctccatacggagggactaagaaaaccggctacgggcgcttcgacggccgtgctgtgatcgatgagttcacagagctcaagtggctgaccatcgagcctttcgagcagcagtatcccttctaa

SEQ ID NO: 343300 - DNA, 909 bp, Pseudomonas aeruginosa
atgagtaagcaaactgcagttattgaactcggatacatgggcatctcggtcaaggatcctgatgcgtggaaatcattcgccacgaatatgctgggcctgcaagtttttgatgaaggtgagaaggaccgtttctatctacgtatggattactggcatcatcgaatcgtggtccatcataacggccaggacgacctggaatacctgggctggcgtgtgtccggaaaaccggagttcgaggctctcggtcaaaaactcattgacgccggttacgatgttcgcgtctgcgataaagccgaggctcaggaacgaatggtgttgggcctgatgaagacagtagatccaggcggcaacccgaccgagatattctgggggccgcggatcgacatgagcaacccgttccatcccggccgccccctgcacggcaagtttgtgactggtgaccaaggcctgggtcattgcatcgttcgccagaccgatgtcgaagctgctcacaagttctatagtcttctgggattgcgtggggacgtcgaataccggatcccgctgcccaacggcatgactggcgaactaacgttcatgcattgcaatggtcgggaccactccattgggtttggtgccatgcccgctgaaaagaggctcaatcatgtgatgcttgagtacaccgacatagaggatctgggatacacccatcaacagtttgtaaagaacgacattgacattgccttgcaacttggcattcatgctaacgacaaggcgctgacgttctatggcgcaacaccttccggctggctcattgagcccggctggcgaggtgccaaggccatagacgaagcggagtactacgttggagacatctttggccatggtatcgagaccactggctacggcatggatgtaaaattgagttaa

SEQ ID NO: 343301 - DNA, 1005 bp, Pseudomonas aeruginosa
atgtcgaataaaactatgaaaccagcgcgtcttactgccgaggatatccatggtgtctgggctattatgccaacgccggctactccggatgcttctaactggcgcagcactaacacagttgacttaaacgagacttctcgcatagttgaagagctgattgcggctggtgtcaacggaattttaagtatgggcacttttggcgagtgcgctacgttgacctgggaggaaaaacgtgactatgtttcgacgattgtcgaaaccattcgtggtcgcgtgccttatttctgcggcaccacggccttgaatacccgcgaagtcatccgccaaactcgtgagtttatggatatgggcgccagcggtaccatgctcggtgtcccaatgtgggtgaagatggacctgcccacagcggtccagttctatcgtgatgttgcagaggcggtaccggaggctgccattgcgatttacgctaaccctgaagccttcaagttcgacttccctcgccccttctgggcagaaatgtccaaaattccgcaggtagtaactgccaaatatctaggcatcggaatgcttgacttggacctgaaattggcacccaacatccgcttccttccacacgaggatgactattacgcggccgcacgcatcaatcctgagcgcatgaccgcgttctggtcaagcggctccatgtgcggcccggctaccgccatcatgttgcgtgatgcagtggatcaggccaagagcagcggtgactggatcaaggccaaagccatctccgatgacatgcgcgcagccgattcgacattgtttccgcgtggcgacttttcggagttctcgaaatacaacatcggacttgaaaaagcacgcatggatgcagctggctggctcacagctggaccatgccgtccgccctataacatcgtcccagaagactatattgctggcgcccttaagtcaggcaaagcttgggccgcactgcatgctaaatacagcaaggaattgaagtag

SEQ ID NO: 343302 - DNA, 669 bp, Pseudomonas aeruginosa
gtgattgttgatttctatttcgactttttgagccctttttcttacttggctaaccatcgcttgtcgaagctagcccacgattatagcttttccattcgctatcactcgattgatttggcgcgagccaaaatcgccatcggaaacgtaggcccctccaatcgcgatctgaaagtcaaacttgcctatttgatggtggatttaaaacgctgggccgagctgtacggattaccgtttttatttcctgccaattacaatagccaacggatgaatgctgggctctattactcgggtgccgaaacgcagactgctgcttacgtgaatacagtattcaatgcagtttggggggaaggtatagctctggactcggaaagcctgcttgccctagtgtgcgggactctagggtgggatcgcgctgctttcgaggagtttctcagcagcgacgctgcaacaaatgcgtatgatgagcatacccaggccgccatcgaacgtaaagtattcggtgtaccaacgatgtttttgggcgatcaaatgtggtggggcaacgaccgtctatttatgctcgagaacacactgaggtgcggctgtagtgctggaatagccgccgcgggggaaaccggagtaaaaccggtaacagaaggagatggaaatcaaagcggcaatagtccgtaa

SEQ ID NO: 343303 - DNA, 1401 bp, Pseudomonas aeruginosa
atgattaaaaaaacaaatttactcaataaaacaattattgctgcgatcttgggtattgcgtcaagccatgcggtagcgacggatggtgtgattttggagggctttggcgcggtttccagaagcatgggcggtacggctgttgctcattatgtcgggcccgcgtcaatgatggtcaacccagcgacaatggacttgtctgatgcgacaggtgaaatactgctagggctagatctgattaccacagatatcagcgccaccaatcttggtacaggcgagaaagcgtcatcaagtcggcattctaataatagaggcccctatgttgcccctcagcttgcttttatccgtaaagtttctaactggacctttggcgcgggcatattcgcacaagcggggataggggtcgagtatgggaaggacagttttttgtcccgcggcgatattggcggaatgggctatgccgccgatgctgataccggccttgagaacgccagtcgcttgtttatacttgacataccttttgccgtgagttttaagattaacgatcgtcttgttatcggtggatcgctagatgcaaaatggagtggtttgaatctcgattatttgctgggaacgaaccagttgggtagtctcgccggtgatgggcgtgtgtccggttcgctgttgggcttgatcggcactttacccgacccgcggggtgtgcatttgagcgttagccaaaacaaggaacttgcgagtggtgtcgatggttggggatactcgggtaggttaggtttgctatataagattacgccaacgaccaagttgggtatctcctacatgctcaaaagccatatgaacgacttgaaagggaaggggactgttaccgcggtagatggcctcatcggtaatgtgcctatcgagggcgaggttcgtgttttagactttaatacccctgccaaacttgacgtgggtctgagccaccaagttacggacaaattactcgttgctgttgatgtgtctcgcgttttttggaaggatgcctggaaggatataaaggtagggttttctagtgatgttggtgatgtcgacttaagacttcctcaaaatgccaaggatcaaacaatagtggcgattggggcttcgtatgcagctaccccgaatttaacagtgcgagcaggttaccgtcaggcgacgcagccctttaatgatgagggattgttggcgctagttccgggtattttgcggaaacacgcttccttgggattcagctaccaagtatcaaaatcgggtaggttcgatgctgcgtattcgcatgccttcgagcaaagtatgaccaatcgatcggcttacaacacctcgtcgcccgtgagatcgtccatgtcgcaagataatttcgtcttagcctataattattcattctga

SEQ ID NO: 343304 - DNA, 288 bp, Pseudomonas aeruginosa
gtgggtttatggagcgcttacgtcgcggcacgccgcagcacttacaagaagcttggcaagagcagcccgctctacaaagccaagcgcaaggtcgagaaggccaaggcgcaggtgcgggcgaaggtcgagcacccgtttcgggtgatcaagcgccagtttggttacaccaaagttcgctttcgagggctggtgaagaacacggcgcagttggtgacgctgttcgccctgtcgaacctgtggatggcgcgccgacatttactggcgaatacaggagaggtgcgcctgtaa

SEQ ID NO: 343305 - DNA, 360 bp, Pseudomonas aeruginosa
atgatgcgtcccgacgccaaggtgcagaaggtctatctctatcccaagcctgtcgactttcgtaaatccatcaacggcctggcggcactcgtcgagttggatataaaggtggaagtgttcaacccggtactgttcgtgttcctcaatcgcagccgcaaccaggtgaagatcctctattgggagcgtaatggtttctgcctgtggctcaaacgcctagaggccgagcgcttcaagaccaagcccgatgccggcgatgagcccatcgagctgacggtcgacgaattgaactggctgctcgacggcatcgacctctggcgaaaccgccctcatcaagtcctgacgccgcgttacgtggcctga

SEQ ID NO: 343306 - DNA, 903 bp, Pseudomonas aeruginosa
atggaactgcatgacctggatttaaacctgctggtagtattcaaccagttgatggtcgacaagcgtgtctctatcgtcgcgcaaagcctaggcctaacccaacctgccgtaagcaacgccctgaagcgcctgcgcaccgcactgcaggacgaactattcgtgcgtacccaccaaggcatggagcctacgccctatgctgcacatttagctgagcctatcgcccatgccatgcacagtctgcgcgaagcgctacatcacgaagagcgtttcgatcctttaaccagcgagcgtaccttcaccttggccatgaccgacattggtgagatatatttcatgccgcggttaatagatgcgctcactcgtaaggccccccattgcacaatcagcacggtacgcggcagctcggtgagtttgggacagtcgttactagacggtacagtagatttggccgtaggcctgctacccaacctacaggccggcttcttacagcgtcggcttctccataaccgctacgtgtgcttgtgccgtaagaaccacccggccaccagagagccactgaccttggagcgcttctgtgcctacagccatatacgtgtcatcgccgccagcactggccacggcgaagtagattcccatatggcgcgagctggcatccggcgggacattcgcctagaggttccgcacttcgtcgccgtcggccatatcctccagcatacggagctactcgccaccgtacctgagcgcttcgctgactgctgtgtagagcccttcggtttgagcgtgctgccaatccccatcgacctaccagaaatccccattaacatgttctggcacgcaaaatatcacaaggacctagccaacatctggttgcgacaactgatgttcgagctgttttcggattga

SEQ ID NO: 343307 - DNA, 726 bp, Pseudomonas aeruginosa
atggtagatagcctgcaactgcgcgaagcctttagaataaagggcattgacgagcacttggtggatgtcccgcagatgtacttagggctcgatggccatattcttaccttcccggtgagaaaaggccgcattgtcaacgtggtagcgttcacctccgaccgtagccagccggaaccgacttggcccgcggacgctccctgggtacgggaagcgagccagcgcgagatgctcgatgcgttcgcgggctggggcgatgccccgcgcgccttactggggtgcatcccggcgccaactctctgggcactgcatgacctgccggaactgccaggctacgtacacggtcgggttgccctgatcggcgacgcagcgcacgccatgctgccgcaccaaggggccggtgcagggcaagggcttgaggacgcctatttcctcgcccggctgttgggcgatagtcggaccgaaacaggcaacctccccgagctgcttggagcttacgacgacctgcgccgccctcatgcctgtcgtgtgcaacgaaccactgtggaaaccggcgagttatacgagttgcgcgaccccattgtaggtgcggacgaacagctggtgggggaaatactggcgactcgtttcgactggctatggaaccatgatctcgatgccgatgtggctgaggcccgactgcgcatgggctgggaggcgcatgagcaaattgcgctgcgtcaagggtaa

SEQ ID NO: 343308 - DNA, 339 bp, Pseudomonas aeruginosa
atgccaacggtctttgaaatcactgtacggcctgatggggagagcttcgtctgccagccgcagcagtcagtgcttcgtgctatggaggcccagaacaagcactgcctaccagttggctgtcgcggcggcgggtgcggcctgtgtaaggtgcgggtgctgaccggtgattacgaatgcgggcgtatgagctgcaagcacgtaccggtagaggcccgcgaacaaggctacgccctggcctgccgactgtttgcccgtagcgatctatgtatcgagcgttattcaaagccgtgctatgaaaatacggtcgacccacaacaaagagaaaaggtgacgtcatga

SEQ ID NO: 343309 - DNA, 924 bp, Pseudomonas aeruginosa
atgaacaaaggtataatgcgccccggccatgtgcagctgcgtgtactggacatgagcaaggccctggaacactacgtcgagttgctgggcctgatcgagatggaccgtgacgatcagggccgtgtctatctcaaggcttggaccgaagttgacaaattctccgtggtgctacgcgaagccgacgaacctggtatggattttatgggtttcaaggttgtggatgaggatgctctccggcaactggagcgggatctgacggcatatggctgtgccgttgagcagctacccgcaggtgagctgaacagttgtggccggcgcgtgcgcttccaggcaccctccgggcatcacttcgagttgtatgcagacaaggaatatactggaaagtggggtgtgaatgaggtcaatcccgaggcatggccgcgcgatctgaaaggcatggcggctgtgcgtttcgatcattgcctactgtatggcgacgaattgccggcgacctatgacctgttcaccaaggtgctcggcttctatctggccgaacaggtgctggacgaaaatggcacgcgcgtcgcccagttcctcagtctgtcgaccaaggcccacgacgtggccttcattcaccatccggaaaaaggccgcctccatcatgtgtccttccacctcgaaacctgggaagacgtgcttcgcgccgccgacctgatctccatgaccgacacctctatcgacatcggcccgacccgtcatggcctgacccacggcaagaccatctacttcttcgacccgtccggtaaccgcagcgaggtgttctgcggcggcaactacagctatccggatcacaagccggtgacctggctggctaaggacctgggcaaggcgatcttctatcacgaccgtgtgctcaacgaacgattcatgaccgtgctgacctga

SEQ ID NO: 343310 - DNA, 1461 bp, Pseudomonas aeruginosa
atgaaagagatcaagcatttcattaacggtgccttcgtcgattcggccagcggccgcaccttcgaggacatcaacccggtcaatggccaggtgatcggccgcgtgcacgaggccggccgcgccgaggtcgacgccgcggtcagggcggcacgcgctgcgctgaagggaccatgggggaagatgacggtggccgagcgcgctgagattctgcatcgcgtggccgatggcgtcacggcgcgcttcgatgagtttctcgaggccgaatgcctggacaccggcaagcccaaatccctggccagccacatcgacattccgcgcggcgcggccaatttcaaggtgttcgccgacctgatcaagaacgtgccgaccgaagccttcgagatggccaccccggacggcgccggtgcactcaactacggcgtgcgccggcccaagggggtgatcggcgtgatcagcccgtggaacctgccgctgctgctgatgacctggaaagtcggcccggccctggcctgcggcaactgcgtggtggtcaaaccatccgaggaaaccccgctgaccgccaccctgctcggcgaggtgatgcaggccgccggtgtgccggccggcgtgtacaacgtggtgcacggtttcggcggcgattcggccggggccttcctcaccgagcacccggacgtcgacgcctacaccttcaccggcgagaccggcaccggcgaaaccatcatgcgcgccgcggccaagggcgtgcgccaggtgtcgctggagctgggcggcaagaacgccggcatcgtcttcgccgactgtgacctggacaaggccatcgagggcaccctgcgctcggccttcgccaactgcggccaagtctgcctgggcaccgagcgggtgtatgtcgagcggccgatcttcgacgcgttcgtcgcccgcctgaaggccggcgccgaagcgttgaagatcggcgaaccgaacgatccagaggccaatttcggcccgctgatcagccacaagcaccgtgaaaaagtcctcagttactaccagcaggcagtcgacgacggcgccaccgttgtcaccggcggcggcgtgccggagatgccggcgcacctggccggcggcgcctgggtgcagccgaccatctggaccggcctgaccgacgattcggcggtggtcaccgaggaaatcttcggcccctgctgccatatccgcccgttcgacagcgaggaggaagccattgaactggccaacagcctgccttacggcctggcctcggcgatctggaccgagaacgcttcgcgcgcccaccgcgtcgccgggcagatcgaggccggcatcgtctgggtcaacagctggttcctgcgcgacctgcgcaccgccttcggcggcagcaagcagtcgggcatcgggcgcgaagggggtgtgcactcgctggaattctacaccgagctgaaaaacatctgtgtgaaactctga

SEQ ID NO: 343311 - DNA, 849 bp, Pseudomonas aeruginosa
atgaacgcaccgcagcaaagccctgaaatcggtcgcgaaatcctcgccgctggctaccgcaccaacctgcatgatcagggcgaaggcttcccggttctgctgatccacggctccgggccgggcgtcaccgcctgggccaactggcgcgggatcattccgcagctggcgcagacgcgccgggtggtcgctccggacatgctcggcttcggctacagcgaacgtccggccgatggacaatacagccaggcgcgctgggtcgagcatgccatcggcgtgctcgacgccctcggcatccagcaggccgacatcgtcggcaactcgttcggcggcgggctggcgctggcactggccatccgtcaccccgagcgcgtgcgccggctggtgctgatgggcagcgtcggcgtggcctttccgatcaccgaggggctggaaatggcgtggggctacacgccgtcgctggccaacatgcgcaggctgctcgatctgttcgcccacgaccgcaccctggtcaacgacgagctggccgagctgcgctaccaggccagcatccgcccgggcttccaggagtcgttcgccgcgatgttcccgccgccacggcagaacggagtcgacgatctggccagcaacgaggccgatatccgcgccctgccccacgaaaccctggtcatccatggccgcgaggatcggatcatcccgctgcaggcttcgctgaccctcgcgcagtggattcccaacgcccaactccacgtctttggccattgcggccactggacccagatcgaacacgccgagcgtttcgcccgcctggtcgagaatttcctcgccgaggccgacgccctccattcctga

SEQ ID NO: 343312 - DNA, 786 bp, Pseudomonas aeruginosa
atggacaagacattgatcaacgaactcggcgacgagctctaccaggcgatggtccagcgcgagaccgtgtcgccgctgaccagccgcggcttcgacatcacggtcgaggacgcctaccacatctccctgcgcatgctcgaacgccgcctggcggccggcgagcgggtgatcggcaagaagatcggcgtcaccagcaaggccgtgcagaacatgctcagcgtgcaccagccggacttcggctacctcaccgatgccatggtctacaacagcggcgaggcaatgccgatcagcgagcggctgatccagccacgcgccgagggcgagatcgccttcatcctcaagaaggatttgatggggccgggcgtgaccaacgccgacgtgctggctgccaccgaatgcgtgatcccctgcttcgaagtggtcgattcgcgcatccaggactggaagatcaagatccaggacaccgtcgcggacaacgcctcctgcgggctgttcgtgctgggggaccaggccgtctcaccgcgccaggtcgatctggtcacctgcggcatgctggttgagaagaacggccagctgctctccaccggcgctggagcggctgcgctcggctcgccggtcaactgcgtggcctggctggccaacaccctcggccacttcggcattggcctcaaggccggcgaagtgatcctgtccggctcgctggttccgctggaaccggtcaaggccggtgatttcatgcgcgtcgagatcggcggcatcggcagcgcctccgtgcgcttcatctga

SEQ ID NO: 343313 - DNA, 924 bp, Pseudomonas aeruginosa
atgagcaagaaactgaaagccgccattatcggcccgggcaacatcggcacagatctggtgatgaagatgctgcgttccgagtggatcgagccggtctggatggtcggcatcgaccccgagtccgatggcctcaagcgcgcccgcgagttcggcctgaagaccaccgccgagggcgtcgacggcctgctgccgcacgtgctcgaggacgatatccgcatcgccttcgatgccacctccgcctatgtacacgccgagaacagccgcaagctcaacgagctgggcgtgctgatggtcgacctgaccccggccgccatcggcccgtactgcgtgccgccggtgaacctcaagcagcatgtcggcacgctggaaatgaacgtcaacatggtcacctgtggtggccaggccaccatcccgatggtcgccgcggtatcgcgcgtgcagccggtggcctacggcgagatcgtcgccaccgtgtcctcgcgctccatcggcccgggcacccgcaagaacatcgacgagttcacccgcaccaccgccggcgccatcgagcaggtcggcggggccaaggaaggcaaggcgatcatcgtcgtcaacccggccgagccgccgctgatgatgcgcgacaccatccactgcctgaccgaaaccgaaccggaccaggatgcgatcaccgcatcggtccacgcgatgatcgccgaggtgcagaagtacgtgcccggctaccggctgaagaatggcccggtattcgacggcaaccgcgtctcgatcttcatggaggtcgagggcctgggcgactacctgcccaagtacgccggcaacctcgacatcatgaccgccgccgccctgcgcaccggcgagatgttcgccgaggaaatcgccagcggcaccattcaactgccacgtcgtgaagcggcactggcctaa

SEQ ID NO: 343314 - DNA, 1041 bp, Pseudomonas aeruginosa
atgaatctgcaaggcaagaacgtcaccctgcacgacatgagcctgcgcgacggcatgcacgccaagcgccaccagatcagcctcgagcagatgatcgcggtcgccaccggcctcgacgccgccggcatgccactgatcgagatcacccacggcgacggcctcggcggtcgctcgatcaactacggtttccccgcgcacagcgacgaggaatacctgcgtgcggtgatcccgcgcctcaagcaggccaaggtatccgccctgctgctgccgggcatcggcacggtcgaccacctgaagatggcgctcgactgtggcgtctccaccattcgagtggccacgcattgcaccgaggccgatgtctccgagcagcacatcggcatgtcgcgcaagctgggcgccgataccgtcggcttcctgatgatggcgcacatgatcagcgcggaaaaagtgctggagcaggcgcggctgatggaaagctacggcgccaactgcatctattgcaccgactccgccggctacatgctgcccgatgaagtcagcgagaagatcggcctgctgcgcgccgagctgaacccggccaccgagatcggcttccacggccaccacaacatgggcatggccatcgccaactcgctggcggccatcgaggccggcgcctcgcgcatcgacggctcggtcgcagggctaggcgcgggtgccggcaacaccccgctggaagtcttcgtcgcggtgtgcaagcgcatgggcgtggaaaccggcatcgacctctacaagatcatggatgtggccgaagacctcgtcgtgccgatgatggaccagccgatccgcgtcgaccgcgatgcgctgaccctgggctatgccggcgtatacagctcattcctgctgttcgcccagcgcgccgagaagaaatacggcgtgccggcccgcgacattctggtcgagctggggcgccgcggcaccgtcggtggccaggaagacatgatcgaagacctcgccctggatatgtcccgggcccgccagaaccagaaggtgagcgcatga

SEQ ID NO: 343315 - DNA, 795 bp, Pseudomonas aeruginosa
atgaaccgtaccctcaaccgcgagcaggtgctggccctggccgagcacatcgagaacgccgaattgcaggcccatgacatccacaaggtcaccaacgactatcccgagatgaccttcgccgatgcctacgacatccagtgggaaatccgccggcgcaaggaggagcgcggcaacaagatcgtcggcctgaagatgggcctgacctcatgggcgaagatggcacagatgggcgtggagacgccgatctacggctttctcgccgactacttcagcgtgcccgacggcggcacggtggactgttccaagctgatccaccccaagatcgaggcggaaatcgcggtggtcaccaaggcaccgctggtcgggcctggttgccatatcggcgacgtgatcgccgcggtcgactacgtgatccccaccgtcgaggtaatcgactcgcgctatgagaatttcaagttcgacctgatcagcgtggtggccgacaacgcctcgtcgacccgctacatcaccggaggccgcatggccaacctcgaggaggtcgacctgcgcactctcggcgtggtgatggagaagaacggcgaggtggtggaacttggtgccggcgccgcagtgctcggccatccgctgtccagcgtggccatgctggccaacctgctggcagagcgcgacgaacacataccggccggcaccttcatcatgactggcggcatcaccgccgccgtcgcagtagcgccgggcgacaacatcaccgtgcgctaccaggggcttggcagcgtctccgcgcgcttcgtctga

SEQ ID NO: 343316 - DNA, 192 bp, Pseudomonas aeruginosa
atgcctattgcccagatccacatccttgaaggccgcagcgacgagcagaaggaaaccctcattcgcgaagtcagcgaggccatctcgcgctccctggatgcgccgctgaccagcgtgcgagtgattataaccgagatgcccaaaggccacttcggcatcggcggcgaaagcgccaaggccattggtcgatga

SEQ ID NO: 343317 - DNA, 441 bp, Pseudomonas aeruginosa
atgagaacaacgaatcaacgctcgctgcactgggaagccgcctatgccgccacccgtgcggccgtggcacatgcagagaagctaggcgtgcgcattaacgtctgcgtggttgaccactccggcctgccgttggcctatctccgcatgaacggcgcctttctacattcacgggaaattgccgaagacaaggcatacaccgccgtgagcttcggcttctccacccgcgactggctcgacgtgctgggtgacaacccgcgcctgcgcatcggcctgccaagacgcgagcggctggtggtgttcggcgggggcctgccgatcctgctcgatggtgaatgcatcggcggcatcggcgtctctggggccgacgaggggcaggacgaagcctgcgcggcagcgggcttggcggccatagggcatcatgaggcatccagtttggggtag

SEQ ID NO: 343318 - DNA, 267 bp, Pseudomonas aeruginosa
ttggcagtcgctaaacatcccaacccccacaccctgctgtcgctatgcagccgccaggcgattcgcccattcttcgagtggctcggtgagcactgccggcatatcgaggcggtcgccatggacatgaacaccgctttcgacctggaagtgaagcggcactgccctcaagccgaagtggtgtacgacctgttccatggggtggcgcgctacggtcgtgaggtgatcgaccgtatccgcgtcgaccaggccaaccaccttgcgcgataa

SEQ ID NO: 343319 - DNA, 1431 bp, Pseudomonas aeruginosa
atgaacatcactgcatcggaaccggcgtccgggccctggaaccctaaacgaattctggccgcgctgcgcgccgacgccagcatcggcgaagtgctggcgggcgccgacatcgaggcccggtacctgaacgactggagcggcgaggaaggcggcaggccgctggccttggtgcgcccgcacgacaccgccgaaattgcgcgcgtgatggcattatgccatgcaggacgctgcccggtggtgccgcagggcgggctgaccggcctggccggcggtgccacgccgatagaaggctgcgtgctcgtttcactggagcgcatgtccggcgtggtcgaactggaccctgcctcagccaccatgaccgtgctggccggcacgccgctgcaggtcgttcaggaagccgcgcaggcggcgggctttctgttcgcgctggacctgggcgcgcgcggctcatgccagatcggcggcaacatcgccaccaatgcgggcggcaaccgcgtgatccgctacggcatggcgcgcgacctggtgctgggactggaagccgtgctgcccgacggaaccgtgctgtccatgatgaacaagatggtcaagaacaatgccggccccgatctgaagcatctgttcatcggcaccgagggcacgctgggcatcatcacgcaggccgtgctccgcctgcatccgggcgtctcgggcgccaataccgcgttggtagccgcgcccgatttcggctcggccatcaagctgctgcgccatgcgcagcacctcctgggcggccgggtcagcgcattcgagatgatgtggcaggactactatgccgcggccacaaccgccggcggcatcgccgcgccgctgccggccacgtatccactatacgtgctgctggacctgcaggcggccgcacccgaagaggatgcggcgcgcttcgaggcgatgttggaacacgcgctggccgaaggctggatcgccgacgccgccgtggcccaatctcacacgcagacccaagccttctgggaactgcgcgatgccatctccgagatgctgcgcaccttcgcgcccaccatcaacttcgacgtgtccgcgcccatctcgggcatcgaggaatgcgtggcccggatgcgcgaggcgctggcgcgcgatttccccggcgttcgggcgatctacttcggccacgtcggcgacggcaacgtgcatatcgtggtgggttcgctgccgactgacgaccgcaagaccgaacagcgcatcgaggccgcattctacgctatcgtgcgcagcctgtcgggatcggtctcggccgagcacggcattgggctgcacaagcggccgtggttgcactacagccgcaatccggcggagctgtccttgatcgcgacggtgaagcgcgcgctcgatccgcacgggatcatgaatccggggaagattctggcgtcttga

SEQ ID NO: 343320 - DNA, 612 bp, Pseudomonas aeruginosa
atggcgcgccaactgacggcgctcgggcatcaagtgaaattgatctcgccgcagttcgtgcgtcctttcgtcaagggcaacaagaacgacttcattgatgccgaagcgatctgcgaagccgcctcgcggcccagcatgcgcttcgtctcgcccaagaccgaggcccggcaaacgctttcggtattgcaccggatgcgtgattcgctggtgcgtgatcgtaccaagacggccaaccaggcccacggtttcctgcttgagttcggcatcagcctgcccaagggactatcgctggtcagacgactgccgagcacgttggatgagcatgagctgccgcctcggctggtcgcactcctaacgcgcctgcatcagcattcacgctatctggacggacagatcaaggcactggacaaggaaatgaccacccagcttgaggaagatgacctggggagtcgcttgctgacgattccctgtgtcggcccgatcacggccagcctgttatcggccgaaatggcgatggcaagcagtatggcggcagccgtgatttcgcggcatcggtggggctggtgccccgccagcacagcaccggcggtcgagccaatttgctggggatga

SEQ ID NO: 343321 - DNA, 264 bp, Pseudomonas aeruginosa
atgccgagcccaggactcgcggcgcgcgtgcatcgtttccatataaatcccctactggaaaagcacaggatgcagggcggggtgttcgagcaaaaggggggggggcgcttactgtcgatacgcggcggcagccgcaagaccgtcgccgcgagcagcctgtccagcacgctcgaatacatggatgaaaagcgcatgcaggctgataccggtagtttgcgaaacggcgcggaggatcagcgtggagctgggcagcagccagggtag

SEQ ID NO: 343322 - DNA, 372 bp, Pseudomonas aeruginosa
atgacatcccttggcaacccgacgaccccttgccgccgtgtgccggccctggccttggcgctgatcatcgcgctggccggcgcatcgcccgcatcggccggcgatgccaccgctgaacacgagcaactggcggccctcgtccgccagctcaacctgatcgaccgcctcgccgagcacgccgccaataccgcgccgcaggaacgcacccgctaccacttcgactacgcccgactgcgtgccgacctgaaccgcgttcgcgccggcctgcaggactacctcgtgccccagcgcgcccagccgcgcgatcccgtcccgctggccggcgactacgtccgccgcgaccgcgccgacgacgaggagccgtcgccatga

SEQ ID NO: 343323 - DNA, 204 bp, Pseudomonas aeruginosa
atggccgagatggaagaccgctggttatcgataagtgaaatttgcaagtacctcggggtcagcaatgacaccgtgtacaagtggattgataaacatgaaatgcccgcgcatcgcatgggccgcctctggaagttcaagaaggatgaggtggacgaatgggtgaaggccggtggcgctgccgaacatcacaaaaaggaatcctga

SEQ ID NO: 343324 - DNA, 615 bp, Pseudomonas aeruginosa
atgagtaacgacagatacagcatgtcatttacaacgggcagtctctttcaccgcgaatcggtgaagctggccgcgctgtatcttgatcttggcgactggaactctgttcgagacaaggtcatcgcagaaaatttactgcagacaagaacactgaatacgctcaagcgagtctgccgcgaagttgtctctcggcttagggcgctgactcaaggcgaacttgaattccttgttgaggccagccatcaagagcaggcctatctcctgtggctcgccgtttgccgtcggtacagattcatcgctgattttgccgtcgaagtgcttcgagagcgatacatcacactgaaaagtgatctgacccacgaggattttgattccttcttcaaccggaaatccgagtggcatttagaactggatgagatcaccccggcgacgcgaagcaaattgcgccaggtcttgttcaagatacttcgcgaggccgatctcctaacggccaacaacatgatacatgcggccatgcccagtccgagactgttggatctgatccatcaaggcagccgcagggatgttttgtacttccctgcatttgaatccgatgtgaaggggatgaagcggtga

SEQ ID NO: 343325 - DNA, 591 bp, Pseudomonas aeruginosa
atgccgatgcaggacagatttcagcatctctttgctgtgatctcgggccaacgttttctcaataagcaaggtctcggtaacgaggtcccgttcttcatctgtcccttcaaaccggaagagtccgtcgaaatggagcggctccagcgtcagctgatcaatcgccttgagcaggccggtgttcggattctggagatcaatctgtatgacctttcaatagcaatccttaaagagcgtgacatctgggaccagattgtcgagatggaggattctgtctcaaaagagcagctaaaggaactgttgcaaggtgtgctggacccagaagcgcatcttgttccggccatcgcagccaagctggcaagcacggatttcgaggttctttttctatccggcgttggcgaggtgttcccctacatccgctcgcacaacgttttgaacaatttgcagagcaccgcgaaagaaaagccgacggtcatgtttttcccgggagcctatacccactctctggagtccggagcatcgctcgatctcttcggaaggctgcatgacgacaagtactaccgggcattcaacatctttcactgcgaagcctga

SEQ ID NO: 343326 - DNA, 3567 bp, Pseudomonas aeruginosa
atgactcttaagaccatttttcacaagccggttgaccgcccgattgaaggggtcatcaaagctgacgatgaggccagtcttcgcctcgaaattgaagaatatgttctgaccaacgaagtcgaaaagcgacttgagtcctttctagatgcctacaacaactatgaaggcgccaatggcgtttgggtttccggcttcttcgggtcaggtaaatcccacctgttgaagatgctggcgctcttgctcgaaaaccggcagatcgacggggcctcggctcttgacctgttcctgcccaagtgtggcgacaatgaaatcctgcgcggcgatctcaagcgagcggtcgccatcccgtcgaaaagcattctgttcaacattgaccagaaagcggacgtcatcagcaagactcagctcgatgcgctcctcgctgtcttcgtcaaggtctttgacgagatgtgcgggtactacggcaaacaagggcacatcgcccagtttgagcgcgacctcgacagtcgtggcctctatgaacagttcaagtcggcctatgaatccgcagcgggcagaacatggcaaaagggccgcgagcaggccctgcttgaagcgaaaaacattgccaaagcctatgcccaggcaaccggtggtgacgaggcatcggccatggggatactcgataaataccgcagccaataccgtgtctccatcgaagattttgccgaacaggtgcatgcatatatcgagcggcaatcgcccgatttccgcctgaacttctttgtcgatgaggtcggtcagtacatcgctgaaaacgtcaagctgatgaccaacctccagaccatcgccgagagcatggcaaccaaatgccgcggccgcgcatgggtcatcgtgaccgcccaggaggacatggggacggttgtcggcgagatgggcaaacagcaaggcaacgacttctcgaaaatccaggcccggttcgccaatcgcatgaagttgaccagcgccgacgtggcggaggttattcagaagcgtctgctcatgaaaaccgaagaaggcgtccgccttctgtcggacacttaccacgcgcagtccaacaacttcaagaccctgttcgactttgccgacggttcgcaaacctaccggaattatcaggatcgggatcacttcattcacagctatccgttcattccgtaccagttcgcgctgttccagtcggccattcagaatctgtcgcagcataacgcctttgagggcaaacacagctcggtgggcgaacgctccatgctgggtgtgttccagcaggtggcgatccagatcggggatcatgaaatcggtcagttggcgaccttcgacctgatgttcgaaggcattcgcaccgcgctgaaatccaatatccagcgggccatcatccaggcagagaaccatcttgatggtcccttcgcgatccggctgttgaaaacgctcttcctggtcaagtacgtcaaggaattcaagccgaccgttcgcaacctgtgcgtgctgatgctggacggcttcaatcaggacctgcccgcactgagaaaacgtgtcgaggaggccctgagcctactggaacagcagacctatgtgcagcgcaatggcgagctttacgaatacttgaccgacgaggaaaaagacgtcgagcaggaaatcaagaacaccgaggtggagtcggcagacgtggccgccgagcttgagaagatcgttttcgaccacgtcatcaagcatcggaagattcgttacgacgcctcttcatcaaaagatcagggccaggattatccgttctccagaaagctcgatgatcggctgcacgggcgcgagcacgagctggccatccatgtcatcagcccgttccatgagcacgcagaaaatgagccaatgctgcgcacaagctcaacttataagtctgatgaactgtttttgatcctgccagcggacgaacgcttgatccgcgacattctgatgtacaagcggacggagaaatacatccgccagaacatctcaatcacgcaacaagaggcggtcaaacgcatcctgacggacaagggtttccagaaccgggaacggtatgccgagctgcagcagcgcgtccagagcctgatgagcaaggccaagctgttcgtggcaggtgccgacatcgaaatcggttccgaggatgcgcagacccgggtgctgcgcggattccacgagctcatctcccgcgcctatccgaaccttcgcatgctgcgcggcatcagctacaaggaagagatgatcaaaaccatcctcagtaacaaggatggaactctgtttggaagtggcgccacctccctggccgaatccgagcaggagctgttggcgttcatccagagtaacaaccggggtggcgtgcgtaccacgctgaaaaacctgctggagaaattcgagcgcaaaccctacggctggtactacgccgccgtgctttgcacgctggccaacctgtgcgctcgcggcaaggtcgaggtccgcaccgacggcaacttgctggaagaggacgagctggaacgggcgttgcgcaactcccatggccacggcaatgtggtgctggagccccaggtcgaatttagcgcttcacaggtccgcaccctcaaggagttctttgaggacttcttcgatgctccgcccggagccggtgaggctaaagcactcggcaaggaaaccggcaccgcgctccaggaactcacgcatcagctcaccccgctggcggcccaggcatcccaatatccgttcctgaacgcgctgacaccggtgcttgagaagctcaaggagctgaccggcaagccctacacctggtatctgaccgaactcacccgccaggaagatgcgctgctcgatatgaaagaaagcgtcatcgaccctgtccgcaagttcatgagcgggccgcagaaaggcatcttcgataacgcccgcaagttcgttcaaacccaagagcccaacttcgcctacatcgaaggcgatgaatccgctcaggtagtcgccagcttgaccgatccggagtgcttcaagggcaaccgcatgcagcaggtgaagatgcaagttgaaaccctgcaggagaaggtcacggcccagatcgaggccgagattgccaaggccaaggagacggtcgccgcccttaaagaccgcctctgcggcatgactgaattcggcgcactgaacggcgagcagcaggagcagatcacccgtccgttcaacgaattcaacgcggccattgagcgccagaaactgattgccgtcatccgcgacaccctgcgccggtttgaggaaagcgactaccagcggttgctttcgcagatgacatcctgggcgcaaccggcaccaacacccgagcctgcgccgaaacctggtcagaccgccacgccggacgaaggtacgaagcccacgtcaccggccaaaccggaaccgcgcattgagtacgtgcccagccgctcggtgaaggtctctttcgacaaagcttggctggccgacgagaccgacgtggaacgctacctggaatccatgcgcgaggcgctgctggatgaaatccgcaagggaaaaaggattcaaatctaa

SEQ ID NO: 343327 - DNA, 1809 bp, Pseudomonas aeruginosa
atggaaacaggaaaactgaagaagttcgcccagttcgcccggcgccagctgattgaacaggtatccgccaagctgaagctggtgctggccgagaacagtgccgcccggcgtgaaagccttgacgccatcaaaaaactcgaaaaggcgatcacgagaaccggcacggaacatgtcattgagcgggtggcctacatctggttcaaccgcttctgcgccctgcgcttcatggacgtgaaccgctacacccgcatcggcgtggtgtcacccgccgaaggacagtttcagcccgagcttctggccgaagccaagatggggcacatcgacgaagagatggtgccagaaaagtcacggcagcagatcttcgccctgctcgacggtaaagcgcccagccgagacccgcaaggcgaggcttaccgcctgctgctggtggccgcctgcaacttctggcaccagtccatgccatttttgttcgagcgcatcgacgactacaccgaactgctgatgcccgacgacctgctctcgggcaacgccatcctcgcctatacccgcgaggcgatgacaccggatgcctgcgaggatgtcgaggtgatcggctggctctaccagttctacatctcggaaaaaaaagacgcggtgttcgaggggttgaagaagaaccagaagatcactccggaaaacatcccggccgccacccagctgttcactccgcactggatagtccgctatctggtggacaactctttgggccgcctatggctgctcaaccgtcctggttcgaagctggtcaagcagatggagtactacatcccgccggaaaaaccggaaaccgatttcctcaggatcagcggcccggaagacatcaaggtctgcgacccggcgtgcggttccggccacatgctcacctacgcctttgacctgctctacgccatttacgaggaagaaggccacgatccgaccgagataccggaaaagatcctcacccacaacttgtacggcatcgagctcgacgaacgcgccggggaactggccgccttcgcgctgaccatgaaagcccgcgcccgccagcggcgcttcttcaacaagcgcgtcaagcccaacatcacggtgctggagaaggtgagtttcagccgcgaagagctggacgaatacatgggccacgttggccgcgacctgttcacccacggcctgcgtgggacgctgccgcagttcagcgaggccgacaacttcggctcgctgatcgtgcccaaggtgggcaacgtggccgatgtgctggcgacgttggaagccaaggacatggccggcaacctgttcctggcggagactcatcagcgcgtgctgagcgtgctgcgcatggtcgaagccttgagcccacgctacgccgtggtcgtggccaacccgccttacatgggcggcaagggcatgaacgggcgcttgagcgcctgggccaaagagacctaccccaacagcaagtccgacctgtttgcgatgttcatcgagcgcaacctggaccttgcggtgaaaggcggcgcggtcgccatgatcaccatgcagagctggatgttcctgtcctcattcgaggcgctgcgcagccgtatcctgaaccagcacaccattctgtccatggcgcatctgggcgcgcgagctttcgacagcatcggcggcgaggttgtctcgaccacggccttcgtactcgaaaacgcccacaagccagattaccgaggagcctacatgcgactggtggatggcaactcggaggcggagaagatggaaatgctggccgaggctatcgcacaaggcagtgcggcatga

SEQ ID NO: 343328 - DNA, 1143 bp, Pseudomonas aeruginosa
atgatcggcagcctccatctcaagaacttcgtcgcgttcaccgacctgaccatcgacttctcgccgggcatcaacatcatcatcggtgagaacggtacgggcaaaacccagctgctcaaggccattctcgccctgtgcgggccggaggctcgcgcggatcaggccggcggacaactcgcccgcaagctctgccgcctctatcacccgctgagcgggcaaattggggagctgcgccgtgccggcacacgcggggatgccctgctcagcgccaccttttcgctcggacaagaggtaacggcccgattcagcggcaccgccgtcgaggcgaaagtcagcaccggcgccggaggtgacgttgctgcagccatcttcattccgaccaaggaagtgctgtcgctggtgcgcggcctcaccgccgaggagccggatcagcccaccatcgagcgcatcttcgacgatggctatctggacctggcccgccagctcatcaaagaaggcgccgatgatctggatgccaaggtccggctcgacccgcgctttgccagcatcgtgccccggctcgccaacctgatcggcgggcgctacgaactgcacgaagggcgattctgcttccaggccggcgagtacgttgaaaagctgggcaaaaccagctcggcagaaaaagccgcgcagagctttcaggactccgcgttgcagtttgtgccgaccaaggcacggctgctttccagcaccatgaccgctgagggcttccgcaagatcggtgtactgcaacgcctgctcagcaacggcagcctcaaccccggcacggctggcccgctgctgtgggacgagcccgaatccaacctcaaccccaagctgatgagggatctcgtgctggccctgctggaactcgcccgcaacggccagcaggtcatcctcgccacccacgactacgtgctgctgaagtggttcgatctgctgatggacaagggcaagggggatcaggtgcgcttccacgtgctttcacgtgatgccgactccggtcaggtgcgcagagacagcatggacgactaccgagccattgaaccgaacgccatcgccgacaccttcaacgaactgaccaaggagcaggtcgcccgcaagatgggaggcttgggcaaatga

SEQ ID NO: 343329 - DNA, 525 bp, Pseudomonas aeruginosa
atgaagctgcgcgagcgcgatctggagatcgacttcaccgatgcgattgacgccatcgtcttcgatcagatgaaggccaacaagccgaactaccatggcatcgcagagatgcatcgcgtcgattttgtggtcgagctggaagaggcgattctctttgtcgaagtcaaggacccaggcaaccccagggcgcaagccgaagggctggaaaagttctacgcggagctgaagagcggcacgctgggcgacacctttgccgccaagttcatcgacactttcctataccgctgggctgaagagcgcctgcacaaacccgtgcactacatcagcctggttacattcgaagacagcgagctgctgcccaatttctccgacgaaattgccaaaaagcttcccccgatggggaagatcatgccgcgttggaaacgtcaattggcggaaaactgccaggttttcaacgtcgagctatggaatcaaagtttcccgaaatggcttgcgacccgcatcgcaccagcggaaaacgcctag

SEQ ID NO: 343330 - DNA, 1362 bp, Pseudomonas aeruginosa
atgaccatcaatacgctcaagattcgggacgaccacatgccgctgcagttctcggctgacggcgacaagttcaagctgcaggcaggttcggaagcctcctggttgagcagcgaagccttcggccataaggagctgcgcagccgcatcgaaccctggctgacgtcgctgttccagtcggagcacctgtcactgctggctggctcgggcttgacccacgcggtgcattccctggccgccggaaaaggcgcggcaggcatgggcgcgctgacgctgagcaatcatcaggacgaaatccatcaagcagcagcgaaaacagcagaagaggctgggcgcgagaagggcaatctggaagatcagctgcgcgttgccaacgaattactgcgtggcctggagattctgcagaagaacagcgaggcagaagccctgcgcaaggaactgcaaaccggcatgcaggacttcgccaagtcgattctgggcagcgaagcgggcatcgccacggccgaagcggacaaacgcgagcaggccttcaacaccctggtcaccttcctgatgagctttgccagccgcaccggggtgcgcgaccggctgaacatcttcaccaccaactacgaccggctgatcgaagccggcgcggagctggccgggctgcatctgctggatcggttcctgggcaagctgatgccgatcttccgctcctcgcggctggatctggacatgcactacaacccgcccggcattcgcggcgagccgcgttatctggaaggcgtggcgcgttacaccaagttgcacggttcggtggactgggtgcaaacgggcaaggacattcgccgcatcggtctgccgttcggagcagagagcgtcgaaccctatctgaaggcgcctggcttgggcgcggtcacagcccaccaactgatgatctaccccaacgccgccaaggacagggaaaccgccgactacccctacgtggaactgttccgcgacctcgctgctgccgtgtgccggccgaatagcacgctggtgacttacggctacagctttggcgacgagcacatcaaccgcgtcatccgcgacatgctcaccatcccctcgacgcatctagtggtgatttcctatgacgacccactcgatcgcatcatgcagatctaccgggatctgggccggccttcccagatcagcctgctgattggccctgcgttggcagacttgaccacgctgaccgagcactacctgcccaagcccgccatcgacaagaccaccttccgcatgagcgagctgctcaagcaacgcatgggggccgagcagcctcaagccaagcgtccgttggctgaagccgatgccttcgacgggagcggcctggtatga

SEQ ID NO: 343331 - DNA, 1071 bp, Pseudomonas aeruginosa
atgattacgaaggtgcatcgagcagattgggacagttatgaaacttcctgggacttcactagcctcccgctgctgcattccgactactgcctccccaagctgaaggatagctaccagaagctccgcgcccactggcgggagatgacgctggagatgcagcggctggaggaagagaacaaccgcatattcatagaagcctacggtctgcaggatgaactgacacccgaggtgccgctcaacgagatcaccctgacctgcaacccgcattaccgttacggcaacgacaagagcgaggacgagctggaggcgctgctgctggccgagaccatgcgcgaactggtctcctatgccgtgggctgcgtgttcggccgctacagtctcgacaagccggggctgatcctggccaaccagggcgagacactggccgactaccttgcacaggtgccgcaaccgagcttcccggccgatgacgacaacgtcatccccatgctcgatggcgactggttcaccgacgacatcgccgagcgattccgcaggttcctgcgcgtggcctttggcgaggaacactacgaggaaaacctccggttcgtcgagcaggcgctgaacatcaagggcaagcgcaactacagcatccgcgactacttccttggcgagttctacaccgatcatgtgaagcgctacaaaaagcggcccatctactggttgttctccagtcccaagggcagcttcaacgcgctgatctatatgcaccgctaccgcccggatacggtgagcgtggtgcttaacgactacctgcgcgagttccgcaccaagctcacctcccacaagaaccatctggaggcggtcagcatcagcgccagcagcagccagggcgagaagaccaaggccctgaaggagatcgagaagatcaccaagatgatcgccgaaatggaggactacgagcgcgaagtgctttacccgctggccaccgaacaggtggagatcgacctcgacgacggcgtcaagctcaactaccccaaactcggcgcggccttgaagaagatcgtcggcctggatgcgaaagaggattaa

SEQ ID NO: 343332 - DNA, 2499 bp, Pseudomonas aeruginosa
atggaaaaccgcattgcccaggccctgaccaaactcttcgaccggcaccggatcgtcttctggtacgacgccaagcaggagttgcgcgacgacttcgatgcgcttcagcttcccggcgtcgagaagctggagctgatcaacaacgagtacggcatcaagtacaggctgctgcgcgagcaaccggaacagaaattcctgctctaccgcgaaggccctcagcccgccgatctggataactggctgctggacgtccagctggcccatggcgagttccgcaccgatcaggtggccatctggctgtccgagctggagcttggcctggagttcacggatgtggtgcaggcccatgcggagttcttccaggcgatcaagcgcaaggacgccctcaagaagctgctgaaagccgacgacacagccggacagattcgcctgaagatgctggcggtatgcaccggcagcgagccgcgcatggatgcggtggtggaaaacctgctgcaagagctggccgatggccgggacgagaagatcaaattgatcggccggtgcagcctggacggtttcctctgggaacagatgacccgctgctatggctacaagtccgacgcgccgggcatccgcgacttcgccatcgagctgttcaagtcatgctacgccatgggcaccgctggccaggtgaaactgaccggcgacgccctggtgtttctcaagcgctggaaggacagccgtcagttcgaaggcggtttcgagaccctctcgggagaatgcgccgaggtgctcgggattgagcaggatctggccaagcgggatttccgcgagttgatcgagttggattatttccgcctgattgaccagaagatcatcagcgacctcgtgcgggcggtggcagcccgcacggcctcaagcggtgacgtggcgatctgggttcgacagcggcgacaaggccactggtaccgcgaataccggcatctgtacgaggcagtcgattacgccgcccagtttacccacgccctgggcgaggccaaactcgccatggacagcctagccgaaggcgtgcagcgctacagccgcttctggtatcagctcgatcagctctaccgcaagttcacctaccacgtgcgcatgtcaggacaggcgtcgctgatgggcagcctgaccgagcagattgaaaacctctataccaacaactacctgctgaagctgggcgaccgcttccagaccttcgtggatgcggcatcgaagtgggaagccttcccggtgcgtaagcagaaggagtttttcgagtactgggtacggccgttcctgcgcaaggacaacaaggtctgcgtgatcatctccgatgccatgcgctacgaaatcggcgatgagctgctgagcctgatccggcaggaggaccgttacagcgccgaactggaaccggcgctatcgatgttgcccagctacacccagctcggcatggcggcgcttctgcccaacaagacactggcgattgtcgacaacgaaaccggcaccgtgctggtggatgggcaaagctcccagggtacggttaatcgcaccaagatcctgcaggctgcactgaatggccgtggtgaagccattaccgccgaagactttatgcagctggatcgggatggcagccgcgaactgctgaaaagcaacgatgtgctctacatctaccacaatcgcatagaccatactggcgacaagatgcattcggaggggcaagcgtttgaagcggctgagcaaacgctaggcgatatcgtcaggctggtgaagaaactgaccgcggcgaatgccaacaatattctggtcaccgccgatcatggtttcatctaccaacatcgaccgctggacgagagcgactttgccagtgtcgaggctaagggtgaggtgattctgtaccgtgacaggcgtttcgtgctcggcaaggggcttgctgagtcagccagcctgcacagcttctcgtctgaacagctgggtctttccggggaggtcgaagtccagattcccaagtcgatcaaccgcctgcgtctgaagggctccgggagccgttttgtacatggcggcgcatcgctgcaggaagtggtgatcccggtgctcaagatcaacaagaagcgccagagcgatgtcaccgccgttgaagtggacatcctgcgtggagccagctcggtgattacctccgggcaactggcggtgaccatgtaccaggccgggccggtgacggacaagatccagccgcgtgtgctgcgggctggcatctacaccgaggcaggcgacctgatctccgacagccatgatctgaccttcgacctgagctcggacaacccccgggagcgggagctacaggtgcgcttcgtgctgacccgcaaggccgatgaggccaacggccaggaggtcattctacggctggaggaaaaacacgccgggacttcacattacaaggaatacaagtcgctccggtacttgatgcggcgctcatttaccagcgacttcgacttttaa

SEQ ID NO: 343333 - DNA, 2070 bp, Pseudomonas aeruginosa
atgaacgaacttgaccagaaaatcaacacacacttcccgggactcgttgtccgcaaggatctcgtcaagacggtcaagggcaacgccatcgttccctcctacgtgctggagtacctgctgggacagtactgcgccaccagcgatgagccgaccatccagaccggtatcgagacggtcaaagaggttcttgctaagcattatgttcaccggaatgaagccgggttagtccgctcgaacatcaaggaaaaggggcgctacaaggtcatcgacaaaatcagtgtcgatctgaacgacaagaaggatgtctatgaggcgcagttctccaacctgggtatcaaagaggtccttgttgattccggaacggtgaaaaagcaccccaagctcttggtcggcggagtgtggtgcattgctgatctggaatatgagtttaccgaagacaaggccgtcagcccctgggtcttgtccactctcaagccgatccagctctcccatttcgatttcgacggctatgtcgaggcccgcaagcaattcaccaccgacgagtggatcgacctgctggtgcaaagtatcggcttcaacccggatatgttcggcaagcgcagcaagctgacccaactggtccgcctgatcccgttttgcgaacgcaactacaacctgatcgaacttggccccaaggggaccgggaaatctcacatctactcggagttctcgccgcacggcattctgatctccggcggcgaggttacggttcccaagcttttcgtgaacaactcttccggaaagatcggactggtcggctactgggattgtgtcgccttcgacgagtttgccggaaagcaaaagcgcgtggacaaggccctggtcgacgtcatgaagaactacatggccaacaagtccttctcgcggggcgtcgagacgctgggcgcagaggcctccatggtgttcgtgggcaacacccagcacaccgtgccctacatgctcaagcactcggacctgttttgcgagttgcccgacaagttctacgactccgcgtttctggaccgcatccatttctatatcccgggctgggaggtcgacatcatccggggcgagatgttctccagcggctacggtttcgtggtggactacctggcagagattcttcgctcgctccgcaatcacgattactcggaccgctacaaggagcacttctccctctcctccgatatctcgacgcgtgaccgagatggcatcaacaagacattctctggcttgatgaagatcctgtttccgcatgggggggcgaccaacgaagaagtcgaggagctgctgcggttcgcaattgagggccgcaagcgcgttaaagaccaactgatgcgaatcgattccacctacgggaacgtccgctttacctatctgggcactgatggccaggccaagcctgtcaccacgctcgaagaggaggagtaccccagctactaccacaagaccatcgccgagggtgaagacgggaatatcttagaagctgcgcaaccgagcttaccgccagttccaaccgaaccactggcaccggccgagcctgtcctcaaggaaatgcaccttacattccaggagaaccagaaaggcctctccttcgatacgctgctcggtccttatctcaaggacgcgactgcaatcacagtcaccgatccgtacatccgcctgttctaccagatgcgcaacttcatggaatttttggagaccgtggtcaagcacaaggctccggatgaggaagtgtccgtgcatctggtgacgacggaagacgagttcaaaggcgaacagcagaaagaaaacttcgagaagatgaaggagtccgccagctcggtgggcgtgaacttcacctgggagttagacagcaccggaactatccatgcccgccacattgtgaccgaccacggctggaaaatctccctagatcgaggcctcgatattttccagcgatacgagttgaacgatgcctttacctttgcaaatcggttgcagcaataccggccatgcaaggcgttcgaggtgacgttcattaaacaaaagccgaatcgagctgaggggtaa

SEQ ID NO: 343334 - DNA, 1386 bp, Pseudomonas aeruginosa
atgaatcgacaggcgatgctttcaccaagagaacatcatttctacgttgcgattgccaagttcctttttcgccatccggagcacggcattgtgtctgtgcgggacccgatcaaggtcaaggacgcagagcggtacgggctcagccccctcatactctatggattgaccgttaccgggttgcccattcggtggatgacctttgccccggtcgatcagcccagggccttccgggatgttcttttggatgcgtggcgtagcgccgagggcttgcgtggccgaccggacattctgcggatcaaccgccacctcgcgacggccagccctggactggtagaggaaatggcaagaattggagtccaggtcgaggtcgccgatgccaaggagaaatcccttccagcttccctgcgctcagcccaggactccagccggtggctgctgaggaagcacgacggaaaagaccggtctcttaccgggtccatccaggccctttgccgggacgctcaaaataaccacgattttcgtttcagggatggtcacagaggcgtgaacagccgcgaggtcgaggacagaatccagcagtggctggccttaccggcgcaagtaccggtgccaacaattacagttgggctcgactgggaacccggtccatggatgtcgtcctgggagacctctctgccgcccgatcagccccgttatttcaacctcgacgggttcgatggcagaacttggctggtgacaggtgagaaggcaccggaggacatcgttgaggacgatgatttctgggccgacagtgactatgactacgcagccgagatcgccaagaacctcgtggcgtgctggcccaattcgcctgcagacgttgccaagtgtgccgggatcaccctgcgggaacttcaatggtttacctcgggaaaggctcccctggaccggcatgcgcgctttgatctcgaagccttgctcggcatcgaatacgacgaacgcatgggtagttatgtaggggccgggccttatgtcctggtggcccacaaaccccaggccatcaaggaggtctacgaagccatttccaaaggcggagacgcacgtccctgtgagattgtccctcgccagggagctgcagacccaagctggcgatacgtgttgatcaatacgtatggagagcccccgagcattgtgatggcacctcgcggagcaaatatcacggagcgtcttccggacttgcttatgaattatgacggcatcagggctgtcgctccggagttctaccgggatgtcgtttctacctgcgcccgggcctgccgcgaacctgccgtcaacatccgggagatgaaagactttatgaaacgctacgaagcgcactgggcagattgcgcctggcagccagagtga

SEQ ID NO: 343335 - DNA, 540 bp, Pseudomonas aeruginosa
atgttggcggccggctgcgccaccacggaacagccgcaaggacaggcagggatcatcgaaagcgctgcggacgagcctgctccgggcctgatcctgatcgcccgctacggccgctacacgctgatcgagctggtacccgacgccgcgcagcgtgacctgctgcagcaggtcatcgacatctccatccccaccacggcggacgcaaccttgggcgatgccatgcgccacgtgttgctgcgctccggctaccggctctgcgatgcggccgaggccgccacgctctacgcgctgccgctgcctgccgcacacctgcgcctgggcccgctgatgctgcgcgatgccttgctgacccttgccggccccgcctgggagctgtcggtcgatgacttgactcgccaggtctgcttcagccggcgcggtgctcccgccttcctttccgccaacccgcccgacaccgccacgcccgtgccggacgccgaccggcccgacaccgccacgcccgtgccggacgccgaccggcccgaggagctgcagccatga

SEQ ID NO: 343336 - DNA, 366 bp, Pseudomonas aeruginosa
atggcttttactcgtaaccgcggatcaggcgatccgaacgagccgcccaagcctatggtttcgcacgaggtcgaaggtttgcgagagttgcggcaactcgccggcaaggggcaagccgacatcgcatctgctctgaacatcaaacaaccatcggtatccaagatcgagaagcaaaccgacatgtatctctcgacgttacgcagctatgtcgaagccatcgggggggagctggaattgactgtcaagctgccagaacggccggtgctgcgcatccatcatctcggtacagtttcggctgtcatggcggcaaagctgtcgacccggagaaaaaatgacgaatcgtcgccaaggcggcgccatggatga

SEQ ID NO: 343337 - DNA, 912 bp, Pseudomonas aeruginosa
atggatgaactgcagcgatccatctacgtcgatcggttccgtttggcgttccatacccagaagggtaccgcttttcaggactggttcgtgcgtctggcgggctacgccttcggccccgatttcgaggaggttcgcccctatggtctttatggggatctgaaatgcgatggacttcggattagcacgggctcggtgttccagtgctatgcgcctgaggcgatgaaggaaaccgagcttatcgcgaagatcaatgaggatttccatggcgcccgcgtgcattgggccgacaacatgcaggaatgggtgctcgtccacaatgatggccgtggcctgccgcctaacgccgttcagcatctcgatggccttcgcaatgcctacgcgccgctcaagatcgcgacttggtccgagccagaactgctcacgctcgccatgggccttgatctgtctgcccttcaggccctctttggccccgccgcctcaatcgccattgtggaccggcttgtcatgtctgatctggtgccaattatcgaggcgcttcaacggcaggaacctaatccgggtgatccacccctgacaccgccctcgtcagagaagctggagaagaatgcgctctcggatgagtccggtctctttctgcgaattggtcgtcgcaaatctgctctcgccgatgccttcttccgcaagagcccgcgccccgatctcggtgagcgcatcgccgaagccttccgtctgcgttatgcggagttgaaggcgctcgacctgccggccgacacgatcttcaggcatcttcaggactatgccggattcaatggcgagcccaagcgtcagggcgcagctctagcggttctcgcctatttcttcgatagctgcgacatcttcgaagacccgattgcttccgtggaggcgtcatga

SEQ ID NO: 343338 - DNA, 246 bp, Pseudomonas aeruginosa
atgattctgccgacgaagcatgttcgttccgaccgcgcactcattggcgtcggtgcagaagtcctcgacatccttaagcggccgctgactatgtcgcggctatgggacgaggtgcgtggccgtcgctccctgcacgcgcccaatgccccaattgattaccagtggttcgtcctgtcgctggacctgctctacatgatcggcgcgcttgagttcgatcgcggcttggtgcggaggactcggccatga

SEQ ID NO: 343339 - DNA, 1764 bp, Pseudomonas aeruginosa
atgatccgacgctttggaagcgatctcgcttccttcaaggcgctgaacttaaagcccggcttgaacgtcctgctcgccgacaagagcgaaggtgcgaacgaccgacagtcgagaaacggtgcaggtaagaccagctttatcgaactggtgcatttcctgttcggagccgatgtgcgcaaggagaacattttccgctcggaggcgctggcaccttggaccttcgacgtcaccgtcgacatcgccggcgagaccgtatcggccgcccgcagtggcaccaagcctagccgcatcctcgtcaacggggctgtggaatcgtggccgatcgcgccgcaatttgatcagcgcgccggattgttcgagctatccaacgaaaattggaaggccaatctcgggcatctctggtttggcttgcccatctcggccggcgatgaggtcgagcgcttccagccgtcgttccgttcgctcttctcctactttgtcaggcggcaaaatggcggcggtttccagcagccgatgcagcattcgacgatgcagcaaagctgggaccagcaggtctcgatctgctatttgctcggtctcgattggagcattcctggccggttccaggaactgagggcgcaggaaaaggtcgcgcaggaattacggaaggctgcccgcagcggcgacctcggccgcttcttcggtaaggccgccgatcttcggacacggctaactatcgccgaggcccacgccaaacgactccgcagccagctcgaaacgtttgaggttgtgcctgaatacaaggcacttgagcaggaagccaatgagatcacgcgcgagatcgacagcctgaacgtagagaacgtgatcgatggcaatctcctgcaacagcttcgagcatcgttggccgacgaagacgcgccggatctgggtgatgtaacgaagctctatgccgaagccggtgtcgtcctgcccgatatggtacggcggcgttttgatgaggtcgaactcttccatcgggccatcatcgaaaaccggcgcgcgcatttgaatgccgagatcgcctcggcagaggcacgggttgtcgagcgggatcagaggatctccgagcgcgaccgtcggcgccggcagatcatgggagtcctgcgctccggcggggcacttgagcattatgtgtccttgcgtgaggaagccggaagggccgaggccgaggtcgaaggattgcgccaacggcttgaaaccgccgagcggatagaaagcacaaaggccgaactcgatatcaagcgagccaatctgaccaaggcgctccgcgacgacatccatgaacgtagcgacatcacccgcgaagcgatccttgcgtttgagtcgctatcggaatccctgtacgaaaaggccggtagcctgacgatttccgaaactggaggtggtccgcaattcgaggtccatatcgatggacagcgaagcaagggcatcaccaacatgcagattttctgcttcgatctcatgttgactgagatcagtttgaagaatgggcgcggccccggcttcctgattcacgacagtcatctgttcgacggcgtcgatgagcgtcagatcgcaaaggcattgcaacttggtgctgaacgggcggaggcggctggttttcaatacatcgtcacgatgaactcggacgtgctgccacgtgaggggttcaagccgggcttcgatattcgcgctcatgtcatggacacgaagctgactgatgcgaccgatactggagggttgtttggtttgcgcttcgaatag

SEQ ID NO: 343340 - DNA, 2529 bp, Pseudomonas aeruginosa
atgacaaagttcccaagagcctttctatctcacggacatgttgacaaacatatagtgagagaagttgcgcgcaatctcgggcgcgcagccgtcatttacgacgagttcgagttttcggttggcgatgaattccgtgatgccatcatcaaaggcatcgatcgatcagatgtatttattctgtttgcaagccgggcctcgctccaacgagattgggttaaattagaaatagaactcgcttccgaagcgctcatcaagaatgcactcagtaaggtgacaacctatatcgttgatcaggagctaacccacgacgaccttcctgaatggatgcgggcaacgctcatcaggaaagaggcatcgccgggtctgatcgccaccgacatccggcgtatcatcagtcaacgtcttggagagcgcattccgagatactttgtcggacgtagggctgagatcgagcaatcgctcgaaaccatatcaggcttcacagatcccaatttccgcccgcctctaatcgtttacggcctaaagggtatcggcagacgctcgcttgtccaagcgattgcacgcgacaacctatcctttgcctcaatattgccaattaacctccacgcgggcgatctcttgcctgagacatcgatccgcgtcgccgaagcgatttcaccagggggtatctccgacttggtggcttttctgaagcagcaagagcaaaaagcgaaggagaacttggtcgacgagataacctctctgttgcgtcaggcctgccaagcggggacgttgccgatatttgtcgacgaaggcgccctagccgccgagaatggcgtgatgagacccgagttcgatgcgctgtacaacgcgatttcgtctgatcgggatactgacgccatgatcgtttcaagcaggaggctgtatcgacctgccgaaaacccgtgcccgtccgtgcgcgtccccgaacttgatcaaacatcaacgcagaatctgttgcgtatcgccggacgcgacgtcggcttggtattcgatcgaaccgcgcttacggcaatcgcaacctacgctcgtggctatcctcccgctgtacgatttattcttgatgaggctcggcttcgcggaatctcgcaagtcgtaactgatcaacgtgcattggtgaattttaatgccgaacagtttctccggcacttaagggagaacagatcgctaacaccgagcatgcagacgatcctgcagatcctatcaagcttcagccctctcccacttcaggtcattgtggcgtactgcgcgcaaacgtcacacgatacaagcgatgatctgaacttcttacttgacctcgcgtttgttatgcctgccggaatgcactatcgcatctcagagcccatccgtgatgcagcatacagagcatttggcggacttcgcgtcgataccaggaaagtggccgagcttcttgaagcgtacctggcagatgagcctgacgatgacgcacgacttgatctcgggcaaacgattttccgagccaacctccttgcaggaagccaggctgactctcgattcgcgattggatttgccgcagatctgatcaacgtagcaactaggagctatcacgatcaagactacgacctcgctatcaagtacggttcgtctgccttggacgtgcggcccgatagcgttgatgtacgacgctatgtcgcgcaagctctcattcggaaagagcgatatgatgaagcagagcagcatatcagcgagctgcttcgcctcggtgaacttaaggaggcgtactacgtgcggggcttcgccgcgcgacggaagcgagagtatcctgaagcgatcgaggcttacaagaagagtctcgccaatggccgccgaggcgtcgccatccaccgggaactggcaagctgcttttttgaaacgggggatcttccagccgccgaagagtatattcgtcaggccgagcagcagtctccgcataacccatatgtagttgatttgaaatgcacgattgcgcttaggcttggcgatctccctactgctgagcgcgcccttgagatccttgaccgcattgattcaagtggattcgctgagcatcgccgctccaccttcgaacaagcaaacgggagccctgaggatgcactacgcttcgcccgtatcgctgaccaaaagatagcccaccctccctttgaggttctcgccaatttagcgaactgcgagatcgaggcaggagagtgcgaaggcgctttgaccacgctcgggcgacttcagaaacgatttggtgccatcaaccacgacgctcaggttgggctacggtgcaaatacgaaatccgatttggtgaggtcgaagccgctgaaggactctggagtcggcttcgcgacacaagtacgcccgttcaccgaggccttcgtctggcgatactgaaccgcaagcaagcgcagagtggactgacggtcgaagaagacgccgaacgaactcagctgatcgagtatcaatcgacggcagagcttgagcgtaacatgcggttaatcggctcaatgatgtctcaatctgaataa

SEQ ID NO: 343341 - DNA, 522 bp, Pseudomonas aeruginosa
atgcggatccacctgagcctgtccgcggaagactacgcccagacccaggacggcctgagggaattggtgtcgctgcgcaacaatctggtgcaccacttcatcgaccagcacgacctgtggactttgggcggatgtcgtgaagcgcacaaggcgctggccgccgcctacgctcgcatcgaccagcacttcgagcgcctccggggctgggccgaacacatggaccaggccaggcgcctggcggcagagtttgttcagcccgataccttccgtgacctggtgatccatgacatcgccccggctgactcggtggattggccggcggcaggcatcgtccgcgccctgcgcgaggcctcggtcgaactggccgtggaaggctggacacccgttgccagcgcaggacgatggatcacacaacggtatcccgagcagcagcctgccaggtacggctgtgccggttggcggcaggtgcttgcacgagtcgcgcctgttcgaaccgcgcctgttcgaactgagctaccgtga

SEQ ID NO: 343342 - DNA, 318 bp, Pseudomonas aeruginosa
atgaccggacagaccgacggcgatctcctggaccgccagcgcgaagtccagcgcgtgctcggccgttgcatgctccgcctccagcaatacgagcgcctgatcaagaccatcgtggcccaccacgaccttacgggaccggcccacgcactggcgtcgacccgcgcggcgcgcatcgccgatgccgcaggcaagacgctcggcaccctggtcgggcggctcttgggatcgtatgccgtcatcgacggaaccgacacatccgccgattcgttaggcaacgccccgaagacctcatctcgttcagcatgcggatccacctga

SEQ ID NO: 343343 - DNA, 315 bp, Pseudomonas aeruginosa
gtggccaaggtcctggtccaggaggcggcgtcctggcggctcgacgagatctaccgctacacgcgcgatcgctggggcaccgagcaggccgatcgctacatcgccgggctgttcgaggccttcgacggcatcgacacgcaccggacatcgtccaggcccgtcccggccgagttcggcatcgaaggctacttcttccgctacgaacggcacttcgtctactggcgccggctctcgaatggcgacatcggcatcgtgaccatcctgcacgagcggatgcaccagatcgaccgattccgggacgatttcggttcatga

SEQ ID NO: 343344 - DNA, 261 bp, Pseudomonas aeruginosa
atgccccggacaacgaccacgaccatgacggttcgcctcagcggaccgctcagcgatttcgtcgccgccaacgtgggcgagcatggcgactacgagaacgtcagcgaatacatgcgcgacctggtccgccgcgacaaggaacgcaaggagcaggaagccttcgaccggctgaaggccgagctagcccatgcctttggcgccccggaaacttcgtatcgtcccctgaccgccgccgacgtgaccgcgcgcaaccagggctga

SEQ ID NO: 343345 - DNA, 1170 bp, Pseudomonas aeruginosa
atgagcacgggtggcgtaccacggcgcgaaggccccgttgcgctgtccgcgctcttcgacgaggccctgcagcacctgcagccggcgcagggaacggcgccggccgccgacggtttcctctacagcggcaaccgccatgagagcgtgccgcgcaggctgttcctcgaccggcgcctgacgccgctggagcgcaacgcctggcaggtgttccgcctgcagctcaacgacgacggcgtgaccgcatttcccacctacgaccaattgcgcccctacctggcctcgatgccctgcgcggcgcaggcatcgcacgagaccgtggcgcgcgccctgacgctgctgcggctgacgcgctggctgagcctggtgcgacgacggcgcgaccccaagaccggccgcatccaaggcaacctctacgtgctgcacgacgaaccgctgtcgcccttcgaggcgatgcagctcgatgccgactacctcggcctggtcagccaggcgctgacccatgccgccaaggcggtgcagatcgtgggcatgaacacgctcaaggaaattgccgaagacccgctgctcagcggccgcacgctaccgacccgcctgcaggtgctggcgcagcgcatgacacgccacggcttggcggcggagagttatccacaggaggtcgccgactacgattccgaagaaggccgaaatgcctttcttcggaatgctgcgcgcccgtcttcggaatccgaagcagggccggaacccgcgccggacggctctgttgggattccgaaggaggaccgtacagtacgtaatgatcgtataaatgaagcacgtacagtaccgtgcgcgagggccttgcagaacctgcggctgcccgagcgcttcctgcgcctgaaggacgagcagcaggcgggtgcgcttgtggcgctgcaacaggtggacgaggcgcagcgccaggcggtgctcgacgagtgggcggcgcgctgtggcggcagcacggtgcgcaatccgcccggctacctgttcggcatcatccagaaggcgatccgcggagaattccgtgcctgggccgggcaaggcgatgcccgcgccatgtccggtccggcatccgctgtgtcaaaggccgccggtccggaggtggcacaggctcacatcacgcgcctgcgctcgctgctggagcggccatga

SEQ ID NO: 343346 - DNA, 234 bp, Pseudomonas aeruginosa
atggaaaccagcactggagcactgatcaccgtcatcgacatggcgacagagggaactcgggcactgaagcggatcgaagatctggtgctccgggcgaacaacatccgcggcgcctcagaggagatgctggggttgtgtcgcgaagcagcccagatcagtgtggacatgcgcgcctacttcgccgaggagcgccaacaagcagagaagcaactgaatgaaagccggcctcaataa

SEQ ID NO: 343347 - DNA, 195 bp, Pseudomonas aeruginosa
atgccagcaatcttcagaaacaacgacgatgactattacgagtacccgaacgccaaggaggtgaagaaggagggcggcaagtacgtcgtttacgacgactgcggcagcgttcttggttctcacccgatcgactcgatcgctgagttcacgaccaccgcgagggggaccgactaccagacctctgtcaaggactga

SEQ ID NO: 343348 - DNA, 990 bp, Pseudomonas aeruginosa
atggatttgagaaaggagatacaacggaaccctgtcgcggacgaggtccaggcccttatcgcggttgtgattcctattcttcagggtgtgttctatgccattaagcaggaggccgttcaggacgcaggtgggggccagaatgtccgtcttcgccaactccctcgtctttatcggccgggtgatggggattgtggcatctgttttgagtatgccgtacatgatgctatctcgaacggaaatcagctcattctggatcgcattgatacagcattgactcagcactgccggattcgcggtggggatccagactccatcctatttggcgcggagaagacgggggcggttcagctaattcagactgcgcgcgaattgttaacagatgactccagtctcttgtcgggcagcaagggtcgtcctgtgaagctgaagaagcacatagatgccgtggcttctgcattcaggaagcgcggtgagcgtcagttgcttccggcatcaattaatgggttgtggaaggctgacctatttgtgggccgcaccgatactgatcaatgggtgggaacaactgtaaaaatcaatccaagacagttggaaggggcccgcggacttaggcttgcgattgttccatctcagcagggaaggaacgacgccatccgtcgcgacgatcaacgaaacttaatcattgcccctgtcccatacgatgcatctttcatggaggttttctatcagggctggcaaatcgttcagcagttcattcatgctgatgcaatggtgccgcgcgaagttgcattgccgcgccctgccgatagacaagtctgtcgattcttggaggaacgaagggagtttccaattctcgatgtccttgaggcattgcggcctctcgctcaaccgcatcttctggaaacacaggaaggtgctctcgatatcgacttgcgaaagggagagtcgagtgacactggattgattgtcgcacccatgccagcccgcgactga

SEQ ID NO: 343349 - DNA, 312 bp, Pseudomonas aeruginosa
atgctgacctccactcccaagatcttccacgtcggcatggccatcagctacctgatcggccacgcccgccggccgcgccgactcgacgggattttcgtcgagcgcgccaccggccgccctctccccggcgaagaggtggtgaagatggcccatcacctcgccagccagggcttcgagcttgtccctccgcgcgatcaccacgacgagcgcggctactgccttggacatcccgccccgcttcctcacggcgaagacgagtgcgcacgcgcgcagttcgacatcttccacgacaccaaggagcccatcgcatga

SEQ ID NO: 343350 - DNA, 699 bp, Pseudomonas aeruginosa
atggctgagtacctcgcccgggtgaagccccgctacttcgccgccatccaccagtgtgccgcgaagaacgacgtccgctactacctgaacgcgctctacctggagcgccaccccgacggcggcgtcgcgatcgtcggcaccaatggccacgtcctggcggcgatgcacgacgataccgcctggatgcatcccagccatgaccacctgctggtgggcaccacgaccaagcgcatgctctccgcgctggtcaaaccccgcgggccggatgggctctcgccggcgcacctctggatcggtgcgaactgccttgtcctgtcgagccgtgaagaggtcgaagaagctcctgagccgttcgatccgcagtcgcacctggccgagcgcagcgaactggtcgacggcaagttccccgactggcgcaggatcctcccggccgacaccggtgctactggcgagccgtgggtgaacagcgcctatctggctctgttcaacgatgtagcgaaggccctgcacccgggcacctatctgggcggagggattcacctggcgcgctccggcgagcacacctccatcattgtgcgcgtgctgcacgaagaaacccgcgacaagttcttcggcctgctgatgcccatgcatggcgagaacctgaagtcgaaggtcccggcgttcgcgcggccgaccaagcaggagggcctggcgtaa

SEQ ID NO: 343351 - DNA, 1035 bp, Pseudomonas aeruginosa
atgcctatccgccacgccatcatccacctgatcgacaaaaagccggacggcaaccccgccatcctgcatgtgcgcagcgctgagctgcccgccactgacgccggcgacaacctgctggccgacttcaacgagagctacaacgccaagccgaacaaggcctggggcctgttccaggaagagtccggcgcctacccgttcagtggctggctgacccgctacctggacggcggcgaggacttcgtctccttcagccgccaggcggtcgagcacctgaagagtctgatggaagagtccaacctctccatcggcgggcatgtcctgctctgccactaccagcaaggcatgacggagtacctggtggtcgcgctgctgcaggagaccgaaagcgtctcggtgaaccagtatctggaggtcgtcaccacccaccacctggacctgggccaagtgcatctggcagcccggatcaacctgtcagagtggcgcaacaacaaggcttctcgccagtacatctccttcctgaagggcaagggcggcaggaagcgctcggactacttccgcgacttcctcggttgccaggaaggcgtcgacgcgcccagcgagacgcgcaccctgctcaaggccttcagcgactacgtggaaagcgaggacctgctcgatgcgcaggcccgcgaaaggaccagcgacctgctcgcctacgccagcgcccaggccaagatcggcgcgccgattaccctggacgcgctctccgagttgctggacgaccaggcgccccgcgccttctacgacttcatccgcaacaaggactacggcctctcccctgaaatccccgccgacaaacgcacgctgaaccggttccgccgcttcaccgcgcgcaccgaaggcctgtcgatcagcttcgaggcccatctgctcggctcgaaggtcgagttcgaccagagccgcgacatgctgctgatccggggtctccccgcccagctcaagagccaactgcagaacgcttccagcgaaggcggccggggggtgagccatggctga

SEQ ID NO: 343352 - DNA, 126 bp, Pseudomonas aeruginosa
atggacgcggtctaccgaaacacggagatgactggcgaccagaagcgcgagcggctcaacgatctgcaactgcgcagcaaccaggttgcggagcgggtggtgaaggcctcgctggccgacttctag

SEQ ID NO: 343353 - DNA, 219 bp, Pseudomonas aeruginosa
atgctgcaggttgcaatcggaatcgtactgctggtcaccggcatggtagccatcttccccctccccctcgtcggcgtggccgcgatcgccggtggctacctgctgatcaagaaggctccgcccggcgccggcgagcagttgcagggcgttttcttcggcctggccgtccttggcatcgccgccacactgctggtcggtctgttcggcatgctcttctag

SEQ ID NO: 343354 - DNA, 1194 bp, Pseudomonas aeruginosa
atgcatgcaaaatctgaagaaaacattcgcaaaaaaatcattggctttttgcagcacacagcgcccacgaaagactggattctgaaaagggaatatatccctcatatggctgccactgtagatgcaatctacaaagaaaaatcccaatggatgaacaagaatgatgtgggctttcttatttacgtcttcgtaaacaaaatcgtcaacgaaaacaaccccgccaacctagacgagtacaaaaatctatccgaaatcaccaatatcaatacgaaagctgatgaactgctcagcataataaagtccatcccacgcgatgaatatatctacttccccctccctaaattttcaattgacataccaatccatataccacttgaaaatggctgcgagcttatcgcaattgaatcagacaatgttgaacaaaaaaaaccaagcgctctcatactgcagataccaggtggagtaaagtactactttaagtccaaaatccatgggtatcttggccattcagccaaaggcgtagggtataacctagctctatctcaattaaagcatttcctagagcgaggatattcactaggctttttcgaaacaaaaatcagctggggcttcccgcaaatagaaaggtccgtatcaagagtgtatggatggcatacatacacggaactaggtgaaagcgaacgcctacaaaaggaactaccactcgacattagccatctccttgggcgcataggtctcagcacaagcaagggatttgataacaccaaaagcatggttgacaactgcagcctagtaacagaccttatttccagcctcaatcagctatgctctgccactggaaaaattggcaacaggataaggtcggcgtctgagtggttgtttaactcatacgcagccgaagatgactgcatgaagcttctacaggtatgcataggccttgagtccatctatggcgaagattcttccggggagggtttaactgagtctctttcagacagatgcgcctactccattggaacttcccacgcaagcagggcaaaaataaagcaagacttcagaaccatatacaaacttcgctccaaaatagttcacggcgtaatccaacgactttccgaagaagaggcaaaattcctgcaaacaggagaaatactacttagaaagtctctgcacaaagagatgctattacaagaatag

SEQ ID NO: 343355 - DNA, 1242 bp, Pseudomonas aeruginosa
atgaaaaggtccgaaatcaagcggcgcccgctgagcgacactaccatctcctccctcgatcctgagggcaaggcctaccgcgagcacgacggccagggcctgtacctgcgtgtcaagccgacaggtcagaagctgtgggagtttcgctacaagaagccggcgaccggtgcctggtcgtggctcggcctgggcccctaccccagcgtcagcggcgccctggcacgcgagaaagcgcaggccgccagaacactggtagcccaaggcgtcgacccgtcgacgcacaaaaagatgacagccgcggccgagaaggcgaaagcggagagcactttcgagccgctagccaaggagtggttcgacgctcgcaagacgggctggtcgaaaggctattgcactcgggtgctcggcgccctggagcttcacatcttcccgaagatgggcgcccgcccctatgtcgacatcacattgatggaatggatggacctgttccgtagcatggagaagaagggaatcatcgaccagaccggcaatgtgcggcgctactgcaaggaaatttacgacctggccagggtaaccgcccgggcgacgcacaaccccatcgacggcctgcacaagttcctccagacgaagccggcggagaactacgcccacgtctcatccgacagcctgccggacctgctgcgcgcagtccgcgcctaccacggccaccgccaggtgcagatcggactgcaacttctcatatacaacgccctgcgcccgagcgaggtccgcgaagcgcgctggagcgagttcgacttcgaccgcaaggtctgggagatccctgccgaacgaatgaagaagaagcgcgctcacctagtccctctaaccgaacagtccctggcactactggaagaactgaaaatcttgagcggcgcctacgacctgctattccctgggcattgggaccgcaataaacccctgagcaatatggtattcaacatggcactgcgcagaatgggctatcagggcaggcagactggacatggcttccgtcacattgccagcactatcctacgcgagaacaactggccaaaagaacatgttgaagcgcagctttcgcatgctgaagcgggcgtggctggcgtatataacaaggcgctgtacattgaacagagaagaaaaatgatgcagtggtatgccgaccatctcctcaagctagaacagggaaatatcatcagacacccgtcaaacaaagctgccgtctga

SEQ ID NO: 343356 - DNA, 387 bp, Pseudomonas aeruginosa
atgcttgcgctcgccaggttgataagtggcctccaagccaaaggtgtcatcaaccagcagtcggtctttcagcgcttcatgcaattgcaatggagcgccatcaaggagcgctgcgacaggagggaggtcactgacactttcggggaacgcagccggctctccctcgccctcctcagaaaccgccaggctttgtccagtagggcggaaatacatgatgccggcgaatttgaacaactcgatgtcgatatcagcttcatccgcagctacttgatcgagcagcaactgaatggcgtgagcaggcaattcggccttgaccgcatggaatgcgatctgaggcatatcaaggaacgccgaaagcgtttggcctccgaggccttcaagcaatga

SEQ ID NO: 343357 - DNA, 213 bp, Pseudomonas aeruginosa
atggataaattcccgcgctgtatcaccaatggaaagattgatgaccttgaccgtaggcgcttgcgcggggacgtcgccagagccttcgaacatgcgccgaacggcaatatggatgcggtcttcaaagaaaacgtcatccggcatatgttcatcatgttcgcgcgtctgatggtcaggctgcatcaccgggatgcaatacagtttgtgcggtag

SEQ ID NO: 343358 - DNA, 1329 bp, Pseudomonas aeruginosa
atgaactctgagattcaatggttcgaaaaacctcttggagaagtcacgtgcaatcacgatggcaaaagaaaacctgtcaaggaatccgagagaaagaaaggaccatatccatactacggtgcatccggtatcgttgactacgtagatggttacttgtttgatggacactatcttctgattgctgaagatggagaaaatctccgcaccagacagacacccatagcattcatggctgatgggaagttctgggtcaacaatcacgctcatatcgttacaggaaacgaagaggtaacaactgagtatctgcactatttccttcagtatgcagatatacagtcgtatctcacgggcgctgtaatgccgaagctaacgcaaggaaatctgaatagaattcctgttcgttaccctgaaccggactatcaaaagcagatcgtccaactacttggtttctttgacagaaaaatagaccttaaccgccacatcaaccaaaccctcgaagctatggcgcaagccatcttcaaatcctggtttgtcgatttcgacccggtcaaggccaagatcgcagccatcgaacaaggccaagacccgctgcgcgccgccatgcgcgccatcagcggcaagaacgacgccaaactcgaccagatgccccgcgagcaccacgaccaactcgccgccaccgccgcgctgtttcccgatgccatggaagagtcggagttgggggaaattccgaaggggtgggcagttggaacattggccgacctgtgtcatttgaaccctgaaagctggagtgccagaaccctgcccgatacagtccggtatgttgatttagccaatgctaaagtaggagaaatttcagaggtacaaagccttggaggaaaagacattccaagccgagccaggagaatcttgcggtatggggacaccattgtcggtacagtacggccaggcaaccgatcttttgccttgattggtgaagatggtttgacgggaagcacagggtttgctgtgctacgaccaaagtcagcgcattggctagagtttgttcatcttgtagcaacctccgaagccaatatcgagcgcttggctcatttggcagatggtggtgcatatcctgctgtacgccctgaaattgtggttcaggaagatgtggcaattcctacgaaatctatcgtacaagcattcagtcaacacgtaaaaccgctgtttgccaaaattctaagtaatagaaaaagcgcggtatctctcgccgaactccgtgacacccttctccccaagctcctttctggagagatttctgtagagaccttgatgaatgaggtcgcgcaatga

SEQ ID NO: 343359 - DNA, 1275 bp, Pseudomonas aeruginosa
atgattctgtcagaagtcatccatgaacagcaacgtacgggctatttcgagaggatccctgtttggaatgatggctggaaatgctttgaaagcatggcagataaacacagcggtcgcatcccggtaacgcgattggaatcttggcgtgattacaccgaacttctagagagcccattcttcaatcgtcttggcatacaacttatttttcgtggccagcgtcgctcggactggagtctgatgccgactctgggccgtttatccgataatggaatcgtcaccgaagaattagcggcgtctcagcttgagcgatttaaacgtgcgatccgaggtcggcttagtgacaatagtctcttggatgaagatgaggagctttggtctattggtcagcatcacggactaatgactcctttacttgattggacttattctccgtatgtcgccttgttttttgcctttgcgaagcctgacagcaaggatgaagaagaaaatccgtatcgtgtcgtctacgtgctcaacaagagttttattctggaacaccaggacgagacaggcattcgactatgggagccacgcaaggacagctatggaaggctggtgaatcaggctggactgttcactttctctccctatgacgccacgatagaaaacaaaatagcgactgttttagccgacgatgaagcttttgaagatgaggagttgcgctcggcatcggaagaagatcagcccgatttattagctcgatacatctgcaagatttatatccgtaatgaaggacgtgatgcctgcttgcgccatctcaggcggatgaatgtgcatcatgccagcctctttcctgatctgatcggcgcatctgattattgcaatatcacaaccgccgaagcagaggaggaagtcagtcttgcacgagcggcagagcgcgagcgcttgaccgctactcaagttgttcaagtgccttctgttccagctgttgatgttgtggaggctcctaccattgattcggagcaaacgtctttcagcattgaggccatcttgcgtgctcatcctgacgcgcagcaagtggaaccagggcgtatcgcgttgattgccggcgagttgtcccgcgacatttccaaacaccaagttgtagattgggacaagcgcgaagacgctcaggctcgaatgcgtaacgttatccgagtcacgttgcggaagaacggctatccatcgcaactacgtgacgacgtagtcgagcaaatcatgaatgcggtgaagcagcaggcatcggaggggaaatga

SEQ ID NO: 343360 - DNA, 246 bp, Pseudomonas aeruginosa
atggccagaacacggcctctcctgttgatacatctgctggatttcaggctgaagaaatccgacgagaagagcaagaagctcgacttcgaggctggcaggcctgtcgtgtcgatcagtctggcatttccagacacgggtgtggctccacagccgcgcgaatatgcggtgaccaagcgtctggctcagatgatggagcggcaacgtcaggaggcagagtcggacgaggatcttgatggtgacgaatga

SEQ ID NO: 343361 - DNA, 513 bp, Pseudomonas aeruginosa
atgctcattattggcaaaaagctctcgccgtatgccctattgtccatatcgggcctgctggcagcgtctgatcaggctgtaaagtggctggtgcagcaatcaatggcctatggcgagtatgtttcggtgaccccgttctttaactgggtgcacctatggaacaccggtgccgcattcagtctttttgcgaatggtggaggctggcagcgctacttttttatcggaatcgcggtagtggtctcgatttttctgatcaagctgatccttgaaaatcgtcataaaggagaagccatcgcttacagtcttatcctcggtggcgccatgggcaacctgattgaccgggtctttcgcggctatgttgtggattcctttgatttctattggcgagactggcattggccggccttcaacctggctgatattgcaattgtcctcggtgccttacttttcgtttccagcagcttgttgggtaaaaaagcaaacaccaatgccgagccggatggatctgactga

SEQ ID NO: 343362 - DNA, 1290 bp, Pseudomonas aeruginosa; identical to SEQ ID NO: 153640

SEQ ID NO: 343363 - DNA, 909 bp, Pseudomonas aeruginosa
atgcccctaccccaccacgtacgcctggttgaagtcggcccacgggacggactgcagaatgagcgccacccgatcagcgtgacggatcgcgtccggctggtgaacgatctgacggaggccggcgtcagccatatcgagaccggcagcttcgtctcgccgaagtgggtgccgcagatggctgattccgcaacggtgttcgccggcatccaacgcagtcctggcgtgcgttacaccgcgctggtacccaatctgcagggtctgcaggcagctatcggcgccggcgtgacggaagtggcggtattcgccgccgcttcggagggcttctcccaacgcaacatcaactgctcgatcagcgagagcctgcagcgcttcgcaccggtcatggctgcagccgagcgccaggacatccgtgtacgcggctacatttcctgtgtgctgggttgcccgtatgacggcgccgtcgctccgagccaggtcgccagcatcgccgccgagctgatcgccatgggctgctatgaagtatccctcggtgacaccatcggcgtgggagtggccagcgccaccagccgactgatcgaccgggtcgccgcacaggtgccccggcggcagctggcggggcatttccatgatacctacgggcaggcattgagcaacatctatgccgccttgctggaaggcgtcagcgtattcgacagctcggtcgccgggctcggtggttgcccctatgcccctggcgccagcggtaatgtcgccagtgaggatgtgctgtacatgctgcagggcatgggcatcgacactggtgtcgatttgcaacgactggttgcggccggccagcgcatttgtgatgtgttaggccgtcccaacggctccaaggtagcccatgccctgctggcccacgaacaggagtaa

SEQ ID NO: 343364 - DNA, 1959 bp, Pseudomonas aeruginosa
atggccatgccacaaccgctatggtcaccgagcagagatgccgtcgctcggagccgcatggaagccttccgcatccaggtgaatcagcgctgcgggttgcacctagcgggctatgacgagctgcatgattggagcattcatgagcgcgccgacttctggcaggcgttggcggatttctttgcggtcgagttccacacccccgcccagcaggtgcttgaggaaggccctgccatgccggatgcatgctggtttcgcggtgccacactgaattatgcggcccatttgttacggcgcaaggatgaccagccggcattgatcagcatcagcgaagccggcgtgcacgagcaactgagttttgccgaactgaatgcccatgtggctggcttgcagcgcagcctggaagctgccggcatcatgcccggcgaccgtgttgccgccatcctgcccaacgggtggcaagcgatagtcgccatgcttgccaccaccagcctgggtgcggtgtggtcatcctgctcgccggacttcggcgcgcagggtgttattgaccgttttggccagatcgaacccaaggtcttgatcgcctgcagcggttatcactatgccggcaagtccatcgatctgaccgaccggctcaccgaagtgctgcgccaactacctacggtcgagcaactgatcctcgtgccgggcccggccggggctcagggaccgcatcccgactgtatccaggcggttcagcattgggcggagttctatcagcccggtggcgcaccgcagttccgcgctctgcccttcgatcaccccttgtatatcctgtattccagcggcaccaccggcgcgcccaaatgcattgtccatcgcagcggcggtgttctgttgcagcacctcaaggagcttggcctgcataccgacctgcaagccagtgaccggctgttctactacaccacctgcggctggatgatgtggaactggctggcctccggcctggcggtcggcgccacactggtgctctacgatggctcgccgtttcatccgcatgaatcccggctgatcgacctgatcgacgccgagggcatcaatgccttcggtgtcagcgcccggtatctcgctgccctggaaaaggccggcatacaaccggcacgcagccaccgcctgggcagtctgcgcagcattctctccaccggctcgccgctgtccccggagagcttcgactatgtctatcgcgacatcaaaagcgatctgcgcctgtcctccatctccggcggtaccgatatcgtctcctgcttcgccctcggcaacccactgctgccggtctggcgtggcgaattgcagggcccgggcctgggcatggccgtggaggtatggaacgaggccggccaacgggtagtcggagagaaaggcgagctggtctgtacccggcattttccgtccatgccgttggggttctggaacgacagcgacggtagccgctaccgcgccgcctacttcgaacgcttccccggcatctgggcgcatggggactatgccgagcggaccgagcatggcgggctgatcatccatggccgttcggatgcggtgctcaacccgggcggcgtacgcatcggcacggcggaaatctaccggcaggtggaacgtatcgaggaggtgctggaatcggtcgccatcggccagcaatggcaggacgatgtgcgggtagtgctgttcgtactgttacgcgacggcgtggaattggatgaggggctgcaacaactgatcagatcggcaatccgccaacacgccacaccgcgccatgtgccggcacgcattctggcggtaaaggacataccgcgcacacgcagcggcaagatagtggaactggccgtgcgcaatgtagtgcacggccagccagtgcgaaataccgagggattagccaacccggaggcgctggaggagtttcgcgaccgggttgagttacgggagtaa

SEQ ID NO: 343365 - DNA, 993 bp, Pseudomonas aeruginosa
atgtccacgttacgcaccctataccggttcgctgcagcggtcggctgtgcgagcctcatgaacggcatcgcattatcgccggtgaccgcagagccggtcgccacacagccgcagcaggtcgccggttactatcggatgaatatgggcgatctagaggtcaccgctttgtatgacggctatgttcgtcttgatccggaatggctgcaggggatcagcaccgagagtctggatagcctgctggatgcgatgttcatcgatgccgaaagcggcatacagacagctgtaaatggatacctcatcaatacgggcaataatctgattctggtggatgccggggcggcagcatgtttcggttcgaccatgggctttctgaaagaaaacctccaggcatcgggttacacgacggagcaggtcgacactgttcttcttacgcatcttcatcctgatcactcctgcggtctggcagatgctgaaggtgccgcagtgtttcccaatgcaaccattcatattccccaggctgaagcggaattctggctggatacctcattggatgatgtcgccgaagccgaccagccgttcttcaatatggcgcgtgcagcagtggcgccatatgttgaggaaaaactccagcgtttcaaaaccgatattctccccggtgtggaaagtgtgcccagccacggtcacaccccgggacataccggttatcttttccgcgctggtgatgacaacttgatggtctggggcgacgtgctgcataaccatgcagtacagttcaagcatcctgaggtggtcatagaggctgactgggacaaggaacaagcccgatcttccagaatgaggatgctggctctcagttccgaggaaaaattctgggtggctggcgcgcatctccccttccccggtctggggcatgtacggggcacaggcaacggctattcgtgggtacccgcagagttttcgccagtcgaagtagactcggcatcggcgccataa

SEQ ID NO: 343366 - DNA, 228 bp, Pseudomonas aeruginosa
atggtgagcgaaaccctggaaggattggcagaggatttacggcaatttcacgcgcaaggcttgctcaaattctgtccgaaggacaccgctcagttgctctggatgtccgcccttggtgcactgacttttgctgtcagtgtggagagtaccgctctggaaggctcggatgagccttccttacaaaaagcgctgctcgatataacgctggatgcgttattccagcaatga

SEQ ID NO: 343367 - DNA, 621 bp, Pseudomonas aeruginosa
atgatcgatctacttgttttcctcccggcatgtttcgcactgaacctggcgttcggccccaataacctcgttgcgatgacacacggtgcgcaaaagggcgtagggttttcctttatggcaagcacagcacggcttgccgtcttcgtgcccatgattgctgctagcgcgcttggtttagggatgcttttgtctgcttcggcgttggtcttcaacgtgatcaagatcgttggtgccgcctatctggtctggatgggcatcaagctcctcagaacaacatctggctcgactaacctaaacgcagatgcaatgaaaccttcgcttcgtaaggcattccgtagtgaggcgctgatcgccatcagtaaccccaaagcaatcctcattttcgcggcattcttcccgcaattcgtggatataacgaattactggctgagctatgcaactcttgggacggtttttatcgcgctagaggccgttgcaatagcgatatatgcgtcagcagggcgttttgcagcagctttcgcagcaaacaagctgcactggtttcaacgcgcctcaggtggaggaatgattgctttcggcatcctgcttcttcttagtcgccaaccttcgcgtgttgcctag

SEQ ID NO: 343368 - DNA, 138 bp, Pseudomonas aeruginosa
atgatagggaacatcacgcttgccgaaacgcacgaactcaccctgcaccccgcattcctcgcaagcaatgggatcgggcgcgtctacctggaagtgcatttcatcgtcggtggctttgcagcccagcacctggtatga

SEQ ID NO: 343369 - DNA, 453 bp, Pseudomonas aeruginosa
atggaaacctggacaggcgcattcccgcaactgctggctgcctacgagcacaaggagcgcttctacagcatctgggacgccaccacacgaccccaggcagaagccgccctggacgagtggatatccaccatcccgaagggccagaaagaagtctggagcgatctgtttagggcggtgggcaactggcgcgaagagatcatgacctacttcgagacggacatacctgtcaccaacgctttcacggagtccatcaaccgactggccaaggacaagaaccgtgaaggacgaggttattcctttgaggtgatgcgggcgcgaatgctctacaccacgaagcacaagaagaaggccccgactgcgaaggtctctccgttctacaagaaaaccatcggttacggactgccagacctcgcagaggagctcaactacggggtcgatctatcaaccatctga

SEQ ID NO: 343370 - DNA, 459 bp, Pseudomonas aeruginosa
gtggccaacgccgcgcggctgcgccgctggtgcgtcgagcagggcgtgcagatcgcctacaccgcccagccgggcagcatgaccgaggagcagcgcggcctgctcaaggacttctgggggccgggcatgcgcgccagtccggccgaccgcgaggtggtcgaggagctgtcgccggggccggacgactggctgctgaccaagtggcgctacagcgccttcttccactccgacctgctccagcggatgcgcgccgccggccgcgaccagttggtgctgtgcggcgtatacgcccacgtcggggtgctgatctccacggtcgacgcctactccaacgacatccagccgttcctggtggccgacgccatcgccgacttcagcgaggcgcaccaccgcatggccctggaatacgccgccagccgctgcgcgatggtggtcaccaccgacgaggtgctggaatga

SEQ ID NO: 343371 - DNA, 1419 bp, Pseudomonas aeruginosa
atgtgggaaatggccggcgcgaggtgctcgcggcggctaaaaatccagaaaaaatggatgattcgatcgttttttagacgaatcgccgcttttaaaattggcagggctgaagtcagccagaaatacgtgactacttcagaccatccttataagaaagagataataattatgaatgaaaaagaaaccaataaaatacgccgcattgctgtggtcggtggcggcatcggtggcttgacctttgcgattgcgatgcgccaccacggtatcgacgttgatatatacgagcaagcggaggagttgcgtgaggtgggtgccgcggtcgcattatccgccaatgccacgcgtttttattataaccactggggtttgggcgaggagtttgacgaggctgcgtttgaaatctctgctttgatctaccgggacggaaagactggccgtgaaatcggcaggcacgccggcgggctggcgtatcgagaccttttcggcggcccatatctcggcatccaccgggccgagttgcaacgaatcctctccaccaaggtgggtatggaacgcatccacctgaataaacgcctagtaaatatcgatgacactggcgaacaggtagtgttacattttaaggatggcagcaaagcggaagccgatatagtcatcggtgctgacgggatgcgttccaccgtacggaatttgatgctcggctatgaagattacatatacgcggggtacacagcatttcgtgggattgttccaatcgataaaataccgagcatgcctgatccgaccgctattcaattctggatgggtgagtccggccactgtcttcactacccgatcggcggagacagaaaaggagacatcaatttctttctcgtagagcgcactccgacgacttggccactaaaacagtcgactgcgcctacagacgacggtgaacagctacgcctcttcaaggactggcatcctgctctcgtcgagatgatcgcttcgaacaccttgaagacagtaaatcagcgatggggaatggtttatcgtatgacccttggccgctggagcaaaggtcgggtaacgctgctcggtgatgctgcacattccctagtaccgcaccatggacagggtgccaaccagtcgatcgaggatgccgtggtccttgctgactgcattgccgctgcgggttccgcgtcgattgcagaaacctttgaacgttacgagcgactgcgtcgtggccgggcgcgcaaagttgtgtatgcgtccgtgaccactggcgatatgttgcacttgccaccgggtgaagagagggatcggcgcgatgcacgtcttgcatctcatgatgccatggtgcatcacctcgattggatccacggcttcgatgctagcgatctcaacgagccggatgaacgccagggcggcacctggttgtga

SEQ ID NO: 343372 - DNA, 516 bp, Pseudomonas aeruginosa
atggacttcgtcttcgatgcactgagcaccgggcggcggatcaaatgcctgacggtggtcgatgacttcaccaaggagtcggtcggcatcctggtggagcacggtatcagcggctttcgcgtcacacgggcgctggacgagatggcgcggtttcgcggctacccgaaagcgatccgcaccgaccaggggcccgagttcaccggcaaggcactcgatcaatgggcctatcagcgcgacatcaagctgaagctgattcagcctggtaagcccacgcagaatgccttcatcgagtcgttcaacggtaagttccgggacgaatgcctcaatgagcactggttctgttcgctggccgaagcgagaatccgcatcgcggcctggcggcgggattacaacgaacaccgaccgcacagcgcgattggcaatctcgccccggcagaatttgctgcaagttggcgaactcgccagcagcagctgaagcaggaaaaattaatatcaaccccagggcctactaactag

SEQ ID NO: 343373 - DNA, 900 bp, Pseudomonas aeruginosa
atgcgaccgctcgtttccgtcgtttgcgcctgtttcaatatctcgaagtatctggacgaggcgattgccagcatctacgcgcagggctatcccaatctcgagttgatcgtggtggatgacggatccacggacgacacctatgagcgtctcgccatgctccgcgagcttcacggtttccagctctaccgccaggctaaccgaggggtgagcgatgcgctcaatcacggtttgcgtcatgcgcggggggagttcgtgatgactcccgacctcgacgacattgtcctgcctggagcgctcgacacgcgcgtcgactacttgcttgcgcaccccgaggtcgggtgcgtgggcggtttcaatatctgtatcgacagtgccggtaacgaagtggcgcgagatggtttcagcgagggttgtgtggagcgttgggggttcgatgcagcattggccgagaccctggtggtcatgccgctgacggcgctctaccgcatggacgcgatgaagcgggcggatttcttcgacccgtcgattcgcgtgcaggatttccagatcaccctcaggatcgcggcgcagggctatgaaattcatcgactaccggcctacatggggcgttatcgccggcatggaagcggtctgtccggcaggtacaagctcaattacgaggcggatatgcaagccatcgagccttatcgggctcacccgaattatcgccgggcccggcaactgatcctgaacaaggcgctgaagaaggctgttgtccaggatgggcgatatgcctggcagctgttccgctcggtgccgctgcgggcgtgggaccgggtgacgctgaagcgattctggcgcttcctccgttatctgccggtcctcgggttgaaaggtggtaccgacgtcgagggtcgatga

SEQ ID NO: 343374 - DNA, 801 bp, Pseudomonas aeruginosa
atgaccaaggacgccacaaccaaaggcaccagcagcaaagatgtcggcgcggtagtgaacgccattcagatacttcgccacctggcccacgccgacggaccgcaaggcgtggccgccatcgctcgcgccaccggtatcagcccgagcagcgccttcaatatcctgcgcaccctgagcaacgaacgactgacctccttcgacgatgcgggcaagacctaccaactgggccttggcctgtcggaactggccgtaggattcgtcggacgcagctatgccgacctgatccagccagagctggagcgactaagccttgcccaccacatcctcatcgccctgtggcaagtcaccgacgatgcgcacatccgcgtcatcgcccttgccgcgccgcccgtcgcccacgtcaacgtcgccgtcggcacgcgcctgccggaactggtcggcgccgccgggcgttgcattgccggcctgcgcgaactgccggaggacgaactgcgccgccgactgacccgcgtgcgctgggaaaatccgccgagcttcgagcgctaccaggccgaagcgaccgaggccgtcgagcgcggctgggctatcgaccaggaacacctctaccgcggcgtgagcatggtcgccagcgccatcaccgaccgcgacggacaaccgcgcttcgccatctccgcgatcggcatcagcgcccagcaccagcccgacgacctagaacggatcggcaccagcctgcgggataccgcgcgcttcgtgagccgcgcgctatttccccagggcgaggcactgaaggagaaatcctga

SEQ ID NO: 343375 - DNA, 450 bp, Pseudomonas aeruginosa
atgaaagctcaaaaaggctttaccttgatcgaactgatgatcgtggttgcgatcatcggtatcctggcggcaattgccattccccagtaccagaactatgtggcgcgttcggaaggtgcttcggcgctggcgacgatcaacccgttgaagaccactgttgaagagtcgctgtcgcgtggaattgctggtagcaaaattaaaattggtactactgcttctactgcgaccgaaacatatgtcggcgtcgagccggatgccaacaagttgggtgtaattgctgtagcaatcgaagatagcggtgcgggtgatattacctttaccttccagactggtacctctagtcccaagaatgctactaaagttatcactctgaaccgtactgcggatggggtctgggcttgtaaatctacccaggatccgatgttcaccccgaaaggttgtgataactaa

SEQ ID NO: 343376 - DNA, 837 bp, Pseudomonas aeruginosa
atgaatactattaagtatagccttgtacagtttacgccagacagaaaaagaaatgaaactatcaatattggattgctagtttttctgccgagtgaggtttctgttcatatatgtgagtctatcaggaaaattagagccgtcgatggggttacatcgacgaatgatctaaagaacctagagtcgaaattgattaagatatttagctcagtgcatcgtgagtccattgagtttgagagtgagtttgagtttaggcgtagcatgatgcctagttcgtatcagttgagtggtcttgggtatttttgtgcaagtagcgcagatgaggttagcttaaggctaaataagctaatgtccgaattggtgattcctccgaagcccaggatgacacgggagcgtggtgcacggattatcacgaatatgcgcaatctatttaagaatcataatctctttagtgaaagtgttgatgatattcttaatcatcgagtggtgcaaaattttccaatttctgatcgtgctaatttacatgcggatttcgcattgaagaatggtgtttaccatatcactgagactattgatcttggggctagggatgcgtctgttaaattcaaggaggctggtttaaagtcttttattatggctaaggctaagcttgagttggggaatgaaaccagatgctatgctgtttactctgcaagcgcagctgatgaaaaggataagtctgaagctatagagctattaagcgagggttcagactactctttcaacttgagaagtcagaaggatatgatgtcatatatccagcggatggaagaggcggcaggaattcagaagttgcactaa

SEQ ID NO: 343377 - DNA, 393 bp, Pseudomonas aeruginosa
atgatctatgccctggacctattcatcaataatacagataggcatgccaaaaattacctgttccgcactagtctggacaggacggtgatgatggcctttgacttcagctttgcctggctggcccatggcccagcactgcggggctatcctgcagacggcagtaacacgaggcaggctcacctgttcctggctaggatgtacggttttgatcaggctagcgcccatggggtgctcgacctcattcaggcattgcctgatgactggattgatgtgccagtgaactccatgcctaacgagtggaagcaaggggtggatctcgctgcagcgacgacatggtggaagagcgatgagcgccccgcacgttgcgcggaaattaaagaggcgattatgtaa

SEQ ID NO: 343378 - DNA, 558 bp, Pseudomonas aeruginosa
atgatggctttcgactataggagcgcgacgccggatgcactgaaggccgagtataatcgcatcgctaccgagataggtgacgatcaattctttaccaaaaaagagctgagtcatcttcccgaggtattggctgacggtgaacaggttttggcgtttacctctggcatcatggagggaaatacttggctgattaccctgactgatcgacgggtgatcttcctcgataagggcatgctttatggattgaagcaggcatcaatcgaactggacaagatcaacgcagtatcaggaaaaactggtatgtttttcggcgatatccttatccaagatggtggcagcgagcgcaagataacaaatgtctggaagaagacagtcactgcatttaccaataaggtgcgcgatgccatacatgcgaagaaacagcccgctatggcgagtgcttcaccctgcgatgacatgattagcaagcttgagcgtttggcagctctgcgtgacaggggagtacttacgccggaagagttcgccgaacagaagttgaaaatcctgagcatcgtgtga

SEQ ID NO: 343379 - DNA, 1725 bp, Pseudomonas aeruginosa
atgagattttcgccggcaccgacagcggggatggcattgcgaacgtcccgccgtaggcagacgtcgccatgccatctgtgcgagttcgataccaagctgacacggcgcttcgcgagcggtcatgatggaggtcacagtccaatgcctttcagctcagtacctgcagcctacgaatgcttcgccccgttccacgaaggccagcaaatcaggatcagcaatggtgcggcctggaacacggccgatctggtgatgttggcactcgaggcctcgcttgctctcagcggcaagcccgttcgttgcgcgggcgtgctgccgggggcatcgatgagggtgaccaccgggccgttacaactctttgacgacgcagacaaggctgaatttcttgacgacgtctggagacagatccgccccctcattatcgaatggctggttgaaccattgggcagaccacacattgtgatcgggctgacccagggcgataacagccgtatcgtcctcacatgggatgcggctggaaggatcagtcccggagttgctgaggtgcatgtcgactacgacgcgagtttcgctgcgacatatgccaagcggcgtctgcggcaccctctgatcgagcatgctcccgatgcgaaggctgtatgcaggcaggctctaatcaccctgcgacgcctgctggttacggcccttaacaagagccgccagacggtcgacgaaaggtatgctcgattgccggtgcatgtccgctatcgcgtcaccggtgcactggcggcatggcaagctctgcagaaggagcgcatgcatcaggtcagtgatccgagtatcgtacctgaccctaagcgttccccgatcaccaaattggtcagggactccgtcgcattcactcagcttgcgttgccaaacggcctcccggccaggtcctctgagtacctggcctcggaagcggcgcagtcagctgtatgggcgtcattcgaggagcgcggcggacagttttatgagcccagtctcgctttgcatcgcctactcggcgaagcatacatcgccgatgacgtgcccattggtgcgttgagccttccgatggatacgctgtgcatcattcctgagagttcgacaagagcgaaggaagatacgccacaggcgatcgtgctctttcgcaatggcgcgcaactgagctgcgcagcatggtccagagagaaaattctcggacgtgtgcccatctatagtttcaacgtaattgagttcccgttgggggagccggacagaaccatacgtaacctgcttctcgatgtgcatgcccaacaagccgcggccgatgacacgctcgtggtctcgccatcccgtgcggcaagcagcagacagttctggcgccagactctggactatgccatcaaggtgctgctctacctgaccgtgcgggatgcgcatgtggtgccccaccgggaatactctgaagccacccgaaaggtgcttgacctcaagggcctgggcaagcgcaggcgtgcagagaggcttgaggtcatcgaacagctgtatgaccggtatgttgtggggccggcaattctagatgaggaattggcccattcgatgccaccggatacaccatctcgcgaggtcaggagccattggcgccggccccatttcaagatgcagcgatgcgggcccaagggacgcctgcgcaagctggtgttcatcggtccgagcatcgtcagagctgatcggctgaagctctga

SEQ ID NO: 343380 - DNA, 1038 bp, Pseudomonas aeruginosa
atgagtcaagaaaaggaagccaggcccgcatgggcgagctggactggtgcatgcacgctgatgatgttgttgctgatgggaggaagcgccctggcggcgccggccgcaccggctacggaacaggaatggaaggatgccatgcatatgcgtatccgggcgaacatgccctatcccacactggcggcaatccttcgaatacagggcagtccgacactgctcctgaaagtcggccgcgatagttccctacacgcgctgcgtttggaacggtcatccgggagcgacatccttgatcaagctgcgctaaatgcggtgtggagaaccaagtcattcccgaagttttccccggacatgaagggagacgatgccgaaatccggatgccagtgaacttcgtgcttccagacgacgatgatccagaccccgctagccaagagcagcgggcatcggccgtcaagaagcacgatgcgaagccaggcacgcccggcgcgctcgagttccaggcctttctgaatgggctggcgcgccgccctgcggaaactgagctatccacctaccttgatccgaagaccggcctgagtgtgtcagtccctgcccccctgttggcacgtgcctcggcgcgacgaaaggggcggtacgaggccttgatcgatgtggtcagcaaggtagggcttcctccggttggcggcagcagcccttccctttgcagcgtcggcctcatggctcgcggcgtcggcgaacagctaccggcgaccgcaaccgcggctgcactggagaacacttccgcgtgggcgcgcaccctgttttccatggtgggcaaaatagagcgcgaagagacctttacccatgcggggcacgacggcatcgagatgatcgtctcgcctcgtttcggggctgggcatgcctaccagcgcatgtacgcggccgtacaggagtatccagttggccgtactgtcgtcagttgcgccactcacgtcgatgcgatggaccgtgcgttagcggtttttcgcaaggtgcgtgatggagtgtcactgatggagtga

SEQ ID NO: 343381 - DNA, 3738 bp, Pseudomonas aeruginosa
atgtggaaaatctggtccaacctccaacgattcggccgacccgtcctgcgctggttcaagcctggcgtgccgctgatgctgttggtgctcatgcttctggcactgggcgccatctggtggctcgggccccaatggacctggggcgaacgccagcctcttggaaacctgaccgcgcgcgtccttgctacggtcgtgctgctggtcatcccgctgctggcatgggctctgcgcctgcgccaacgcgcgcgacagctggaggccgaacgcaagcacgatgatgcagtgcaggtagacgcctgcctgcggtacgtcgaggcgcaggaacgcgatctcgatcggagcctggcgctgctccagtcccacctcaagggacgtcacgccctgtaccagatgccctggtacctggtgctggggcaggagaactcgggcaagaccagcttcgttaaccgttccaatcagagcttctcgctgaccggagaagtgaaagctggcagccggcgcctgcaggaggacccggacaagatctacaccatcgactggtggataggcgcccaggcagtgctcatcgatccacccggggaaatcatcagccagccccggattggcgccgacgcgaaagatggcggcatgcaggatgctgcggccgtcgacaaaggtgtctcggcgcgccggctcccggcaggattgccggaagatctccattcgcgtctgtgggacagctttgtcgcctggcttggacgcaaccgcagccgtcggccgctcaacggcgtggtgttgatggtcagcctagtcaccttgctgaatcagaagcccagtgaccgtaaagctctggccgcgctactgcgcgcccggctgaccgaactcagccgcgagctcggcacacgcccgcccttgtatgtcgtgctcagtaagttcgacctgctcgaaggcttcgagaccctgtttgcccgtctgccaaaatccgcgcgggaggacattttcggctttagtttcaccttggattccgtgcgggactacgatgcctggctggaggagcttggcgtgcgctacgacgctttcctgggccggctgaacgagcaggtcttcgacgccatggcggacgttactgaaacgtcgcaacgcgaatcgctgtattccctggtgcggcagctgtcaggcctgcgaccggtgctgttgggtttcctggcggatgtgatgggcagcgatcgcttcgccaccccagctctaccgcgcggcgtgttcttctcctcggtgtaccagcagggcgtgctcaacaacgccttcgtggcatcggccgcaaggacctacgacctgcgcgagccggtcaatgacgtacaccccagcgggcgggcgatggtctacttcgcccagcaactgtttcaacggatcatctaccccgagtccggccttgccggcgacaatccgcgggtccttgcgcagaagaagcatgccctggtcctgcgcttcggcattgcgtcgctgggcagcatgctgctcatcggcggctggtaccactactacgcggtcaaccgcgacaaggccctgagcgtactggatcgcagccgagatttcagtgccagcgccatcgacggacagttggatccaaccggccgcaacctgctgcagccactgaaccagatcagcaatgcggtcgccgtctacggggactaccgggatgcctggccgctggtcgccgacatggggttgtaccagggacgggcgataggccccaaggttgacgaggcctacctggcgctgctgtcgcaacgcttcctgccggcgctggccagcggagtcatggaagaactggacggtaaggacaccgacagtgacgcccaactggccgctctgcgcgtgtaccggatgatcgaagaccggcccaaccgccgtccgccggtcgtcgaaggctggatggccgcgcagtggcaggcagccttccccggcgaggatcgcgtccagcgcaccctcatgcgccacctcgaatatgcaatgaagtatgccgacacgcgcctgccgcagtaccaggcccgggtcgcggtggttcagcggcaactgcgacagatccccttgccggagcgggtgtacatgaccatgcgccgagagtcgggagcgtccctgcgttcgccgctggatctacgcaacgaaattggcccggcctttgacatcgtctaccagcccgaattcgaaacagcgaagggggaggaggggagtcgcctgcccgccaacggccgcatcgatgccctgctgaccgccaggggttacagcagctacttcgctccgcacagcgaggatctcaccgaactggcgatgatcgaccagtgggccctgggcgagcgcagcaagatcgactattcggaagccgacaaggcagccttggccgagcgcatccgtgcgatctacagccgtgactacgtggacacctggcagcgcaacctcaaccagctcgagatacgggacttccaggacatcgcacaggcggtcagcatcctcggaagcgtcaccagtccggccgcgccgctgcgccgcctggtcgaaacggtgcgcgacaacagtgagcttggcgtcaaggcggttcctgccaagagcggtacggaaacagtggccgacaaggctgcttcgttggtcgacaagtcggtcaagaccagcgacgacgcgcagacggctccgccgatcatggacatcgcgcgcgccttcgcgcccatgagccaactcctggacgccaagggcgagcgtgcgtcttatctggacgaaaccatgcaggccatcggcagcgtgcaggacagggtgcgcatcgtccacgacagtccagaccgaggcaaggccgcacttggcttggtgctggaacgcttttctctgaaaggccccgaccccattgccaacctgcagcgcatcgccgctggactgccggagccgatgaaccggcaagtgggcaagctggccgacgaatcctcacgggtgatcctggtggaggcgctacgcgagttggagcgccgctgggatgccgatgtctatcgcttctaccgcgagcgcctggccaatcgctatccgttcaacccggccagccgagaggaagcttccctagaagatttcaccgcgttcttcggcccccagggtcggttgcagcagttccgcaacaagtacctgaacctcttcctcgaagaaaacctggaagccctgtactccgagcgccttggtggctacctggtgcgggccgacgtactgacccagttggagtcggccgaccgcatccgcgatgcattcttcaacagtcgtggcctgctgggcgtgcagttctacgtcgagcccctgggactagcgcctaacaagcgcagcagctcgctcagcgtcgaagggcaattggtcacctacaaccacggcccaaccaccagcaccgcgctcatctggccgaacaccctggcacctagcaacgaaagccgcatgaccctcgtcaacgccggcggcagcagtagcggcctggtctatcgcggcccctggtccctctaccgcctgttgagccaggcgcgcctgaatggcgcaaccagcaccagtgtggatatcagtttctccgcgccggacggtggcatgcgctaccgcgtcagcacggagaaggctaacaacccgttcacgcagccgctgttcaagggcttcgtgctgccacacacactgctgcaggatggcctgcgggcacgcgctgattctgatggcaacgccggaaggcgcctgcgcgaggctggataa

SEQ ID NO: 343382 - DNA, 1431 bp, Pseudomonas aeruginosa
atgcagcttccccctctagacctcaaggcattgctggcaccactggatgagcgccagcccgcgggtaccttcaatgaagaggacgaactgctccaggacatcgacctcgagatggtcaaactcggtggtctccaggagcgggccattgattggagcttcgtggacgaggcggcgcggcgatatctgggtaaccagtgcaaacactttcgcatcgccgggcacctgatgacggttcgcctgcgcataggtagctggcgaagctggtccgaggccgcagccgtgctggccggcatggttgagcgttactgggaaacaggacatccaaagcccggagcaactggctatctgaacaagcgccgattggtcgtccagtaccttgagcggctgggcgatgccctgccttctttggacagcaagggctatgccgaggacttctacaaagccggtcagcaggcactcgacagcctccagacaagcgcgccactggccaaactggatgtgtcggaactgagcaagctggaagccaagctgcgccagcatgccgaatccaatcgcgcgcccgagctggccgagcagtccgccgagctgccgacaatgagcgagtcgctgtcggacgccttcttcatgcccatccaggccaatccgggcaatgagcgggaaaaccggcgttcgctgctggcggcagccgagatcatcaaccagcaggatgcctacgacccgaccggctacctgctgcggcggtttgccctatgggcgcacctgacccaggcgccctcgacgcgcaaggacaaccgtacggagttgatggccgttccaccggatgccgcagacggctacggcaaagccttgagcaccaacagcatcgacccggcgctgttgctgagggtagagcgcagcgtcgcatcgtccccttattggctgcgcggcagctatctgtcggcgggcatcgcccgccagttggacatgccgcgggtggctgaggcaattcggcaggctgccgaacgcttcgtcacacgtctgccggccttgaccaagctggagttcgccgatgggcggccattcgtcgacggcgatacccaggcctggctgagcggtgccgaagcgggaacgggtacggctgtagcgggggccggcctggagtatccggttctgcgcgacgagttacgcgctcagctcgaatccggcggtgtggagtcgatgctccgaggcttggagtcgctccagcagagaacgaccgatttgagacatgcctgccacgtcatggccatcgccgccgaattgctcgcctctcgtgggctgagctggctcgccgaaggcttgtttgcccgagcgcacggtgtcatggacggcgcctcggcgcgcgcgtgggagccggagctctacgcactcttggcgcagcacgcgtcggcagttgcagaacgcaaggattaa

SEQ ID NO: 343383 - DNA, 684 bp, Pseudomonas aeruginosa
atgaagctattgagtctgacactgctgtcggctgcggccctgattggctgcgataccagcggcgtagtcgcggcacctggcccgagttgcacccgaattatctcggcggtcgagcggcttgcctgcttcgatgccgaggccggaacgccgccgacaccgcttgagaagcagcctcctgctctccctgtgaccgtcgagcctgtcgtgaaagcgcccgacatctcggtgctggtccatgccaatgaagcgaagcggagtcccgagcagaccgcatctgtaatcagccgtagcgaggatgtgctgcccgggcaggacaaggtggtgatctccgcacctgccctgggcggcgccgcaccacgtccctatctggcaatcagctgcctgtcgaacatctcccggctgcagttgctgacagccgagcccttgccggtgaaccgggtcagcatccggcttctgctcgatggcaggccgatctcacccacccgtccctggcaggtgctggaagacggtacggtgaccgacgctggccgagggcttgtggccatcgagcagctgcgccacctggcccgcccaggccagcagttgcagatcgaaagcgatcacagcccgttcgatggactgcgcttcgatgccagcgcgctggcggggcaaatggcccagcaacgagaggcatgtcactggtga

SEQ ID NO: 343384 - DNA, 1575 bp, Pseudomonas aeruginosa
atggaggcgatggacgttgccaccctgatacgcgagctactccaggctgccgatctggaggccgctgcccagcagttcctcgcgcggctgtgccgctcgcccggcattgaccagggctactgctactggagagagataggctgggatcgcctgttgccagtcgccggccacggcgggccagacagtactctgcccgtcatttcgctaggggagctggacaatccgctggtctacggcctgatgagcaacaggccctgccatgtcgagcgcttgagccgcctggtggatgtcggggctggattcgatgcgctgcgggagcggcttgccggtgccgaggcgatgctggtcttacccattgccggagagagccggaatgccgcgctcggcgtcgctgcaatcatcggtagcgatgccgcgttgaggtcctggcgcgcggatcgagcctggcaggaggtattccggtgccacgagctgatcattggtcggctgcacgcgcagcatggtgaaactgcgcaagcgcagcgtcaaagggccgctgaccagcgacgcgaggtcgagcaaggccgcgcacgcgcctcgcggctgctggccggcggcttcattggtgtgggcgccacggcgaagaagctgcgtgcagagatgctgcgtctggccgactcttccttgtctttactgatcaccggcgaaaccgggtcgggaaaggaccatgcggcctggctgatccaccaggcgtcggcgcggcaaggcaacttcgttccggtcaattgcgcggcgattcccaaggacttgatcgaggcggagttgttcggtgccgtacgcggcgcctataccggcgcccttcagtcgcgcaaaggtttagttgccgaggcggatggcggaacgctgtttctcgatgagatcggcgacatgccattgggcctgcaaggaacgttgttgcgcctgctcaacgagaagaagtaccgacccgtaggggccacccgcgagcaggcatcggacttccgcctgatctgcgccacgcatcggtcactggtggatctggtgaaagagggtgccttcagggaagacctgtacttccgaatacgccagcacaccctgcacatccctgcactgcgtgatcgcgccgaggacatcccggcgctggtggcgcacgtgctgttgcagcacaaccgggagcgccagggttgcgtcgccggaatctcggcaaacgctctggcacgtctgcaggcctacggctttcccggcaatgtgcgagagatgcgcagcctggtactggccgcggcggaacgaaccgagccaggcaggcgtatccgcagctcgctgctgggcgagctggccgacagtcagccgcagaggggctctgtacgagcaagcatggcaggcgtgctgcaagagctagtgcacacggacaacctgcctaaagcgctgttgatggtcgagcgtctgatcgtgaccgagcgactgcgcaaggtcgctgggtcacgccgcagcgcggcattgagtctcggcatcgccaaacgcaccttggcgcgcaaatgcctggagtggaacttggacggagaggattccatcgcatga

SEQ ID NO: 343385 - DNA, 2568 bp, Pseudomonas aeruginosa
atgatcacggttgatctagcagcactattcgaacgcttgagccccttctgccggcaggcgatggaggaagcgggaagcctatgcattggccagcgcggtgcggaggtgaccgttgcgcatctgctcacggcgttcctcgaacagcccgcttgcgatgtccgcgtcaccctggccgacgcgggcctctccgtagatgcggttcggcatgccctgtccagcgccttcgccgaccgcgacgcgggcaacagtcagtacccgtccctctcgccgctgctcgtcgaggtgctgcaagaggcttggctgctcagttcggtggagctggggcagccacatatccgcagcggcgcgatcctcctcgcgaccttgctcaacccggcacgctacctgcccttggcggccatccagttgttcgatggcgtcaatcgggaagcgttgcgaaagcgcttctcggttctgctgtcggcgtcagcggaagcgctagaggcgtcaaccgactcggaggcctcggcggacaagcttggtgaagacagtgccctggccaggttcggccatgacttcactgcgcaggcgcgcgacgggcgaatagatcccgtgctgtgccgcgatgcggagatcgacctgatggtcgacatcctctctcgccggcgcaagaacaatcccatcgtcgtgggcgacgccggcgtcggtaaaagcgcggtggtcgagggcctggccctgcgcatcgtgcagggccgagtgcctgcccccctgcgcatggtcgagctgtgggggctggacctaggcgcactgcaagctggagcgtcggtgaaaggcgaattcgagaagcgcttgaaggcggtgatcgatgaggtcaagggctcctcccgaccgatcattctgttcatcgatgaggcccataccctgataggcgccggtaataccgctggcggcagcgatgccgccaatctgctcaagccggcattggctcgcggcgagctacgcaccatcgctgcgacgacgtggtccgagtacaagaagtacttcgagaaagatccggccctgacgcgtcgcttccaactcgtcaagctggaggagcccacgccggagcaagccgtgcacattctgcgcggcctgcgaccgatctatgaggcatcgcatcaggtgttcatcggtgacgacgcgctgcaggcctccgcaacgctggcggggcgatacctgtcggggcggcaactgccggataaggccatcgatgtgctcgatactgcctgcgcgcgggtggcatccgcgctggctgagccaccgcggcgcctgagcgcgatggagaacgagctcaaccagatcgacgctgaatctgcccaggtggcacgtgacggccgtgccgggcgcgcggtcgctccaggccgccttgaagcgctggccacggcccgcaaagacatagaacagagcgtcgtggagctgcgtcaggcctgggagcggcagaaggcgctggtcgatgagatcgttgcgctgagggcccgcgatgatgttgaaggtctatcgcaggtactggccggcaaggtcgctcaactgagtgaactccagcgggcaggcgccctgttgcatgcggacgtgggcgcggagcagatcgcccaggtgattgccgactggacgggcatccctgccaccaccatcagcagcgaccagatggcgcggctggacagtctgcccgggaatctcaaagggcgggtcaaaggccaggatgctgccctggacgtcgtgtaccggcgcctgctcaccgcattggcggacctgcgccgcccgggcacgccgatgggcgcgttcctgctggtcggccccagcggcgtcggcaagaccgagacggctttggcggtggctgactcgctcttcggcggtgagcaattcctcacgaccatcaacatgtcggagtaccaggagaagttcaccgtgtcccgccttctgggtgcgccgcccggctacgttggctatggcgagggcggcgtgctgaccgaggccatccgcaagcagccgtactccgtggtattgctcgacgaagtggaaaaagcccatccagaagttctgaacgtgttctaccaagccttcgacaaaggcgagctggctgacggcgaaggccgtcgcattgactgccagaacgtgctgttcttcctgacctcgaacctgggcttcgacgaaggcgacaactcgctgaccgacctggacggcgatgcgttgcgccagcggctcatgcgcttcttcaagccggcgcttctggctcggatgcagatcgtcccgtatcgctacctggacgaggaggtgctcaacgagatcatcgacagccggctgcagcggttgcggcagcagttccggcagcgctacgacgccactttggtggtggttgatgcggcgcgggacgagctgcgggcgcgctgcgcacggcatcagaatggggcgcgcatgctcgacgcgagtatcgatggcgagctgctgcctccgctgtcattggccgtgctgcagcgcttgtcccgcggagacaagattcagcgtgcgcaggtgggttggtgcgatggcaagttcgctgcaacgctggattga

SEQ ID NO: 343386 - DNA, 504 bp, Pseudomonas aeruginosa
atggcaaaaaagaatggatcggttgccccaaaggagcgcatcaatatcacctacgttccagcaacgaatggcgaacaagaggaagtcgaactccccttgcgactgctggtgacgggtgatttcctggggcgcgaagaagaaaccgcgctcgaagaccgcattccggtgcgcatcaacaaggacaacttcaacaacgtcatggccgagatgaaacttggcctgaaggaaaacattcccaacgtactttccgagggagcagacgacaccctgcatgtcgacctcaagttccgctccatcgacgacttcagccctgatgccatcgcccgccagattccagagttgaacaagctactcgaactgcgcgaggcactggtcgccctcaaggggccgctgggcaacgtcccggcgttccgcaagcagctgcaaaccatgcttggcgacgagagcgcacgcaacaagctcgccagggaactggaagcggtgctgggtgaaagcgtgagctga

SEQ ID NO: 343387 - DNA, 1482 bp, Pseudomonas aeruginosa
atgacaagagcgcaatccgccgctgtcgaaaagcaagactccctacccgaaggcggcctgctggcccagatcctcgcgcagacgcgcatggagcccagccaggaaggctatgccgtcgcagagcgaggcgtggccgccttcatcgccgaaatgctcaagtcgccggatcgccagcagccggtcaacaagcaactggtcgaccagatgctggcgcagatcgacgccaagctcagcaagcagacggatgtcattctgcacaaccgaaagctccaggcagtggaggccatttggcgttcactcaagttcctgaccgaccgcaccgatttccgcgaaaacaccatcatcgatctgctgcctgtgacgaaagcggagctcctggaggattttgagagcgccagcgacatcacccgtagcggcttgtacaagcacgtctacaccgcgggctacggccagtttggcggtcagccggtgggttacatggtcagcaactacaccttcggtccttcagctccggacatcaagctgctcggctacgtcgcatcgctcggggcaatggcacacgcgccgttcctgggcgcagcaggtcctgaaatgctgaacctggagtccttccaagacctgccgaacctcaaggaggtgaaggacatcttcgaggggccgcgcttcaccaagtggcgaggcctgcgggatgcggaagacgcccgctacctgggtctgaccatgccgcgcttcctgctgcgtcagccctatgaccctctcgaaaacccggtccgcggtttcgactatcgcgagactatcgacggcaatcacgacaactatctctggggcaactcctcgttcgcgctggccagccggatcgtcgacagcttcgccaagtaccgctggtgcccgaacatcatcggcccgcagtctggcggcaccgtcgacgacctgccggtccacctgtacgagtctctcggccagcttcaggccaagatccccaccgaggtgctcgtctctgaccggcgggagttcgagctgtccagcgcgggcttcattccgctgaccatgcgcaaggacagcgacaacgctgccttcttctccgccaactcgattcagcggcccaaggtctttgcaaagacgccggaaggtcaggccgcacagacgaactacatgctcggcacgcagttgccctacatgacgatcatcaaccgtctggcccactacctgaaggtactgcagcgcgaacaaatcggtagctggaaggagcgcccggacttggagcgcgaactcaacaactggatccgccagtacgtcgcagaccaggaaagcccgtcctccgatgtgcgcagccgcaggccactgcgcgccgccaaggtcacggtgcaggacgtcgagggcaatccgggctggtatcaggtttcgctgtcggtccgtccgcacttcaagtacatgggcgccaacttcgagctttcgctcgtcggccgcctcgacaaggagtga

SEQ ID NO: 343388 - DNA, 429 bp, Pseudomonas aeruginosa
atgccgcggtcgccaggacagggaagcttgttcgaacggctcaccccggatctgccgccgcggcgttcgcgcacgcagcagggcctggcgaccgagcgcgttcgagccatcaagaaccatctggaacagttgctcaacacccgtcggggcggctcgcagagcagccccgagctggggctgcccgacatgaacgatgccgcgtcgggtcaattggaattgagaaaccagatctgccaggaaatccgagaagtagtggccctctacgagcctcgggtccaggtcctggacgtccgcgcgctcacgaccagcgagcagccactgggtctgtgcttccggctgcattgtcaggttccaatcaaggatgcctccgagcagatggagatagacctgctggttcaccagcggcaacaacggatccaggtgatgtga

SEQ ID NO: 343389 - DNA, 1767 bp, Pseudomonas aeruginosa
atgccactgaagagcaagttccgggaagaactggattacctgcgccgtctcggccgagtgttcgcacgtaacaatccgcagctggcaaggttcctcggtgacgaggccactgaccccgacgttgaacggctgttggaaggcttcgccttcctgacggccaagctgcgcctgaaaatcgaagatgatttccccgagctgacgcatccgctgctacaactgctgtggcccaactacctgcggccgctgcccagcgccaccatcatgcagtttccgcctgtggaccgcgccatcaccgtccgccagcgcatcccgaaaggaacacgcatccgctcgcgcaacgtcgacggcgtggagtgcgagtaccgcacctgctcagacgtcgagatctacccgttgcagatcggcgaagtcagcgatgcgcatacgctggagaaatctacggtccgcgtggacctcgccacattgagcaagaacccgccaagcacctacgactgcgaccggctggatttctacttgagcggcagtgactacaccgccatgacgctgtacctgtggctctccaagtacctggccgacgttcgcatggagtgcgacggtgtggtcaggcacattcccgccagccagatcctcttcccgggattcaacccggacgacgcattgctgccttacccgaaaaacgccctggacggctaccgcatcctgcaggagtacttccttttcccgcggcggtactttttcttcggcattgccggactgcgcgccctctggccgagccacagcacggaacgcatccggctggaattcaacttcacccgccccatgcctgacgacgtgcgcgtgcacacaggtgacctggcgctgtactgcgcacctgcggtcaatctcttcgagcatgaggctgagccagtgaggttgaccggcaagacggtcgactatcgcctccggccagcaggccagcggcccgatgcgtacgagattttcagcatcgatcgcgtcgacggttggaagaacgaggcctccggccagccaggagcctggctgcgcacctaccaaccgttcgagtcgcttcgccaccagatcgacttcgagcagggcaagaccgtcctctactaccgcacccgtattgacccatcactggtgaactcaggcgtcgagcatcgagtgtccttcgtgcgcagcgacgaacagcgctacgtcgggcgtgaggaaaccgtctccttctcgctcacttgcaccaaccgtgacctgccgctgacgttggcggtgggcgacatctgcgtgcgcacgccaggcatgccgaacttcgtgtcctgccgcaacctgaccaccccgacaccttcttaccgaccggtgctggacggcaacttgcagtggaccctgatatccaacctgtcgcccacctacctgtccctgctgtcggccgcccccttgaaagccgtcatccgtgcctacgacttcgctgctcaccatgacatccagcgcgcacgcgccacgcagatgcgcctggacggccttctggaggtggagactacgcccgtcgatcgcatgttcaaggcgctgcccatccgcggcgtgcgcaccgtggtcaagctcgaccaggacggattctcctgcgagggagacctgtacctcttcggcacggtgctgagccacttcctgtccgtgtacgccagcatctcgtcgttccatgtgctggaagccatcaacgtcaagaatcaggagcactacgcatggccgatacgcagcggcacgcagcccctgatctga

SEQ ID NO: 343390 - DNA, 1020 bp, Pseudomonas aeruginosa
atggccgatacgcagcggcacgcagcccctgatctgaacgaccgcttgctcgacgaggccagggggcacaacttcttctgcctgctcgaacgcctgcacgggctccatggcgacgacctggaatccgaagagccctatgccgccgagcggcagcgcatccgcctgagcaactacgccggcatgggctttcctgcctcggacgtatcgctggcgcagcgtctcgatggtgatctcccacaccagtacctggtgcaggcaaccttcttcggcatgcacggtcccgattcgccgctgccgtcctactacttggaacgtcttgcctacgaggcagggcaaggcgagggcattcgtccggcattcctcgacttcttcaaccatcgtctgctgaccctgctgcaccaggcttggcgcaagtaccgccactacatccggttccgcccaggagcgagcgaccttctgtcccagcgcctcttcgccctggtgggactcaaggacgatgccatccgcggcgccacgcccattgcctggagccgactgctcagcttcgccggtgccgtggttcaccgcagccgctcccccgccatggtggcaggcctgatcgcccactgcttcgacctgccggacgtcgccatccgcgatttcgagttgcgctacaccgacatcgccccggacgaccgcgctcaattggggcgccgaaacggccagttgggcgagagcttccgcatcggcgacagcgtcagaacgcgccactgcaaattcaccatcgtcatcaccaacctatcggagacgcgctttcgcgagtttctgccccagggcgagaacttcgagcggcttcgtatgctggtcgcctacctgctgcgcgaccagaccccttgcgatcttgaactgggactgcgcgagaacgaggtcccccccttcaacctcgggcaggtcaccggctcccatctgggctggaccagcttccttgagcagccggaactgcgcagacctccccgcgttcgactcacggtacgcacatga

SEQ ID NO: 343391 - DNA, 1365 bp, Pseudomonas aeruginosa
atgactacagcaaactcagaatttcgcctgtctctggtcgtggagaacccccaagcgctccagcaaggcagcatgccagggcatagcttcggttccgatggcggcaccatcggttcgcagggggccaactggatcctgctcgaccgcggaggccgcgtgcggccgcaacattgtgaaatccgcttggaggacggcggattcctcatcatcgaccgcagcggcgaaaccgtcgtcaacgaccagacacagccgcttggcctcaatgccagcgccaggttgagaaacggggacaagcttcacgtcggcccataccgcatcggtgttcacctggacaacgagcttcactacctacccgatcccacccgcgctctggccgagcacgaccttagcgagttcacccaaccgcccacggactacctggatgcgctgccggactctgcgccggatgctcccgatgcggggcaccagcaacagcctggctgggctgaattccaggcgctggccgagccaccgccgccacagggcctgctagacccgctcaaggcgctcgacgccacccgaggcggagcagctcggacagacaccgaggtgtccagcctcgaccctcgccactacggacacacgccgctggccgcccaggcagacgtcaccacgacccaattcgaagccgtctacggcacgcccattcacgccccaggaggatctcgcatgttggaacaggacatccagacacccgttgcccgagaatggctacaaagcctgctctccagcagcgcagaccccactagcctggttgagcctctggttgaaggtatcggagcgccggtcgggaccgtcgacgggcaggaaacctatgcactgttgaatgaggtcggacgcacgctcggtgcgctgatacgaggcctgtccgctctgaacgccagccagcctggcgatcagcagcgggtttccctggccgggcgcacgctgcagcccatcgaggacaaccctctgcgcctggggcagagctatccggaaaccgtgcgcgctctgttctccgccaagcgcagcgtcgtccatctgtcgccctcggcggcggtggaggaatcgctggagcagatgcgcaggcagcaggtcgccatgcacaaggccatcaccgccggcctcggtgcgctcctgcaggcattctcgcccgaacagcttcagcagagattccagcgctatcgcagtgcgcagaccggccacccgcaagcagacgactgggcctggcgcatgtacgggcactactacgatgagctaatttccggccgacagcgaggcttcgaaaagctgttctgggaagtcttcgagcaggcgttcgaccaggccctgcgcgcggaggcgtaa

SEQ ID NO: 343392 - DNA, 1020 bp, Pseudomonas aeruginosa
atgaagcacgccatcgcgctcctgtgcgccgcgacactgcttgccggctgcagcaccttgggcgacgtgttcaagaaaacgggccagatcctgatggacccatccattcaggttgggaccgcagaagagcagcccacgcagatcgccctgagcttgtacgccagcgcggacgtcaatcccaatccggtcagccgcccgaccgccgcgccagtcgaggacgtcgagccactgccattggacgtggaagacgacggccccttcgcggtcagcctgcgcagcgcaaacaagggcgagctcgtcgagcatctgcgtgcgctactcggccatctggagaatgaccagacaggttcacccagcgcgctcgccgttcaacagcgctcggccattcccggcctggttgttgacgagcaggcgccccctctgacgttgggcaagacactgccggaaacgctattcaccagcaccgcgacctcgcgcgggccgttccccgcgaactggatgctgcgccagggacaagcgaagcccgtcacagagcaggaccacgggaacgcatccatgcacaaactggacctagggcaatacagccgcggcgcgggcttggcccaggccggagacgctcgcgccacgccgattacggccaccccgattgccttccgggtgatgcagctcaaggacgactccatgctggagaacgtcaaccctgagctgctgcgcatcgaccccaagaaggcgttgggcagcaccctcctggccgcggacgactacaccttggcaccgggccagttcaagttcatcgagttcaccgccatcgacgagaagacccgctacatcgccgtggtggccgacttccacgaccccaatgccgaacgctggcacgacgtcttccgcatcgagccgcgcggacgcaagtatcccctcatggtgatgttgcagaccacccgcgtcgccatcaccgatgaaagctaccggcccgcgcagggcaatttctgcccagccccccaagcgagtacctaccaatga

SEQ ID NO: 343393 - DNA, 1338 bp, Pseudomonas aeruginosa
atgaccacccgcaatcccgttgtctggagcgagggcctcttcgtcaagccccaacatttccagcagaccgccagatacctggagcactacgtcaactcccgccacggcagccggtactggtacggtttctccgagttggagttgaatcaggaattcctcgccttcggcaagattgccatcatccgagcccgtggcgtcatgcccgacggtacgctgttcgacatcccgcatgaccaaccgccgccggagccgctggccatcacgaacgccggtgcggccaatcagaccgtctacctcacgctgcagttgcgctccgacggcactgcccaggtgcgctggcccgacacctacggcaacacacgctacgtcgtgcacacggaggaagtgcgcgatacccacagtcaccagggcaaccacgtcccactggacctggccgttcccaacctgcaattagcgctggagcgcgacgaccgtagcgccttcaccggcctggccctgggccgcatcctcgacctgcgacccgacggcagcctgctgatggacgcggggttctacatcaccggcctgcacctccacgccatccgcccgctggcgcatttcatggaagaaatctcctccctaatgcacgagcgcgccaagagcatcgcccaacgcatcggctcgccgggccagtccggcgtggccgacttcaccgacttcaatctcctgcaggccctcaatcgctggcagcaccagttccgccacatggcccgggacccggacgtgcgccccgtcgaagcctacctggcgtgtggacaagcctgcggcgagctggccacatgcatcgacgaatcacgcctggcccccgagttccccgcctaccagcacgacaatcccaagagcacctttctgatgctggaggaaaccctgcgccgcctcctcggcaccgtgctccagccgcgcgccgtatctctgccactggtcaagcaggcgcacggcatcctcaccgcgcaggtcaacgacaccagcctgatggacagcgccgacttcatcctggccgtgcgcgcgcgcatgccgctggatcagatgcgccacctgttcctgcaacaggccaaggtcgcctcgcagcaatcgctgctggaactcatccgcctgcagctccccggcataccgctcagcccactgccagtagccccgaggcacctgccgttccacgccggcttcacctacttccagctcgatcgcacctcggtcaactggcagaagcttatgccaaagggcaccaacagcttcggcttccacatcagcggcgattaccccgagctgcagctgcagttctgggccatccggagtcaatga

SEQ ID NO: 343394 - DNA, 900 bp, Pseudomonas aeruginosa
atgaacaccactatccaaatcggcaatgaccgcatcgaccgaaacccgccgaagcacggcgcacccgacacgcaggtggaccaaccgccagcggccgcgccgcaggacgacttcctgcgaaccgccccgaacgccgacattcgcgacaaaggcagcatgctctacgactcggtgtttcgcatcgaccaggatgacgacctgcaattccagctgcgcggccacagcctcaaccccttgatagacgccgcccagccgctgctcggcctggtgatacgcctgcgccgccttgaccggtgcgacgacataccgaagctctacgcgagcgtccgcgaccagataaccgccctttccgaggaggtccgccagcttggctacgacggcgccacccagttggcctatcgctacgccctctgcgccttcatcgacgaagccgtcatggccaccgcctggggccaagcctcactgtggcgcgaacgctccctactcagctaccaccacaacgaaacctggggtggcgagaagttcttcaccgtcctggcgcgcatgcagatggacccgacccgttatcgcgacgtgctggaattcaagtacctctgcctgtgcctgggcttccagggcaagtacggccagcagcacaacaacagggacacgctcaacagcatcatcgtcaagctgcaccgcatcctgcgcgtgcagcgcggcgatgcgcccgagcgcctgaccgacggaaccgacaacgtcgcttcccgccgatatcgcctggcgcgccagtggcccctgtggacgccctgggccatcgccgtagtcggggtagcggcagcctacgtctacttttctgtccgattgggcggcaccaccgagcaggtgctccggtcgctggaaaacatcctgaagccctga

SEQ ID NO: 343395 - DNA, 822 bp, Pseudomonas aeruginosa
atgcaagaggatctgcagcaacacagaacgtttatggagcgggccatccaggagatgagcaattctccgggtagcaccaaagtcggggcggtgttggtcgttgacaatgaaattgtcgctacgggcttcaaaagccctagctgccatgcggaacgggccgcaattgaacaggctaaggcgaacggcatcgacctcaagcaggcagtgctctacaccacactcgagccttgcgttcaagtaaaggaaacgcaaacgaaagtctgctgctccaacctgatcctcgatgaaggcatccgtaaagtgttcattgggtacaccgacccgaacccgagagtcttgcgccaggggtggcggagtctgcgcgatagcgcagtggaactacggtattttcccgaggatctgcgcagccgtattgaagcaatagacccctttgttcacgttttcaaccagaacattggcctcactggcaccatgcaggtcgacgtcctcgaacccaagaccgtgacaattcaattctcggaagacgaccctcgaaccatgtcgattcgatggtcctggtcggggaagggcgaggcgtttgcttacagctcagcaggcatcgaagttgctctcgccagggaagcgaaggagttttctgaagtcgacgatccaggagtttttgagtttggtccgcaggctcgcgtaccaattggtggtgtcgtgatatttcgccaccaagacgcctatctgctcgccaaagttatcgaagcgcaggcaggcccctcgtacggggataagcactaccttgtaaagttcaagtacgagatccgtgttagaaactga

SEQ ID NO: 343396 - DNA, 1443 bp, Pseudomonas aeruginosa
atggcagtgaagaagcgtcaggggcagaccagatggtatacggatgccgaggtcatggagccgtcgttccggcttgaagctggtgtgaccgatgagggcgtggagtataaagatctgttcatgcagatcttcgagcaggaatcctcggagccgcgtcggtggcggagcctgcccgagcccgattggcatcacctggcaagggtgtttctgcaaaaaatcatcacctatccggtattcacgaatcctcatgcacagcggtacctgacctcgaggcatggtccgttcagaaccgtcatctacgaaagtagctatggaagagacctgccagatagcgccgcgtcggcggcttactatatcgagcttgcgcttccatggcgcacgtccaacccgtgcacctttggactggggctgaccgcggaactggatgaaatctggcgggggctgtcgagcttcccgaatctcaatgccatcgtcgtggcgcgtgctggtactttgcaggtggacggtaacgcggtccgaattccagaggaggaactccagcgtgtacggcgggcattcgagcggacgaagcgcaagatgcgcgaggttgtgaaacaggccaggtcgacccacatccgcaatgtgctgctggcgcaattggaccctacgcggtttccaccaattgtccaagtcaacccggatggtcaactggtcgaggtcaggctggacaggggaaggcagagccaggaggcagcgcgctccgggcggaaagccacggtgaaagcggtgcgctccaacgtggagacgctggtggccgaagcccccgaggagctcatcgagctacatgccgagattgaacgcgtcaccctggcccagatgattgaaaagtacgaggacatgctccagaaaggcctgccagaaacggcatggcagaaattcttcgagcgcaacatcttcatcctgaccatgatattcgcccgtcccgtcaggctacttcacacccagttccacgcccaaggcggggggctagacggcaccggcgcacagattggggatttcctgctggccgaaaaaagcttcgccatggccatcgtggaaatcaagacgccgggcagccccttgctgcgcggaaaggcctaccgaaacagggaagtgttcgcaccagacgaagacctcagtggcgcagtgtcgcaggtgctgtatcagcagagcaaaatccacgaaaactggctgttccatcgggcacggccagagctccaagactcgcgcccggatgccatcaagtgtgtggtcatcactggcatgttgcccaaggacgaaatgcagcgtcggagcttcgaggtgtttcgcaatgcatgcaagaacgtggaagtcatcaccttcgacgaactgctgggcaaactgcggctgttgtcagagcacctgacgccgcgcgcaacctcagagaatgaactgccattctag

SEQ ID NO: 343397 - DNA, 2046 bp, Pseudomonas aeruginosa
atggccgtccaatccgacctgcgcttcaccttctccgccggcgccgacgcgttcgaagtcgtcgagttccgcctctccgagggtctgtccgagacctttctgttggatgtggagctgagctgcgccaaccccgccatagacttcggccaggtcctcgaccgccccgcactgctcaccatttggcaaggcggccagcccgtgcgctacgtgcatggctcggtgacctcgttccagcagggcaacaccggctttcgccgcacccgctaccgcgccatcgtcgagccgcgcctggcccgcctgcggctcgcctcggactggcgcatcttccagaccctggccgtgcccgacatcgccaaggtgctgctcaagaagcacgccatcaccctggactacgagcagaaggtcaccaacgcccatgccccgcgcgagtactgcgtgcaggccggcgacaccgactaccacttcgtcgaacgcatcatgcgcgaggaaggcttcttctacggcttcctccacaacgccgaaggccatcgcctcatccactgcgaccggctgtggattttcggcaagcaacccggcctgccggtggaatacaaccccatggccggcggcgaccggccgggcccggcgcttcgcagcttcacctacagcgagaacgtacgcaccgcgcgccagacccagcgcgactacaacttcaagaacccgctgtacaaccagcagacccggcgcgaaggcaacgacctggaccaccaggccagcagctacgaacgctacgactaccctggccgctacaagagcgaggtgggcgaggccttcacccaggaccgccttcgcggccaccgcggcgacgcacgccaggccatcgtcgagggcgacgacgcgcggctggtgccgggtatctccttcgacctcattggccacccgcgccgggacatgaaccgcggctggcgccccgtgctcatcgagcaccacggcaagcagtacaccagccaggccgaggaaagcgccgacgccgcccagggcacgcattacagcagtaccgccaccctggtaccggatgacgccgagtggcgggccgagcctatggacaagccgctaatcaccggcccccagcaggccaccgtggtcggcccgccgggcgaggaaatctactgcgacgaattcggccgggtgaaggtgcagttcccgtgggacagggaaggtcgcaacgacgaacacagctcctgctggatacgggtgtcgcagaacatctctggagcgctctggggccacatggccattccgcgcatcggccaggaggtcatcgtcagcaatttcgacggtgacccggaccagcccgtcatcaccggccgaagctacaacgccaaccagcgcccgccctacgagctgccggcgaacaagacgcgcatgaccatcaagagccagactcacaagggcgatggcttcaacgagattcgcttcgaagacgaggctgaccaggaagaagtcttcatccacgcgcagaaagaccagaacaacatcgtcaacaacgacgaaaccaccttcgtcggccacgaccgcagtgagcgcgtggataacgacgaaaccgtctccatcggccacgaccgcaaggaagacgtcggcaacgacgagaccatctccatcggccggcaccgcaaggaagacgtcggcaagaacgagaccatctccatcggccgcaaccgccgcgtcaccatcggcgggcacaagaccgagaccatcaccaagaccaaggccgaatccatcggcctggccaagttcctcaccatcggcgcggcctaccagaccagcgtcggagcggccatgaacaccacggtgggattgagccaatccgagcaggtgggcatcaacaagtcggtcatcgtcggcaagacctacagcaccactgcgggcgaggagttctccctcacggtcggcaaatccagcctggtcctgaaagccgacggcaccgtgctgattaacggcgtgaagttcgacttttcctcgtccgagcacacgcagatatccagcaaggtcgtcgacatcaactag

SEQ ID NO: 343398 - DNA, 1356 bp, Pseudomonas aeruginosa
atgcaatttcgcaacctcacgcccttcggcgcgttgtgcttcagcgcgctggctccagacggtcaggagcatcccgtcatcgccatgaaggtcggctatcgcctcgagccgatggaaggccagcctggccagtgccgtgccgtcgtcatcgacgaagacgcgctgccgctctgcatggccgatacctactacggtgagcccggcatcagctcggtgctggaagaaagcgacctggcgcccttcaagccgtattgcgacgtcatcgttgtcggccacgcgcacgcgccggcagggcggcccgcgcgcacctgggaagccggcctgcgcatcacctccacccggccgaggcaggaattccccgacccgccgctgccacagcggccccccggcgtgcgcctcacggccgacgaactgcgcgaacaccaggctcagctacaggaagcgcgccgccgcaccagcgcacaacgcacgccgctcctgctgctggacaagacccttcgcttcaccggcccgcgcgagttccgtcacggcctggtcggctggcgcctgaccgagcccgagcccgccacccatgtgcccctgcgctgggagcaggccttcggcggcgccagccagattgccaacccacggcacgaggacgaccccgaagcgcccgaatacctgctcaatgaggtctgcttcagcaacccgctgggatgcggctggctggagcatcgccacgagaaactgcactaccagcagaccggcgacatgctcgtgcgcctgccggcgccgcagatagaagcgctggacgagcccatcgagcgcctgctgcgcccgcgtcatcccgcaggcccgctcgatgccccggccatggctgaagtcgccgccgaatacggctacacgcccgccggctttggcgtcgtcggccgcgcctgggcgccgcgactggccctggctggcacctacgaccaggactgggaggacaaccactggccgggccttccccaggacttcgacttcacctactggaacggcgctccgcccgaccagcaggtcgcataccccacgccggacgcacgcatcaccctgttcaacctggtcgacccactgctcagcgctgacggccgctgcgacatccaactgcccggccatcgccccttcgtgctcatgcgcatgaccaacggcgtgatgctgccactgcccatgctcaccgacaccctgcgcatcgacaccgacgccatgaccctgtcgatgactcaccgcatcagcttgccgggctccctcgacatccgcgtgcttgaagcgcgcttcgagaccgaccccgacgctcccatcatccagcgcgctccgcgccacaacggggagcacgcctga

SEQ ID NO: 343399 - DNA, 357 bp, Pseudomonas aeruginosa
atggccgacaacgtaatggcccgcaagcagggcaagtggaccgtcatcagcatcgcgcccgacgtctgcaaaacccccatgggcagcagcatcccgcccgtgccctatccggtcaccgctgacctcgacaccagtaccggcgtggccaccagcgtgcgcgccaacggccacccggtggtcgtctacaagcgcagctacacgcccacgaccatcggcgacgccgccggacgcgccacgggcgtgaagagcggcactgtagaaggcaaatgccacccgctggaacacagcagtaccgtgcgcgccgaagggcgtcacctggtccgccatggcgacctgttctggatgaatgggagttga

SEQ ID NO: 343400 - DNA, 1200 bp, Pseudomonas aeruginosa
atgagcgatgaacccattcaactcgacacgattgtcgtccaatcccgcgaagtgcagctacgcaaggtgcccggcggcccggacaggatgttcgtgcaggccgacggtaccggcaacgttctcgtcgacttcgccgatggcaagaacccatggggcgacattcgggacttgaacgaagcgcagtacgaagagctacgcaaagaggctttccgcaaggaactggcggacctggaggacatccccacctatgccgaactctatccgccaccgggcaagggtggcggcggtgccagcaccacgcccaacggcaatacgcaggggcgtgtgaatggcgaggcgcccgccaccggtaaatctgccgacgactccaatgccgaggtagagagcgaaacgcctgcggaagacgacacaggcgataagatactggacggccttcagactacgctcgatgttgtcggcctgattccaggtgttggtgaaatcgccgaccttgccaacgccggtatcagcctggcacgcggtgacgtcgccggcgctctcctgtctctggcttcggccgttccattcgcgggctggctcggtactgcgggcaaggccgcccgtcgaggcacaaaagctgccaccgaggcttcggaaaaggccgccaaagaggccgcggagcgagcggcaaaggaagctgcggacaaggcagccaaagatgcggcccagaaaaaggccaagcaagaaacggctcgaaagaagaaaaatggcggcaaaaacaaaggcagcaagaagctgaagtgtggtgattacgggaaatacggtgagctcaagaaaaagaatggcgacggaaagttcgaccgggaccatattccgtccaaagcagcactgaaggcacgtgcagagggtttaaaaggtgagaagcttaccaaggctgaagcaaaggcaatcgatagttggggaaactcaatcgcagttccacgacaagcgcacatagacatcagcccaacatatggacaaaattcggccagtgcaatcaaggacgcgaaagaccttgctggctctgctcgtcgagatgttgatgcaatgctcaagaaaattgatgagtacgacgcagacggaggatgtaagaaggcatataaaaaggccgcaaagagggttctgaaagacaatgactggttcgataatgaactagagaaaattcttaaatctcagctatga

SEQ ID NO: 343401 - DNA, 966 bp, Pseudomonas aeruginosa
atgaacgcgacggacatcacatcaatatttggtgtggccagcgatgatgggagagtgagtggcctatttaaggtgctaaacacgctccgtcgtccgcagagacctgacgcatcccattcagcgttctatgattggattttgatccgcaggaagggattggaactggggtttgttgatgaggagttccaactcgccgccagtcgtttccgatgggggcatggaagattgcttctcgcacaagcatatttctattctggcgctgatgatattcagcccttctcaggttgccttccggaaggactagcattctctgacagtcgcaatgatgtgcttgcaaagctctctctttatgagggctctcgtcactcttatattaatgacacgtgggacctggatggctacagacttaccgtgacatacaaggataatgcttcaagcattgatcaagttatatgccgattgctgcctaatcctatcgtgtctagtacacagattgcctatccaaaggtagaaaaaattcataatgcctttggatgttctgtgcacgaccaagcatttatagggctctggtcgagctttttgaaagatggtgattatgactcaatagaaaataatagcgaactcgatttgaatgactcctttggcgcttctctagggttcgccaagagtggcgacggagcgttgtttcgctctataacgttccatcgtaatcgcgatcaagagtctgtgggctggggcggagtattgccacgaggccttgactttgaggatagccccacaactcttttctccaagatttcaagcccgccagcgcagcaagcaaacacaaaattaaccggctattccgtatggcactttgaggaatatactctccacgtcctgtttagcaacgttgataatcgtttggtaagagtcaagatgattgccccaggaacttggaaatgcatggaagattatgatgagtag

SEQ ID NO: 343402 - DNA, 1287 bp, Pseudomonas aeruginosa
atgaccgaaacgcattcatcatgggttgatgaacagacttggaaggcacgctgggagatcgttgagaaactggatggcggcggtcaaggcgaggcgtttcgtgcgcgacgtcggtccgatgggaagatcggatttctcaaggttatcaagtcgaagaacgttgctgagcgccgggctcgcttcttccgcgaggcgaccgcctatgacagctttggtatcgatggtattcctaggctcatagagagcaacgcgcatcgacacgctgacgacagggtcgctccctacattgtgaccgagttcatcgtaggaatcacactgcggtcgtggctcgaatcacaagcatcggtgtcgatcgagacggcggtgacaatcacctcgcgtctactcgatatccttcaggcgtgccatgcacaggggtgtgttcatcgcgacgtaaagcctgacaacatcatccttgaaggcggcaactcggagcgcgtctggttgctcgatttcggcatcagctatcacgatcttgcagacatcgacttccagaccgagcattggcaggaggtcggcaaccgttttttgcggcttccggagttgtcagcaggcagcctatcgaaacaggatcccaggtcggacatctgctttgctgcgggcatccttttctatctgctcacaggcgaccatcctgatgtgcttgaagatagcgagggccgattgccacaccagcgaacgagcgcgattgcgaagatccagcatgcagcttcgtcccgattcgcttgggtccttgctcttttcgacgaggcttttgccactcgcatatccaaccgcttcgccggcgtgcaagcgatgcgtgaacgaatggacaggcttatgcaagatcaaccacctgaatcatcggcggacgaggacctagccgcactccgcgaaatgcttgacacctccgccaaccgccgcctgcaggtagccatcacaaaactcagcgaagcgctgcgtaaggtgcagcaggtcttcgagcaagtccggcaatccatcggtggtagtttgtctattagtcaaaccaactggaccgtcaacggcgaaatcggtcaaaacaccttatgctggtcacgccagggttcggccgattacattctgacggtcacttatgagtttgtgcctgctggcgaggaacttcttctgcgcatgtcgggcgagactgtctatcggaccgaccttaccgagccggtctatggcgatgattttcagaatgcggtccaaacttggcttgctgctcgactccgtaatgttctcagcacataa

SEQ ID NO: 343403 - DNA, 684 bp, Pseudomonas aeruginosa
atgacgcctcgtaggactacccggctgttgctgtggctgggcctgatctgcacgcccctggcgcaggccgtggagattcttcgctgggaccgcctgccattggccgttcctctggtcgtgggacaggagcgcgtgatcttcatcgaccgcaatgtccgggtaggcgtacccatcagcgtggcggaaaaactgcgcgtgcagagcgcaggtggcgcggtgtacctgcgggccagcgaggtttttacgcctttgaacgacgtcgagcattcgtttgcccaggccgaacatctgaaggaggtctttaacgaacttgcccctgaactaatcgacgccgcgattgtggacgtgaccgcgttcaagcgcgatgaattcgtgaatgcagcacgcgtagctcgtgaacaggtttcgtcatcgctctacgatgttccgcgtaagcgtaagaaaccggagtgggccgagtcaggaatgccagacaaggctccgccggtccatgcgtttgtaccggcaaacggcctgaccccagtctcctttcagcattctcatggaaagatgcttatggacggcctgcgtccgaaaatccatcaccatgtgggaggggcttcgcaggcatcggacagcaggatatataccccgactgaacatcttctgacgccgacttggagggaggcgtttgatcctcagtga

SEQ ID NO: 343404 - DNA, 681 bp, Pseudomonas aeruginosa
atgagccgcttccgcaatgaggtcacgcatctgcagtcgcacatccgaacgctgcgcctgggtgcgggggcattgctgctcgtggcactggttatgggggccggatggtggagttccccacgggacctgaccatccacgtgccacccgacctacgctcgggcagcacccgcaagtggtgggaggtgccgccggagtcggtctacgcattcacgttctatgtgtttcagcaactcaaccgttggcccaccgacggcgagaaggactacgagcgcaacctcttcgcgctctctccttacctcacccagtcctgccaggccttcctgaagggcgacctcgactcccgacgcagtcagggcgagctgcgccaacgcgtgcgaggcgtgtatgagatacccggccgtggctatggcgacaacccagccgcgcgggtgcgcgcggtgtcggacaacgattggatcgttacgctggatctcaccgcggacgagtactacggcgcagagcagatcaagcgggcgttcgtccggtacgcgatcaaggttgcccgcatcgacgccgaccctgcgcgtaatccattcggactggtactcgactgctacgaaggcgcaccacaacgtatcgaaattcccacagcagaggcgcccaaacgtggcagttctgcgctccaaggagccactccatga

SEQ ID NO: 343405 - DNA, 396 bp, Pseudomonas aeruginosa
atgtccgaacaccacatggtgcgggcggatggcaccgtggtcttcctgccccaccggctcaaccgccagccggtggtcgttcggggtcttaccgcggacgagctgtggatctgctgcggcctgtccggctcactcgggttgctgctcggcacgccgctgtcgctgctgttttcgacgattgccctcgcaccgactttcatcgtgttgggcattgcgctcggaattttcgtcggcggcggcattctgcgccgccaaaagcgcggacgtcccgatacctggctctaccggcaactgcaatggcaactggtaacgtggccgctgctgggagcctggaccggcggcaacgcgctgattgctcgctcgggctactggaccacgcgcaggagcttgccatga

SEQ ID NO: 343406 - DNA, 234 bp, Pseudomonas aeruginosa
atgaccaacgcacaactgaccgcattccaggccaacagcggcgtcgcacctcaggtcatgtcgacggtgttgctcggcgccgtgctggccgtgctgctgctgtggggcgtctgggcaattcgtaccgcctatgtggggtgggcagagagccgcattaatcaacgccagttcctcggcgtcatcgtccgctttctggcgatgtacgtggtgctgacgtacttcctgctgtcttga

SEQ ID NO: 343407 - DNA, 357 bp, Pseudomonas aeruginosa
atgcctgccactcgaatccactctaccgccagctgcgtgtgcgtggtccttgcctccctgctggcaatggcgagcaacgtagtcgcagcccctcccgcacagcgcgaagacctggcagccgcccaacggcagctcgaagctctggagcgcatcgttgaggatcgttcgacgacagcctcggtcgctcccggcgaacgctattacttcgattacccccgtctgctcgctgatctggcccgagtgcgcgccggtatcgagcaattcctctctccctcccgtgcccaaccgcgcgagccggacgaactgcccggtcggtaccgcgcagagtccccctcccaaccggaggagcgctcatga

SEQ ID NO: 343408 - DNA, 219 bp, Pseudomonas aeruginosa
atgatcgtgactgtacagcacctgcacaccgtgccgacttggactacccggcagggttactgccacggccgtgcgcgggagttcttcaaacgccatgggctggactggatggcgttcttacaggacggcatcgacgccgatctgttgatcgcgactggcgacgcgctcgcgctgaaacttgttgaacacgcacgtcgggaggttgcccatgggcgctaa

SEQ ID NO: 343409 - DNA, 2208 bp, Pseudomonas aeruginosa
atgggcgctaaacccaaggcgcagatcgtcgcctggcggtactacttcgatatccactttgccctgggcaagaaggtcgacgaggtgtgtgcgatacgcgcaagcggcaagaccgcttggaaaggctcgatcacgaccaacggccaggtccgcatcaacgcgccggagctgttcggcggcgacaagggtgagggcggactcgacggcaccctggacgtgctgttcggcgacgaagatcaaggtgtcctgccacgcttggcggcgatgctcggtggccttgtgccggcgttcaggggaatcagcacctgcttctattccggcttggttacatcggttaacccgtatccgaagaagtgggagattctgcgtcgaggcgggaaccgtctgtgggacggcaacccctggtatcccgaaaagcagttcatctggctagcggacggtcagatcaaggcgatgaacccagcccacatcctctacttggtctacaccggccgggacttccgggggctggctcgcacgcggatggacgaagccagttggcgggcggccgctgacacgctgtatgccgagggcgttggcttgtgcttcgagtggacccgctcggacagcttcaagaacttctgcgagacggtcaaatcgcacatcggcgccgaggtctacccgaaccgccagaccggacagatcagcatccggctcctgcgtgacgactacaacgtcgcggacctgccgctgttcgacgaagacagcggcctcttggaaatcacccaggagaagaccagttcgacatcgcttgcgccgagccaattgatcgtcaagtacattgaccagatcgacggggcgcaacgccaggtcatcatcaccaacaacgcggtcgccgcgtcgcagggccgccggtcgtccgaagaaatcgagttcataggtgcgccgaccggcgagctggccggtcgcttcggtgagcgggaaatgcgcctaaagaccgcagggttgaagcgctacaaggccatattcgaccgccgcgcccgcagcctaaaccccggccaaccgttccgcatccgctcgatccggcgcggcatccccgaaaccgtcgtcagggtcggccggatcgaggacaacttcctcggcgacggcaagatcaccctgaccgtcgtccaggatcagttcaatctgcctgcgacaactggcgtggcgccgccgccacctggctggattccgccagaccggacgcctcgggcgatcactgtgcgccgcctgatcgaggcgccatatcgtgagctggccggcgtgattgatcctgcgaatctccagctcctggacgtgtccgcatcgtacctggctgcgctggccgaggcaccgaccagcctgtcgcagagctacaccctgaccgaccgcgtcggcagctctggcgcgttcgttgatcgcggaaccggggattggtgcccgaccggcctgctcgccgccgagctgccgctggcggccggaccgaacgtcgtcacgctgacgaacgctagccggctggaggacgtcactgtcggccaggccgctgtggtggacgacgagatagtccgggtggatgcggtcaactacgccagcggtactgtcaccctggcacgcggctgcgccgataccgtaccagccaagcacctggccggggctcgggtctggttctatgacacgttcgaagcggtggacgagacggtctacagccagggcgtgacgctccaggcccggctgctgaccaacaccagcgagggccagctcgccccggcgctggccgccaccgacagcctgacgctgaccgggcgccaaggtaagccgtacccgcccggccagtttcgcatcaacggcagcgcgtacccggccaaggtctacggggcgttgtctgtgagctgggcgatgcgcgaccggatcggccaggccgaccagttgatcgataccacggtcggcaacatcgggcccgaagatggggcgacggtgacgctccaggtctacagcggcacgacgctgaagcgcacctatgccggcctcacatccagtaactggtcctatccgctggccgaagacgtcgctgacggcccgctccaggacgtgcgcctggtcctgcgcagcgtccgcgacggcatccaatcctggcagcaacacgacatcaccatcgaacgacacggcctgggcttccgcctcggcgaggaactaggaggcgtttccgcatga

SEQ ID NO: 343410 - DNA, 846 bp, Pseudomonas aeruginosa
atgagtcttaccatggggccgaacaccggcctactgatcaacggcgcacccggtgaggggcactacaacgaactgatccgcatgttgcgctgggatgacttcctgcgccaaccggtcgtcaaggggcgcgtcgccacgctgcccacaaccggccaggccgagggggacacgtacattttcaccggctcgggtgccagccagaaccgccttgccagatggtgggcgacgggcgccaccacggcaatttgggagtacatgccgccacggctgggctggcgtgtccaggtcgcaaacgagacaacgccgagtggccaggtcaagacctacgagtattccggcacggcgtgggtcgagctggtgggcggtatgtcggacgcgccgagcgacgggaagcgctacgccaggctgaacaacgcgtgggcaggcttgggggctgctgccgtcgccgatattctcgggacggtctctcaggccggcggtgtgccaactggtgcaatctacgagggcggcagtaacgcgaacgggagttacgtcagactcgcagacggaacgcaaatttgctccagcagccttttaacgtttactgcgggctcaacgtcggtgggtgcgtcttggacattcccggccagctttgtgtcgccgtcgctgatgtttggcaccgttgtcgcatcgggagccggcgcagactatgaccccggcgtcgcggcgaggaacctgggggctgtttacttcaatgcgtcaacaaactctgctgcactggggtttctctgcatctcgtctgcatcgttcacccctggcgcccaaactcgaaataaccgtgctatcgccattgggaggtggttctga

SEQ ID NO: 343411 - DNA, 219 bp, Pseudomonas aeruginosa
atgatcgactggagcatgttgaaatcacccgaagaccatcaggttgagcagcgggaggccatcagagcgcagcgccgccaggcttaccgggacgaggcagacccgctgcgcctggaggccgaatatgacgccatcgcgaccggtacagagctggacctgtcggcctgggtcgaagctgtcaaggcgatcaaagaacgctatccgctcccccagtcctaa

SEQ ID NO: 343412 - DNA, 225 bp, Pseudomonas aeruginosa
atgaacgagatgcttagacggagactgcgggcggagctgctagaggtcggtttcctaaaccagtgctgccttgacctgatggaaaccatggcgtccgaattcagcctctcgcaggatcagcaggaatgcttcgagcaactgagccggttcctgcgggagggcatcggcaagctgaccgctctgtctgagcgggtagccgatggcgatatcgtcgtcctgtgctga

SEQ ID NO: 343413 - DNA, 3189 bp, Pseudomonas aeruginosa
atgaggttgatccagaacgccggccaagaccgagtgatcgatttgctcaacgagcgaatgaaagcggatcaccagctagcctgtgtctcccccgcgctctccttgtttgcattctctgaactggccaaagcccttgctcagctgcgcaaagttcagttgattctgccgtccgatagcgagagcctggaactgctcggcggagaagcagaccgagccgcacgtaatcgcctcactgccagaggcctcgccaaacgatgccacgattggctgaatgccaaggtcgagctgaaacgcgctaattcagttatccctcaagggatcggtttactgagggatgctgccggcacgcccgaccaggtcgtcatgggctccttcgccctgaccaccgatggcctcggtataacgccgggcaaccccatgagcctgatccaggccagcgagtcgcctcaggaggcggcgatgtttgcgccttggttcgataaccaatggcaaaccctgaatgcccgccccggcgacaaaactgaactactgaacgtcctgcgagagattgccgaacagcgctcgccggccacgctgtacaacctggttctccatcagctcttcaaagaaaaggacgatgggctggatgaagaacgcgtggtgaaatccgccaccggcatccgcaatacggtggtgtggaacaaactcttcaaatttcaacgcgatggcgtcgtgggggccatcgacaagctcaaccgctttggcggctgcatcattgccgacagtgtgggcctgggaaaaaccttcgaagcacttgcagtcatcaaataccacgagctacgcaacgaccgagtgcttgtgctgtgcccaaaacggctgcgtgataactggacgctctataaagccaatgaccggcgcaacgtgctggcgtcagatcgtttcaactacgacgtcctcaatcacactgatctgtcgcgcgaggccggactttccggcgacctcgatctgtcccacatcaactggggcaactatgacctggtcgtgatcgacgaatcgcataacttccgcaacaagaaagcaccgcgccaaggccaagaaacacgctacgaccgcctaatgcgcagaatcatccgagagggtgtaaaaacccgagtcctgatgctgtccgccaccccggtcaacaatcgcctggctgacctgcgtaaccagatcgctttcgtgaccgagggcgatgacaacgctctgtttgagcacggcatcagcagcatcgaagccaccactcgcaaagcccagctgcagttcaatcgctggctggatctggacgagcgcgagaagaccccggagcgcctggtcgaaatgcttggcttcgactacttcaccctcctcgacctgctgaccatcgcccgctcgcgtcggcatatcgagaagtactacggcaccaccgaaaccggccgtttccccacacgcctgcccccgatcaacatcaaagctgacgtggatgctgctgggcaatttcgcgccattcgtgaaatcaaccaagagattcgccggctcaacctcgccagctacgcgccgctgcgctacgtcctgcagcacaaacaagcggcttacgacgccaaatacagcaccgagatccgcggtggcgaaagcttcttccgccaggcagaccgcgaggagagcctgatccacctgctgcgcatcaacgtcctcaagcgcatggaaagtgcggtgtcgtcgtttgcgctgacccttgaacgacaactcaatgatgtcgaacgcacgctcgaacgtatcgagcaacacgcccacgaaattgaagaaatcgacatcgccgatgtcgacatcgacgatccagcgttcgaagcactgttggtcggacgcaaggtcaaggtgctgctgagtgacgtcgatctggtgcgttggaagcaagatctgctggaggatcgcaatcgcctggccacgctgctatctgcagcacaacaagtacaaccccagcgtgatgccaaactggcagagctgcgcaagatgctcgctgataagtgccagagcccgatcaatcctggcaatcgcaaggtcatcatcttcactgcctttgccgacacggcgcgctacctgtacgagcagctcgcctcctgggccaatgaaaccttgggtctgcaaacggccttggtcaccggctccggccgtaaccaaaccacgatccccggcctgcgtaccgatctggcatccatactgacgaccttctctccacgctcgaaagagcgtcctgtcgacctgaccgaggaaggcgagctggatctgctgatcgccaccgactgcatttctgaaggccaaaacctgcaggactgcgactggctgatcaactacgacatccactggaacccggtgcggatcatccagcgttttggtcgaatcgaccgtatcggttcacccaaccagcacatccagttggtcaacttctggcccaatatggagctggaggaatacatcaacctggagcaacgcgtcagtggtcgtatggttctgctagacgtatccgccaccggggaagagaacctgatcgaagcgcaatccggcgacgcgatgaacgatctggaataccgccgcaagcagttgctcaagttgcaggatgccgtcatcgatctggaagatctgtccagcggcgtttcgatcaccgacctcaccctcaccgacttccgtatcgacctcgcccaatacctcaaggcccatcccggcgtgttggagaacatgccgctgggtgcctgtgccatcactacaacgcgtgacgaggacataccgcccggcattattttttgcctgcgcgctgagggagaagccgccgacaagatcagcgatggctacccacttgcgccccactacctagtccatgtggtagaagaccaaaccgtgctactgcccttcacccaggccaagcgcattctggatcgcctcaagcgcctggcccttggccgcgaactgcctgatgccaccgctggcaaccgattcgacgaactcaccaagctaggcgaagacatgcgctatgcacaaagcctgctggcagctgcagtgtcatctgtcgccggcaaaagcgaagagcgcgccattgccagcctattcaacccggccggtagccatgcgatgaaaggcgagttcgccggcagcaacgacttcgaagtgatcgccttcatggtcatactgccccaggagtga

SEQ ID NO: 343414 - DNA, 756 bp, Pseudomonas aeruginosa
gtggttgccgaggacatcattgcagccctgcaactgcctgagcaggcacgggtcaatcagcgcgtatcgaaaaagctgctgatcgaaaacctggccccgacagcagcggatcgccagcagatcaatgaaggcattgaagagatccagtgggttgccgcgctaaagcccggcaattgcggcatacccgcttaccgcgacacccaacgtgaatacgtggaagtcgccgtgctgcacctcaccctgcgcccgtcagctcgaccagccaggctcatagaactgctgcaccgcgccgtgcctcacccaaccttgctaatggtcagcacaccggattcggtacaactctccctaagccacaaacgttgggcgcagaaagaagccggcaagaccgtgctcgatggtgaaatcaccaccgctacggtgctgccagccgcccctcagatcaccacagcctttctcgatgcggtcagtctggagcgtcaaccacgtagtgacctgagcgttttttatcagggctggatagataccctgctggccctgcaggcagcgcagcacacgggaagttttcgcacggccaacagcccactcgatgccactgcccgacgccaagccctgcaagcctgcatcgagctgcaagggcagatcgccacattgcgcgcccaggcgcaaaaggctcagcaaattgcccgtcaggtggagctaaacctgcaactgaagcagctacagcaagcgctcagcgaagcccaagccagactgtag

SEQ ID NO: 343415 - DNA, 2028 bp, Pseudomonas aeruginosa
atgaccatgcaaataatcgacgcacagtcgccggaagcgcacagcgccgacctcaaggccgaaaatatcgacaaactcaaagccttgttccctgagctgatcaccgaaggccctaatggcgtggccatcaaccaggatgtgctcaaacagctagtcggcgacgccactgtaaccgacgccgacgaaaagtacggcctgaactggcacggcaagcgcgcagcacgccaactggcgctcacgcccagcactggcacgctactgccctgccccgatgaaagtgtggattgggacaccacacaaaacctgatgatcgagggcgataacctcgaagtgctcaagctgctgcaaaagagctatgcgggcaaggtcaagctgatctatatcgatccgccatacaacactggtgacgactttgtgtatccagataatttcgaagatagtatctctagctatctagaactaaccgggcaagttgagtccggaagaaaaataaccagcaacaccgaagctagcggccgattccatactgcatggttaaacatgctccaccctagactcaagctagccagaaatctgctccaatcagatggctacattgcggttagcataaatgatcgcgagctaagccaccttcgccaaataatgaacgaaattttcggcgaagagaacttcatctctgtattggtctatgacaaaaatagaaaaaacgacgcaaaacttgtatccaacggacatgaatacatggtgatttatggaaaaaataaatcactactaacagagcttgacgtacgactgcgcgccccaaaagaaggcgcagatgaagtaaaagaaatctttgagaaacttagaaaagaactcaatgacgactggaaaaaaattgctgatgaactaaaaaaattctattctacatttagcgaggacgaccctcgactccccctagcaagatttaccaaagttgatgagcgcggcccatatcgagatgacggagatccaagttggcctggcggcggcgggcctcgctatgaagtccctcatatcaaaacaggtaagccatgtaaaattccaagcagggggtgggtatggccaacttacgagcgcatgaaggaagaaattgacgcaggcaatatagcctttgggcaagacgaaacaaccatcccgtcagtacgaagaaatcttttcgagaaaaacgatcaggttatgcgtagcgtgcagttcagctatgctcaaaaagcaagccaagattttgcagaaatttttgatggcaagagcatttttcagaatcctaaaagctacctggacatgaagaagatagttgagtacttctcttcgggtaacgacgtcgttttagatttttttgcaggatcaggtaccaccggacacggcgtaatgcttgcaaacgccgatggcaatcagcgccggcgtttcatacttgtgcagctacccgagccactagatctagaaaacaaagaccagaaaaacgctgcagaattttgtttggaatcaggttttcagatgaaactatctgaaataacgaaagaacgcttacgcagagcagcaatcagagtaaacagtgaatttcctagctatcagggcgattttggcttccgcgtttataaacttgacgtttccaatatccgggcttgggatcaaaatccagaagatattgaacgcagccttcttgatcaccagaatcaccttattgaaggcaggagcgagtccgacattctctacgaactgctgctaaagctcggtctagacctgtgcgtaccgatcgagcaacagcagatcgccggcaaaaccgtacacagcatcggcggtggcgtcctgctggcttgccttgcggagcgaattactcgcgatcaggtggaagacctggctcagggtattgttgcatggcacaaggcacaagccccagccagcgatagcacctgcgtgttccgtgacagcgcatttgccgacgacattgccaaaaccaacttggccgccattctcaaccaggccggcatcaaaaacgtgcggagcctgtaa

SEQ ID NO: 343416 - DNA, 444 bp, Pseudomonas aeruginosa
atggcggtgccagcgcagcccaagatttaccacatctgccatgtggaccgtttaccgtccatcatcgccagcgcttgcttgctgtccgatgcggtactgttgaatcaggcgttgccgggcacgaccatcggcatgaaccatatcaagcagcgtcgcctgcaactggagctggatagccatccgggcctacatgttggagagtgcgtgccgttctatttttgtccacgctcggtgatgctgttcctaatcagccggggacatcaagatcttgcctataacggcggccaagggcctatcgtacatttggaggctgacctgcacgcgactgtacagtgggctaacgcccaagccaggcgctgggcattcacactgtccaatgcaggttcgtactacttcgagtcgagcgcatcggcgtacagtcgcggcaaatttatacgcaggtag

SEQ ID NO: 343417 - DNA, 1053 bp, Pseudomonas aeruginosa
atgatcgaatttaccagcggcgacatcctgcgggatgactccgaagccatcatcaacaccgtgaactgtgtcggtgtaatgggccgtggcattgccttgcagttcaagaatatgtggccggagaacttcaaggcttacgaggcggcctgcaagcgtgaagaggtgcagcctggccggatgttcgtgttcgacaccaaccagctcacgtcgccacgttacatcattaacttccctaccaagcgccactggcgtggcaagagtcgcttgcaggacatagacgcagggctcagcgccctggtggccgagattcaccgccgtggtatccgctctatcgccatcccaccgttgggcagcggtttgggtgggcttgattgggcagaggtgcgcccgcgtattgaagcagccatggccgacctcccggacgtgcacgtgcgcgtctacgaacccaagggcgcccccgctgctgacaccatgcaccacagccgcgatgtaccgagcatgaccgctgggcgcgccgcactagtggaactgatgaatcgctatgtacgtggcctgcttgacccgacgattagcctgctggaagtacacaagctgatgtacttcatgcaggcagcgggcgagccgctgcgcctcaagtacgtccaagccccctatggcccttacgccgagaatcttcgtcacgtactgcgcgcgattgaaggtcacctggtagcgggctatgccgatggcggtgatgcacccgacaagcccctaaccctggtgcctggcgcagtcgatgaagctagtaccttcctggaagcgaatgctgaaacccgcgcacgatttgaccgggtcggagagctggtagaaggctttgaaacgcccttcggcttggagctgcttgcgaccgtgcactggatcgtcaaagagggtgatccggtttccagcgtcgaagtcgcccgcacctacgcctggaacgctcgcaagaagcaattcacgccacgccagatcggtatcgccgtagatgtactggcaagcaaaggctggatcgagcccatagccctgagcgcctga

SEQ ID NO: 343418 - DNA, 3015 bp, Pseudomonas aeruginosa
atgaaactgcacttcgagccggatctcgactatcaactacaggctatcgaagcggtatgcgatctgttccgtggccaggaggcgtgccgtaccgagttcacggtcaccatgaaggcccctgctccggccgaaagcgacccgagcgacgcgccacagcagttcgccctgggcattgccgaatccgacctgggtgttggtaaccgcctgaccctgcttgacgatgaactgcacaagaaccttagggacatccaactgcgcggcgggctcccgccttccggcttgctcacgtcaggcgactttaccgtcgagatggagaccggaactggcaaaacctacgtgtacctgcgcagcatctttgaactgaataaacgctacggctttaccaagttcgtcatcgtggtgccgtcggttgcgatcaaggaaggcgtctacaagtccctgcagatcaccgaggagcacttcaaaagcctttatgccggcgtgccctacgactacttcctgtacgactcgaacaagctcggcgaagtacgcaactttgcgaccagttcaaccatccagatcatggtggtgaccgtaggcgcgatcaacaagaaggacgtcaacaacctctacaaggacagcgaaaagaccggcggcgagaagcccatcgacctgatcaaggcaactcgcccgatcctgattgtcgacgagccgcagagcgtcgatggcggccttaaaggagccggcaagaccgcattggatgccatgaacccgctgtgcaccctgcgctattccgcgacccacatagacaagcatcacatggtctaccggctggacgcggtggacgcctacgagcgccgcctggtcaagcagatcgaggtggcctcggcaacgattgaggatgcccacaacaaaccgtttgtgcggctggtggcggtcagcaacaagcgcggcacgatttcagccaaggtcgagttggatgttggtactgccacaggcggcgtatccacccaagaggtcacgctctacgacggcgacgatctggaacaggcaaccaagcgcgccgtctataaagaccttcgaattggcgagatcaacaccgccaaaggcgaggagttcgttgagctgcgctccccaggtggcgagaagtatttgcgcatcggtgaaatccacggtggcgtggaaccgttggcgattcagcgcgaaatgatccgccgcacgatcaaggaacacctggacaaggaaaagcgcttccgccccatgggcatcaaggtgctgtcgctatttttcatcgatacggtcgagcgttaccgccagtacgacgctgacggcaatccagtgaaaggcgtgtacgcgaccatcttcgaagaagaatacaaacgtttcgccaagcacccggactaccaaagcctattcagcgaggtcgacttcaaccacagcgctgaagaagtgcataacggctacttctccatcgacaaaaagggtggttggtctgacaccgctgagaataacgccggcaaccgagagaacgctgagcgcgcctataacctgatcatgaaggacaaggaaaagctgctcagcttcagcacaccgctgaagttcatcttttcccactcggcactcaaggaaggctgggacaaccccaacgtgttccagatctgcacgctgcgtgacattcaatccgagcgtgagcgccgacagaccattggccgcggcctgcgcctgtgcgtcaaccaaaacggcgatcgggttcgtggcttcgaggtgaacaccctcaccgtgattgccactgagagctatgaagccttcgctgaaaatctgcagaaagagattgaagaagacacgggcattcgcttcggcatcgtcgaggaacaccagttcgcggctgttgccatcaccagcgcagatggcgagtccaaaccacttggctttgagcagtcgaaagtactctgggatttcctgaaagctcagcagtacgtggatgccaagggcaaggtgcaagactcgctgaagcaggcactcaaagatggcctgctacaactcccccccgagttcgacgcgcagcgctcacaaatagttgagttgttgaagaaagtctctggacgcctggagatcaaaaacgctgatgagcgccgtgccgtcccgactcgccaagccgtgttgcaaagcgaagagttcaaagccctttgggatcggatcaagcatcagacgacctatcgcgttgacttcaacaacgaacagctgatcaccgactgcatcgacaatctgcagaaagcgccagcagtgttccgccctcgcctgcaatggcgcaaagcggatctagccatcggcaagtcgggcgtggaagccaatgagaaaaaaggtgcttacaccgtcaccctggacgagagcgatatcgagctgccggacattctgaccgacctgcaggatcgcacacagctcactcgccgcacccttgtgcgcatcctcactgagagcaaacgcctagatgacttcaagcgtaacccccagcagttcattgaactggccggcgaaatcatcaaccgctgcaagcgcctggcgttggtcgacggcatcaagtacgtgaaactgggcgacgacagtttctacgctcaggagctgttcgagcagcaggagctgactggctacctgaaaaacatgctgctcaacaccgagaaatccgtctacgagcatgtagtgtacgactcagccatcgaacgcgacttcgcccaagcgctggagcacaacgatgccgtgaaggtttacgcaaagctgccaggctggttccgtatccccaccccgctcggcagctataatcctgactgggcaatactggtagagcaagacggcgccgaacgcttgtacttcgtggtggaaaccaagagcagcctgttcaatgatgacctgcgccctgtggaggaagcgaaaatcaaatgcgggactgcccacttcgaggttctcgcggcggacggggccagcgttcgcttcggtcgagcaagcaacgtcgatcaagttattgcgggcgggctggattag

SEQ ID NO: 343419 - DNA, 1902 bp, Pseudomonas aeruginosa
atgacgatgcaacccctctggtatttgcctctcagtaatgaatttagcaagagcttggtcagtggtggagcgctgggtgtcgagcagttaagcaagtatgagctggcagcgatagtctatctattgcagctgcccaagctagcgagtcaatctagatcccccctagatatggagcgcatttttgccgggttactggtgcacccgagtgatctcctggcatcagcgctaaccaattcttatagtcgcgatgcctttgtggctggcttactgcttgcctctaccgtgggtattggcctaattgatgcgagtgcggtggcgcagcgccaatacgttcatggtgacggctcatggaatttcgatttctccagagcctatgcacctccgcctcatattgcaaagtacgaacacattcggcctggtgggcagcttatccgcttgagtgatccgcagcatcggctaatcgaaaccattcgtgccaaccgtgaggactcaattgaaacccaggcgtatgctggctcgggtaagaccttcgttttgaaggagatcgtgactatattgcatgataagaagtgtctctttcttgctgatgcagacagcaagctttggtcggtcaggaaaaagtttcctaaagaaaaaattaaaactctaacgtttttcaatttggcctgtcggattttgtcccatggtagtccactgctagatgcgaagataagagcggccgccagtcggaatttttctgatgagagcgtggctgaacgcctaaatatttcttccttgggcagcttaagtggtcagcaggtagtacgcgtgttgcgtccagcaatacaaaaattctgcctctccaaagaaattgaagtgagtgctaagcacttacccacttcattgttggcgtctctctctcccgcacaacagaagctattgattgcggttgctaatcagctttgggctgcaatgatcgatcttgatcgacaagacttggccattccggtcaatggttggcatcgcctgaagcagatagccctgatagggctaaatatcccggcttcagttgatgtcgtgatcattgatgaagggcacgacctgataagccccctggttgaaattcttgatcgctcgccgcaagtggtgattaccttgggggatcaattccagaacctccaaggccgttacgtatctcacgccgcaaagattcgtcaccgagaaatgacactctccttgcgggcgggcccccagattgccgactacctaaatccacttatcgacatctttccagacgcgcgggttgagccattcattggcaacgtcgagaaagaaactctcactgcggaataccgagcagatcagtttccagaagagccatctacaatcttgacagcagatgagtggggcgtgttcgattggctgattcgcaatcgacgattaggtgcgggggctgcggtagctagcagcgttaacctcggaacttttctgcaggactgtctcggtctttacactggcctgtctgccccgcagcactcccggcttgtacgctatcgttcctggggggagctgcgttccaagatgttctggaaccaagcttttttacgtgtagaggaatggctggaaaaggtcggcacgaagtttggagtttcaggcttggttaacagagccgagctggatgaactcggtggtggtattccttgccggcatttgattgctactgtagcgtctacaaagaattttgagctaccaagggtagcgatttccgaagatctatattacttcgaagatttacgcgggaaacgtgaaatgtcgcgaaagctagcgctactctataccgccattacgcgctgctccgggaagatatactttccgagtacgcatggcgactggatcaattgtattgtgcagtccaggcactga

SEQ ID NO: 343420 - DNA, 273 bp, Pseudomonas aeruginosa
atgggctgcggcatactgctccgcggcctgctgccgtccccgatccacagcctgcgcggcatcccgggcgcgctgttcgccggccacgcgcagcgcggcaacctgccggacctgctccgccactgcggactccaactctccccgggaggcacggcaggcagccagatccgcgctcgcggcatccaactgcggccggtagtgccgcgcgccgatccagacaccgccagcggtgccgaggccgaccagaagcaggcaggccagcgcgaccgataa

SEQ ID NO: 343421 - DNA, 1053 bp, Pseudomonas aeruginosa
atgcctataatccgcccctgccaaacggacacggaaggggtggatgtgaattttcaagctattcaggcgcttaggggtatcgcagcagtcttggtgctcctgcttcatgctcgcatcgctgtgtggtgggcaaaggacctgtggcatatcccattcgtcagttcgcatgggatggtcggcgtcagtctgttcttttgtatttctggcttcatcatcgctcacgtggtgtcgcgcaacagctttgagccagttagctttatggttaagcgcatctggcgcatagtgcctatctactggatagttaccacgttggctctggttttttggtacacaagtcgcttctggcgagcagatatggacagactaggtcttattggtgtgctaaaaagctatctaatatttcctcagtctggattccctctagtaaatccaggctggtcccttgagcatgaaattattttctatgtgctcgcggcacttattgttccgtttgccaggctcccaggcctatttttagttttgatagggttgtgggtgtgtgggattttctataaagggtgggactaccatctgttttcttatgctcaactttactttgcttttgggatagttgcttattggtctcgagggttggcggttaagtttttggctccagttgctctagtctctgtacctcttgccatctgctcaatgtacaaagttataaatatcagtcccactgaaaatgttgttcttactgctgtaggatgttcgtctctaatagctactctggtttcaatggagagcaatggtcttaagtttcctaaatggctagtgtctatcggtgatgcttcatattcaatctatattgtccactggatcgtacttccgtgggttggttttgtcgcctatagagtaggagggtccatggaagcgtggcgatggatcgcgttttgcgtttgcatgcttgtgggctttgctagtcgtaaatatctagaagttccgctgatgaacgtgaaattcatacacaggattggaagaaggcgaagggctccggagagcgcagcagcctga

SEQ ID NO: 343422 - DNA, 1983 bp, Pseudomonas aeruginosa
atgcgctacgacactatgaacgaagtcggccctgacggttcgagttcccccttcgatctgcatgacaacgctggcaacatcgatgtctgggcgaacgataggacgaaaatctcctggcctgaccgtctcggtgtgcagcggaagaccgtcttcggcatggagcagcaggtcaacgactttctcgccgcccagggctacgagccggtgccgctggagtacgtcgacggctcaccgctgaccgtagatcgtccgacccaactcatcgagcgtgatggcaacctctacagcgtcaagctgcctgcatcgttccccgtaactcttaccggcaactggtccaccgaccagaatttactggtcacccaggtcgaccgctcgctgcgtcagcaactggctgacccgcttgacccgaccgctggcgcagctctggttgcgcgcgcatcccggcacctcagcgacctgactggcctgatcggcctgatcggtcgatatgcaggtgacatggtccagacagcggcatactggggtggatggtccgtctatgccgatggtccggtcggcggaggcacttacgtatgggacccggcgcgccctcggtccgaacacaacgcgggaaacgtcatcagcccgaccgtgccctgggatgggcaggagtcttcgttcgcagcgtacatcgcaaagaccggagaaaccgaaccatctgcccttggttgctgggttcttgttccggagcacggccgcgagttcaacgttttgcagtggggtgcgaagaacaatgcaactatcgacggtgcaaacgacgcaatgattcagcctctcctcaactatgtcgaaggcgccaagtctggagggttcggcggggttgtgaactttcccaagggaacatatcgttttaatacgtactttaatgtacgggataggaccgcgatacgtggcgagggtacgcatgcaacaattattcagtttcctggctcagttgtcggtaattgcattacattaggtccaactggacccaatcatccaatcaaccctaatggtcattgggtgtttggagccaggctggaaaatttagcaatttcctgctctaacgtatacaaaggaagcgagcgctctgtggtctacactgatggggcgcatgagcatagtggtttgtttaatgttgtagtgcgggactttacttcgtggggtgttaactataacaccggtaatgggggtcctgctctattcgaggttagcgactgcgagttttatctttcaggaactgcgccatcgactggaaccaagcgaggcatagtaagtaatgctggtggtgctatattcctaatgcggcatgttacgatcacaggtgcacccgcaaataagctagatcagggtgttgtgatgctgaaggacaatcttgtggctcaagggctgcactttgaaaactccggatcaggaatcagcctgtctcagaatgatccagcaaatcctagagttaattctatagtcggagttaccggcaacgctaccgtttcatctggcggacttgtcgatatctctagttcttttgaaggttctgttcaggtttccgcagttgtaaataaatcaatatcgaccaccggtctgataacacttattaatagaagggtaaatgatagatatttggatgcgccggtatcctcgtactcgtatccaagtgcatactctcccggcgaggcaatcagtcagggcagagttaatgtttctggtgcagtcgcaactgttgctaagtctgtaggtgtttcgtttactgcaagcaggacaggagtcggagtcgtgcgtatcacgctctcagcagcaatgaatgataccgattacacagtaactccaagcgctcgcccgtccggtggtggagcgatgttcgttgagttccttccgatcagcactacagcgttcgatataaaaacctacaaccaggcagggaccgcgactgacccagcttcgatctggttcaccctgcttcgatag

SEQ ID NO: 343423 - DNA, 2730 bp, Pseudomonas aeruginosa
atgaccgtcgaattctaccccaacaagttgagcgacactgcgccactgggaacatggaagaccagtcggcgtatgaccatcgaggaatggctgaaatcccaggccgcttcctacgagcgccgggagagtccgcccatcagcgctgtcctgaacgacgaggtcatcgagcagcgattctggcacaaggtctccttcaagccgaaggatctgctccagatctaccgagagcccaagggttcggatccgttctcgatcacttttgccctgttcaagggcgggaaggcggtgctcaaggcgctgatgcccaagatgccagggatgccatcgatgggcggaacccagcagggcgatccgctcaccgaggccagcgccaaggggaacaaggtcaagctcggggacgtggttcggcagatcgccgggtatcagcggacctatccgtcctatctggcgcagccgcggcgctatttcgagggtccgcgcgatcagcgcgtagagatgctgctctatgtcggcgaaggcgactacgacatcccggcaagcaagatccgcgtcgggcaaaccccgctgatatcgctcggcgatgatgccgagtacgcgatctacccgccaggtgcagacctgtcagcagactcggcccacatcaactggttcaacgttcccgaagttggggctagctctaacggatcggcaggcctggaactgaccgttgcaacaacgttgacgcagtatgccaacgcagccgtttatcagttctcgggtgacaccatcagcatcccatccggatcaggggcattcccatctgattggtcgaccggcctgatcattcgcgttgtggcgccgtactcgtatgaggccgtagatggcggtgcgagccgggacatcatcaaaggcccgctggagatgctgaatccctctcccggaatggagattgaggttgcagggagtaacgccggctattacgtcgtcaacagctacacgcccgctgccggcggagacccggcagagatgaccctgaactatgacggagggtcgcctgttgtcgggcttaccccaggaacaggtcaggcgagcatcggtcctcgcggcctgcgctaccgcataaccgcgttcagcgaaagcctgatgaccctggagcgcctggcatccgacggttcgacggatgaggactggcctgggttcgacaccatgcagtccgtagtggcgatcatttctctcgatgcctccaacctggagggaggctaccgtggcccattcgcgtgctgcccagagggcgagaaggtaaccgagattgagtactcggtgtatttcccgaacgggctgtgcggtatcggccgagaagggcagatctacgcgatcccgtcattccataccattgagtatcgcgatatggatgtcgctgggccatggactgtgatcgagaagtctcatagcgggtcatccctgaatgcgcagggctttaccagccacattgtgcttccgtacccgatgcgagcagaggccagaatcaagaagcgcttcgtgcaactccccggacgggcaaacgaggaggctcgcgatgacgcctattggtacgacctgcgcgggaagatggtcagttctccgacgagctatccaggcctgacagtgatgacatgccggattcgcggcggtgatcgattgtccgcgcagtccgagagccagatcagcgtcgaggctacccggatactgccgatctacagcaacggcgcatggctgccggcggcaccgacgcgcgatatcgttccatggtgcctgtatcagttgaagcagcgcgggtacaccgatgacgacttcgacctcccggagtggactgccttccacaacacctgcgttgctcgcggcgacacctacgacgagacgctggactcggcaatcaccgtgaaggaaatggtgaataacgcgctggcctgcggtttcggtgaactggtggtgtaccgcgggctactgcgaccggtgcgcgatgaggcaagggctgtcttcgactcgacctacgggccgaaaactcagacctactcgccgcagaacatgaccaggatgctggagatcagcgggtcgatgccgtcgatcaatgatttcgacggtgtggatatcgagtacttctcaagcaagacctgggcatgggagacggtggagtgccgctggcctggcgacctcgggctgaaggtcgagaaagttcgggttcggggcgtcagcgacgaaacgcgcgcctggcgaatcggcatgcgccgtcgaggacaccagaagtaccgcactgatatctacagttgggggaccgagcttgatggcggcaacagtggttacctgacgttcgctgcggtaggtgatgactcgccgaagcgctgccagagcgcgatcctgctcggcttcgagataaccggctcaggcacgctgttgaagtcatctgagccgctggacttcagtgccggcggggctcactggatcggcgtgcgccggctggacggcaagctctccggcccgtgggttgccacacaggttgacgcctacacggtcagggtcgcagcgctcgatttcacgccgatcattggtggccggcttgagcagccccatatccttttcggccccgccaacaggtgggcatacccagtgcttgtaaccagttctgatcctgcaaatgggacattctcaatgaagggaatgccctacgacgcccgcgtctacacctacgacgaccagcaatacacaccggcctaa

SEQ ID NO: 343424 - DNA, 363 bp, Pseudomonas aeruginosa
atgcgcgccccgtatcgcgagggcgcacgaggccctattgcgtacgactgctgggggctgtgcatcgctgtgcgtcatgaggtgttcggcctgccgttactgcccagcctaggcgctgtgggaaaaaacaagatcaaggccaacaccgaggcctatcacgaccttcgccaggggatggaagagtgcggtccagagcctggggctattgctgccgtgttccgcggcgccctatgcctgcacgtcggcgttgtggtggaaagcgaaggtcgactgaaggtgctggacacaaatcccggcggcgcttgcctccggacaactggcgaattcgaggccgcgtatccaagggtggtgtattaccgatga

SEQ ID NO: 343425 - DNA, 480 bp, Pseudomonas aeruginosa
atgagcctgattgaggagtgctatgcctctggcaagggcgaactggtcgatacgatcgaggcgcgggaggagggtagctcaatctcgcacctctattgttcaggctaccaggatcgaacctgcacgaccgaggacggaagaactctgaccttcactgccatggcaatggatatggctcttccagccaacgacaacagcgctttccagaacctggtgataggcctggacaatgttacaggagaggtccaggaggtcgttgaagcgtcgaaggcgaacggaaacagggttgtcgtgacattccgcagatatctggcggaagacctcagcttcccggctgagcgataccgcatgaccgtcctcagtcgagagtacaaggacgcgattgccaggctgacctgcggtttcttcgaccttctgaacaccaatggcaatcgccgcgtcctgaccacctccctggcccccggcctgaagtacctctag

SEQ ID NO: 343426 - DNA, 456 bp, Pseudomonas aeruginosa
atgatgatcgaatatccagcagagctgccacttcccttacaggatggctatggatacagcaccgtcgatcctatgcggtcaaccacaatggttaccggccggcgacggtatcggacggtgcacagctatgtcccttccaccctgacgctcaacttcaacttcagttgggatcaagcggcgttcttcgatgcctggtatgccaggacactgaacaatggcaacgagtggttcgagatgccgttgcagcttcagccagggtttcagaagtaccagttgcacttcaccgggatctacagccggaccgaacttgtgcaggtaagcaggtggcgctactcgttcgaggctgagctgagggagcgcccgttgatcccggatggatgggagcaattcccggaatactggttcaacaagaacgtcatcgatgtcaccgcaaacagggagtggcctgaagcatga

SEQ ID NO: 343427 - DNA, 174 bp, Pseudomonas aeruginosa
atgaagatcagaccaaaggctgcgcccgcaagcctgaaagcagacgggcgcgactactcgcgcctagttcttgcggcattcaactggatcaacgaagacgatgaagccgagcggctcgtagagctgaatagcaggaaacgcgaagtgaatgagaacgcaaagaagcggttttga

SEQ ID NO: 343428 - DNA, 219 bp, Pseudomonas aeruginosa
atgattggcaccgtacagaaaacccagtcactggtcctgcacagtcgcatcggctcagcagatggcggaaagcactcctacaccatgatggtgaccgagccactgcggacgccgatggtcgtccgagacgacggcaagaccttcatgctgacgtggaacgacctgttggacctggcgcgctctgcgtttgcagaggatgacgcggtaaagcaggaataa

SEQ ID NO: 343429 - DNA, 162 bp, Pseudomonas aeruginosa
atgaactggcatatcacctacggctcggtttgcagcggcatcgaggctgcggacttacatgatgctgtactcagactaccgtgcacgaagcgcccggggatgggctatttacgcgtagccgagctgatttttgatgcgcggcaccacgaggtgaagcgctga

SEQ ID NO: 343430 - DNA, 288 bp, Pseudomonas aeruginosa
gtgccaataatcaagattgaaaccgtgaagctcaaaatcgggtccggtgacgctgcatacatcactggtattgacactacgagcacggactgcctggaaggctatgtgcattttctctctggcgatcaggttcaagtgttctgggataccgagggcaatgcccgtgatcacgaccactcgttccggctgtcagaggaatccaaggactccgcggagttcgacgccttgaaagagtcagcgcttcacctcgtggtgccgcgcatcaaaaatcagctcggctacgcgtaa

SEQ ID NO: 343431 - DNA, 1911 bp, Pseudomonas aeruginosa
atgatcaagcgcactctctaccacttccacttctgctgcggcctgggcggcggtgccgccggtttcaaccgggcgcgcccgcgggtcggcaacgtcgaggccgaatgggtctgcctcggcgggatcgacgtggacccggccggattgcgcgacttcgagcgcctggccggtgtcccgggcaccctgctggacctcttcacccgcgaccagtacgtgcggttccacggcaaggagccgccggcaggctggcgtgaggccacccccgaggatgtgcgccgcgccgcccagggcaagcgcccggacgcggtgttcatctccagcccctgcaagggcgcctctggcctcctctccgagaagatgagcctgaccccgaagtaccaggcgctgaacgagttgacgctgcgctgcatctggctcatgggcgaagcctgggccgatgacccggtgcccctgatcgtcttcgagaacgtcccgcgcctggccagccgcggtcggcacctgctggaccagatcaacagcctgctcggtggcttcggctacgccgtggcggaaaccactcacgactgcggcgaactcggcggcctggcgcagtcccggaagcgcttcctgcttgtcgcgcggcacgtcgaaaaagtgccccccttcctgtacgagccagagaagaagtcgctccgcgccgtcggcgacatactcggccgcatgccgctgcccggcgacatcgatgttgcaggcccgatgcaccgcgtgccgtccctgcagtggaagacctgggtgcgcctcgctctggtgcgagccggcagcgactggcgcagtttgaacgacctcgccgtcgaggacggctacctgcgcgatctgatcatcgtgccggaatatcaggccggctacatgggcgttcacggttggaacgacagcatgggcaccatcgctggtcgtagcgggcccacgaacggggcgttctcggtagcggacccgcgcgcgccggcgaacgccctgcagtatcagcagtacggcgtccgccgctggaccgacacatccggcgccatcatcggcgtcaagtcgcccggccagggcacgtactccgtcgccgatccgcgcgggcagagcttcggtaagtacccggtcactgactgggacggtccgtccggcaccgtgatcgccgccagcaccaccggccagggcgctttcgccgttgctgatccgcgcccaggcggcgtccggcacaacaacgtgtttcgcgtcgtcagcatgaaccagcacgccggaaccgtcaccggcgggcactcacccagctccggcggccaggctgttgccgaccccaggtaccacaactggcacccaggggcgagcagccgcaaattgcacgtcggcgagtggggaagcgctaccggcacggtcaccggctcccagcaggtggccagcggcgcgctgtcgatcgctgatccgcgcgtgctcgatcgcaccaagggcgacgcctacctgaccggcgggcactacggtgtcgtagggttcgaccagtccgcgggcgcggtgtcggccagtgctcggcacgacaatggcaggtggagcgtcgccgacccgcgcatgccggcggcgaacgaccggctgacctgcatcatccagtcgctggacggcacttggcaccggcccttcaccacccttgagctcgccgccctgcagagcttggtcgaccccgaagagcagttggtcctcgacgggctgagcgacagcgactggcgcgagcgcatcggcaacgccgtaccaccggccgcggccgaagccatcgccggcgtgatgggcaccaccctgctgctggccgagcagggcgaaaccttcatgctcagcaatacgccgatctgggtgcgcccggttgcggtggcgctgagcgtcgcgcaacaggaggcgcaaccgtga

SEQ ID NO: 343432 - DNA, 762 bp, Pseudomonas aeruginosa
atgaccagatccaatgcgctgctggtgcagagcgaggccgaactctgcgcggcgttcatcgacgagttcaaccgagtccccggctggacctgctacccggagactgccgggttcgacatcctggtggtccatgaggaaggccggcagatcggcgtcgaggccaaattgcagttgaacgccaaggtggccgaccagatcctgccccagcactggcaggaccggtacggggcgcccgggccagatcaccgcatggtcattgtcgggcggatcaccgaggccagccagggaatcgcgcgcctgcttgaaatgtgcggcatcgcagtgctcgcgccgtcccgcggacaccgtcggcgcgacggcaagttcgtcgacttccccgagttccacttgcgccactggctccagcacttgagcgggccgcaactgttcgactggaaccccgctgaacgctgccacgtcccgatcgtggtccccgacgtgcccgccggcgttccggcgccgctgcgactcacccaatggaaggaaggcgcgctgaaggtgatcgccacgctacgccgccagggcttcatcaccacgaagcagatcgccgaatgcggcgtcagcgcgacgaactggacacgatcctggctcgacaagggcgccgagcgcggcacctgggttgagtctgcccgcatgccagcgttcgaccagcagcaccccgaggccttcaccaagatccagcaggcgctggacaagagcgcccagcccaccctcttcacctga

SEQ ID NO: 343433 - DNA, 1068 bp, Pseudomonas aeruginosa
atggctatcaaaaatctcgcgtacacaacgaagcaacagcttgagtcggcgactcatctggcatttcgtcattcccacgtcatcgagctactggcggctagctttgggttcaagtccagcgcggcgttggcggcaaatcacgtcatcgtgaatttgtgcaatgccgttgagcctcgcccagacgacctactagtactccaatcacggctagtggctctgggttatcaggcggcagctgatgttgctgggaacgtgcttctacagatactcagagagcatcggcttggcgccgctgcaatcgagcgagtcccagatctgcttgatggtgcttgctgggagtccgaagacgtcgagtggggagatgaggacgacgagccctacgaggatttcatgtctgccatcgatctcgatgggactgagctgttgatggaagggcttgaagcggcggctcgacgaggaaatgcgtctgcgcatttcgcgttggcacatatatatagaagggatgagcattctgaccttgaaggatcagagtattggtactccctcttgaaacaggggcgtccccttcagggtatcgagttggaatgggccctggcctacgagcgcgagagaatgcaggcggagcgtcatgcgtatcatctggccgaggctgccaaattggggcatcgggccgctcgattagctagagctgttaacggcgcccacaatgctgaaggcgaggaggattttgaagaagctaagcagtgttatctggaagctgctgagctgggcgatgtcgaggcgatgctggagctgatcgaggtctatgatcaggagaacacgaagcagaattggatctgggtgtacctttcggcgcgcttgggagaggacctgcgggaaagctctttgcgtgtctatcacgacggcggcatgttcgcagacgaagactacgatgacgaccaaggtggtccgatgtatgttgcaggacatgagggtatcgagcttgagccgctgagcgccgcagaggatgctgaagcgaggcgtctcgcggacgagtatttcagccgcatcgatcccgccggcaggtag

SEQ ID NO: 343434 - DNA, 1299 bp, Pseudomonas aeruginosa
atgtctgacgttatcgtgagccatagttttcatccggtgggccaggggctatttagcaccgggatgatttattctccgggtcgtgaggggcccttgtttgtttggatttatgactgtggtaccacttcttcgcagtcatacctggatgacgcgttgcacaggttctcgacggtccagcatgtagacctcgttaccatttcgcattttgacaaggaccacatcagtggcatggtcaagctgcttatgagggtctcggtcgaagaattactattgccgtacatgccgctctggcagaggctcgtcctgataattgaggcgggcatcacgtttagagcacccttagcccgattcctcctggaccctgttgggttcatctcagaaattccgaatgcgaacgtcaagcgcattctgttttctatgccctcaagtgatgcaggtgagtcaactgaccttcctaagcctgacggaagccagccgctggataaacagagcaatacaaagcaaagaaaagaagagcgaaaatccgacaatgggcgcaatggcaacaggctagagattgaaatcgaggccatcgatgagacgagcctgccaccggaagatgagaggcgccgctacaaagaagaggtcaaggcaaaatcgggcattgaagtgctgtacctgagaccaggttctgccattacagtggccggtttctgggaattcgtaccgtacaacgatgcaagcctcgcaggtaaggtgtccaaaagctttaaggctcgtgtagagaagcttcgccacgacctgctgaatgagcaagatccagatgataaagccttggcgctgtatggactgaagaaggcatatatcaagacgttcggcttcggttcggaggagcggaacgtaatttctctcttcctatatgccggcttgatcaatcgggaccactattggggccccagcacaagctacacatacgggtacgctcggcacgcctacaccttcggcacgccgtgtggtggagtgctgtatacgggagacggctacctaaataaccagtctcgctttgatgctttacatcagtacttaggtgaggagcgcatgcaaagtattcacgtacttcaggtgatgcatcacggctccagaagtaactggttccctggtatagccgcaaaaattagtccccaatacagtgttttctgctcagacccggctcaccgtggctacaagcatcctcatgcagaagtgctgagagatttttgggggtttgggcctgttcaggttgataaggacaatagagtcgatttcgagatgcacctgtag

SEQ ID NO: 343435 - DNA, 813 bp, Pseudomonas aeruginosa
atggatgtagcaaagtgcactctggatggcgacgaatattccgcagtgaaattcgccaagctgccgccttccgaaatagccatcaagcgtcggcaccttatctgtatcagatgcagtactcgggcaatttttgtcaaagaggctcgaagtggccaaggcccacattttcgtgcacggccccatgtaaattgcgcgctcgcggcgccagagtctgagcagggcgaaggtggcggcgaagataaggacatgctccgtaatcctggagatcacattgttctggaccttcgatatggggctgcggaacaggttaacggtgatccagaatcgggtgctgaaggtggtaccagaggcggtcggtatgttgggtcaggaggtaatcggcgggcgatttctaggcgtaggctacggcctattttgaagaatttgattttctcggaagagtttaggcgttcagatcagaccattgagcttccggacgttaatgcttttcgagtgcgtgacctatttgtcaacttctccgatgtcaccgacgcccatgttggcagatttagaggattctggggcgatattcaagatatccgccaaggtagagataaagagcactggatcaacaccggcgacaaggaagacgtaagtgtggtgatcggacaggacatttgcgcagcgtttctgagctatcaccgcgtcagttggtcggagcttgagggtatgcatttcctggttttcggttggttgaaccaggggcggaaaaataacaagctttggattcgcccccgaggtatagaattcaccgccatttacgatgggatgtga

SEQ ID NO: 343436 - DNA, 966 bp, Pseudomonas aeruginosa
atgttcgttcatgacgatgaacattgctggtcattggtagcaccacacaagctgaccctggttcttgaggaagaagcttgggtcagggcctcctcatttgaagacgtgcttgcagtaacaggatcgcctctggatgaacccgtctcggaggtcgagttcgtagtgcctaaaggctgcaagatcatgatcgacgcagcggcgcgcatccttgcgctgtgtaatcaaacggtcaagattgggaaaaccgtctcgattgatttcagcgcgtgcaaggcgacgttgacgtacttcaatcgactaggcttttttgatcacctatcagggatggtgaacgtggttccggagcgtccttcccagtcaggcgcggcaacctaccgtggcaataatgacggtgtggtcgagcttgcttcgattgacccccgcattcccgatgaatccatccccaaacgcttgaaaaacagtctggtgaagtgtgccggtgagcgatattcgcagtccgcgtttacgttcatttctgagctgttcggcaatgtgcgggatcatgcaaagtctgaaattccgggctttgcggctcttcagcactacccgaaaggtggcaagattcagacggtgatctctgacagcgggattggcattgtgggaagccttcagcccgttctggcgcacaagtaccaggcgctttctcgaacgctcgatttttcgaaacctgaggcaggcccagaactggtattgcatgtgtttaagcagggacgaatctccagctctgatgatgatggccgggggctcgggttgaagcgaagtggtgacgtagccgccgatttcaacgccaccgttacggtccggcaaaaaaacttcgagctgacaatggtttacagcgatggccgactcaatcgcagtgaccatcggctagatatgccgaccatcctaggtacccatatctgcttcgacttcttaattgacagctaa

SEQ ID NO: 343437 - DNA, 1050 bp, Pseudomonas aeruginosa
gtgggagaaagagaagatctcttggcatctattgccaataccatcagtacgtatcgagtgggcgaaatcgcccaacctacgccagatcatgtcgggcggtgggtaagccagttcacaccagagaatcagctttcgtttcttcgtgaatttgatcacgtgatccgccagacctttctgacgaaagaggtcgtgacgcgctttctgagcaatctagtcacgaacgaaaaattggcaggccaggatccaagagcatactgggcccgtgccaacttcctgcgggttcaaaaggcgggacagagccagaaggaaatgcttagcctctttggtgaggtgcttcagcagcaatgcggcctacagcttgctgactgtggggtagagggcggcgacttcatctaccttgacgatgtgcttttcactggtgggcgggtggcgacggatcttcaggcctggattaccgacagggctccggcgaacgcggttgttcatgtgattctgatggcctaccacactagcggccactactacatcacgagcaatcgattgaaaaaggccatagaggcctcgggaaagaaggttcaggtccatttctggcgcttggtcgagctaaagaatcagaaaagccagaaagattctgccgacgtgctatggcccgcagtggttcctgaagtggcttctgtgcaggcatacgtggcctcagagcagagattccctcttgccctgagaaacgcgggcggagctttgggggtgttcagttcagagcaggggcgccagctgctggaaaccgagttcttgatcgcgggggtcaagatcaggtcgctgacccagtctcccaaagacttcatcaggccgcttggttgtggcagttttggggtaggctttggatcattagtagcaacgtaccggaactgccccaacaattgtccattggctttatggtggggtgacccccaggtcaatgcgggcgcgctccattggtaccccttgttggcgcgtaagacctacgcagcgccagagaatatcttcaatgtcctcgatgacctcaccgcgtaa

SEQ ID NO: 343438 - DNA, 447 bp, Pseudomonas aeruginosa
gtgattgaactgaaaccctaccagccagttgggctcgaagattctagctactgggaacaagtcggggtacccgcgcggggcgcagagctttaccagtgcgtaaaagaaggattcgactatgcggtgcttgagcgcttggcagtggtttccgagtttccctgccggaccttggcgatgatggtgggattatccgcctatgcagtgcgccaggcgcggagacatggccaatggtcgtcgatgcagagtgaccggttgtttcgcttagcgcgtgtgctttatgccgcgcaggacctgttcggcggcgattggacacaggtccgtcattggttcgtcactccacagcgtgggttgggtggagggcgtccaatcgactggctgctgaccgaagtagaggcgcgaatggtgctagatctgatcggtaggataggccatggtgtggttatctga

SEQ ID NO: 343439 - DNA, 1143 bp, Pseudomonas aeruginosa
atgcgtgaacagtatgaccgaagccaattgctcgacgaggtctgggccgaaccggtgaaggtcgtagcgccacgctatggcctgtccgatgtcggcttgaagaaactctgcgcacgcttgcaagtgccgacgccggcacgtggccattgggccaaggtgaaagctggacgtggtgtaccgccaaaaccgaagctgaaggatttcaaaggtgatccccgtcagttgcttaagccgttcgttccgccagcggcaagggtgccagagccggaactggcagatcagcgttttcaggcggtggaggcgcgggaaaaagaccccgcgcatcgcatcaccgtcccagtccgagtgacccgctggcacccgctggttacggcctcccgcgatgccttccaaaagccatataaggacagtcgcggcctcccgctaccccacggcaaagggctcgacattgttgtatcggcagcgcaacgcccccgcgcgttacgcttggcgaatacgctggttcaagctttggaagcgcgcggtttcctcctagtggccgggagtcggcatctagaggtggaggtattcggggtgtgcctgtctttgagcatcgtggagtcaaccacgcgcgctgactatgtacccacggccgctgaactggcggagaaggcacgtcgaggatggggctactggcctcgatacacctacaccccctcggggcgcttggaagttcgaggtgacggcgggtatggcggcttgattcgggacggcgcacgccagcaagtcgaggagcagcttaacaagctggtcatcgggatggccaagcgggccgtgggtatcctctgctaccgcgaggagcgggcccgcgcagaagcgttacgagagattcagcgtcgcgaagcgctggtgcagaaggcactccaggaagcggagcagcagaagctaaaggagcttcgagccgctgcgcggcgctggcaggaggcgcagctgatccgagcctacctggatgccgtcgagcaggctgacctagtgcgtggagatggctccagtgaagcgcagcgggcttacctgcactgggcgcgggcgaaggccgattggctggaccccctggtcgacgcccccgatccccttttggaccaggtcattcaggtgccgtactaa

SEQ ID NO: 343440 - DNA, 333 bp, Pseudomonas aeruginosa
atgctgacactgcgaaaacggcaacaactgctgacggcactgctggaagactatcccgaggaatacattgacggttacgtaatcgacgcccgcatcgattgccattgcctgagcggatacatctacaaagcgctcggttacgacaatggcgagctgttcaccgccgacgtcgaatgtatcgtgcggtacgcgcgtcgctacgttgtgcgcagccgccattcggcgtatctgatcgtcaattttcacccgcagggcggtcgtcgctcgctgcgcgaaacgctggcgattttcacgcgtggcaccgcgctgtcgatgccatcgacgcgacagtga

SEQ ID NO: 343441 - DNA, 681 bp, Pseudomonas aeruginosa
atgagaaagtttggcaatggctcagaggtcatgcgcggtgaagcgaaatatcgggttgtgtcatatcgtccccataactcccaaattcgacttgaggacttgccagagaagcagcagctggggctgcacgacatgtccgcgcgtcgtgggctgacaccggaccagattattggcgtgcttcagtgcgtactggatggccgcctccgtccgacgggccagcttcccgatcttcctgggttggcaggcctgcgcttcgaccgccgagaggttgaggcgctgttggcagcggacgttgaggacgcgcacgagccgacgctgctgattaccgacgtcgtgcgaatgcagggttggaagcacgaaagcatcctggcttggatcaaggcgggccacctgcgcgtggttcacgagcaacgcggtcaacagcaggtgacggcgattcctgtttcagcactgctcgacttcctctcgcgctacctggtgctggctgatgcggctgagcgcgtcggcagcaaatcgaattggattctgcgggggttgatgcccgccggcgtcgcggcggttggcggggcgtccctaccgggcggtgggcagcgtggggtgttgctggagatcgatgccctcctccacgccgcgcaatggaacaagcgtctgccacacgaggtgccgccatgtgcgtggtga

SEQ ID NO: 343442 - DNA, 726 bp, Pseudomonas aeruginosa
atgatcaaagacagcaaaacaccagagcatgcacgggatgtgacgcggcaacggagacgcgggcgtcgagccctcgcctattgctctcgaaagaatggcgatgtggaagtacgcgtagagtccggcctggagcatatggttggcatgcttttggaagccgaccctcgggtagtcagctatgtcgctcagccattcgtggtggagttggagtcaaatgcagttcttgcgaataaggatgcctatatcaaaaagcctggcgtgaaatcgagattttatactcccgattttgtatgccgcatggacgatggctctctgttggttgtagatgccaagcatgatcaatttctagaaaaattcgaggagcgacgcgaggatatctctcagtgtcttcggggacatgggatggattttcggatcataccgcaaagtcagattgatgctgtggtcatgcgaaatatttccatacttaatgggtggcgtgcgaatcaccttgatcaatatgtgaaagcatatagtgaagaggtttgtcggattttggaaactaagcctatttggcaggctgacgagctttctcagcatttgagtgcggggaaagccgccatctgctgcgcgctactcaccggggttctcaagagtaatttgcgccaatgcctattttcaggggttgccgttgtatcggcggcacatggtgatctccatcatttcgaaatactggagatccgctga

SEQ ID NO: 343443 - DNA, 1767 bp, Pseudomonas aeruginosa
atggacctcaacaagaagatttactttcagctagccgacagtgttcggcacatcagcccaatgcaggaagccaccgcgctgatcctgatgttcattgcctggtggaagcattcgaaacagagggaatcggccgaagcgcagcgcctcgactatcagctaggcaagtcaccggccgacctctgggcagcctattgccagatagaaggcattgccacttcgtccattgaagaggcgcccttccgcctcactcatgaaaacggacgcttcgatccgttgatccgaaagatcgtggaactgggtgctcaagggctgctggatcaatggacagcagacgatgtggcttattgggtcgccgataaggacaacgccgtcggcctcgcccccagcttggcggacctgttgatcggcttgatcgaccagcaggctgaaggaactatctacacaccgtgggatttttccggccagctcgccgctcgcgcacaacgacttggccacgacacgtggcttgaagcccccacaacagtgctggcgatccaagtgctttccctggccgccaccggccaatggcaggtagcagcctcagatccagtgaaagcaccccactatatagagcggggtcaactgaagccgtttgctaggactgttgcggttccaccgatgggcgtgcgttacgagcgcgaggtggtcgaaaccgatctgtttagccgtttcacggaaaaaaccagttcggggagtgtgcttcagctacagcacctgctcgctcaaacccatggacgcattgtcgtcgtcgtgccgaactctgtgctgttcagtgtcggagcggaacgcagcctgcggcaggtactggtggagcgtcgcgcaattgaagcagtcatcgcattgcctgcgggactgctcagtggcagcagccttccaggtgccatcttagtgctcaatacagcgcaaccagcgaatcaaattcgcttcatcaacgctgccgatgaccaattccacacccaaggccctctaaagcggaccgagctgaaacagctcgaccttttgctcggacttgttcgacggagcaaagagagttccgcagctgttgatatcagttctgagaccattcgcgacaacgacttcaatctggaagtcgctcgctacgtcctcgatgatatggccagaaagctggatcaggccctagagcaactgcctcttctaaaactcggtgctcacttcgaagtcacccgtgctcgccaacactcaacctccacttccggagccaccgtgcgagaggtcctggcctccgacatccccgaatttggtgtaaccctctcagccagcaaggaagccctatttgacttggattcacctcgtgcctcgacttacttccttcaaccgaacgatctactaatcgccgtgaagggatccattggcaaggtcggaatcgtttccaatccgcccaccgcaggggagggtggctgggtcgcgggacaatcctttgcggtacttcgcttgaagcaagctagcgcttactcaccgcaggccctgctggtttacttgcgctctgaaatgggccaggccctcctcaatcgcttggccgttggcgccagtcagccaaccatccaactcagcgcgttgaaggaccttgctatcccaaacctcagcgagagcgagatggcgaaagtctcggtcatcgtcgagcgggagcgccaaattcagcaagaaatcgagctgctacgtgagaagcaagcagcactgggggctcggcactggacattacagacctga

SEQ ID NO: 343444 - DNA, 2400 bp, Pseudomonas aeruginosa
atggccatcaagaaatccgaactctattcctccttgtggaaatcctgcgacgaactacgtggcgggatggatgcctcgcagtacaaggactacgtcctggtgctgctgttcatgaagtatgtgtcggacaggtacgccggcaacccccactcgctgatagaggtgccccaaggcggcagcttcgccgacatggtggccctcaagggcgacaaagagataggcgacaagatcaaccagatcatcgcccgcctggccgaggccaataacctcaccggcgtcatcgacgtggccgacttcaacgatcaggagaagctcggcaaggggaaggagatggtcgaccgcctgtccaacctggtcagcatcttcaactcgccaggcctcgatttccgtaccaaccgtgcccagggcgacgacatcctcggtgatgcctacgaatacctgatgcgccacttcgccaccgagtccggcaagagcaaggggcagttctacaccccggcggaagtatcgcggatcatagcccaggtcattggcctgggcggcaccaccgacagcaagcagagcatctacgacccgacttgcggttccggttcgctgctattgaaagcccatgacgaagccaagagcgccactggtcttgatctggccatctacggccaggaaatggacaacgccaccagcgccttggccaagatgaacatgatcctgcacgactgcccaacggcggaaatctggaaggacaacaccctgtcttcgccgcatttcaaagacccgatgggaaagctcaagctgttcgacttcatcgtcgccaaccccccgttctccaccaaggcctggagcaacggcttcaatccggcagaagacgagtacgaccgcttcagctacggcattcctccggagaagaacggtgactttgccttcctcctacacatgctcacctcactgaaaagtaccggcaaggcggcggtgatcctgccccacggggtgctgttccggggtggtgccgaggccgccatccgcaagcgcatcctccagcagggttacatcaagggcatcatcggcctgccggccaacctgttctacggcaccggcattcccgcctgcatcatcgtgctggacaaggagggcagtgccgggcgcaagggcctgttcctgatcgacgccagcaaaggttttataaaggacggcaacaagaaccgcctgcgcgagcaggacatccacaaaatcgtcgataccttcacacagcagcatgaagaggaaaaatactctcgcctggtgccgatggccgaaatcgaggccaacgacttcaacctgaacattccgcgctatatcgacaccagcgaagaggaggatcttcaggacatcgaggcccacctgcatggcggcatccccgaacgggatatcgacgccttgcatgcctactgggaggtgatgcccagcctgcgtggcgccctgttcgagccgctgcgccctggttacctcaaccttaaggtcgccgtcagcgagatcaagccaaccatcttcggccaccccgagttcgacgccttccgccagaccgtggtcgggctgttcgatacctggcgtgccgagcaccgcccgctcctcgccggcatagccattggcgaccagcccaaagcgctgctcaagcaattggctgaagacctactgcgtcgcttcgaggctgccccactgctggatgcctacgacgtttaccagcacctccaagattactggtacgccaccctacaggatgacgtgtaccaactggtgatcgatggctggcggccgctgatcgccagcggcccgaaccagggcaaacccaataccgacctactgccgccggagctgatcgtgcaccgctactacgctgccgaagcggaggtcattgccgagctggaagccaagcgtgatgccatcagccgcgaactggaagagctggacgaagagcagggtggtgaagacggcccactggcagaaggcaaaaccgataagggcaagctcaccgccgccagcgtcaaatcccgcctcaaggccatcaagcacgacctggctgccgacgaagaacgccaagcgctggagcaatgcctaaccttgatcgaaagggaagccgaggccagcaagaaggtgaaagcgacgcagaaggcactggatgtcaaggtgcaggcccactacgccaagctctacgaggatgatctgaaatccgtggtggtcgatgacaaatggctggccactctgaaagccgatgtacagtccgaactggatcgcgtgtcccaggcactcagtggccgtatccgccagttggccgagcgttatgacacgccgttgccgacattgaatgctgaagtggaggcgctggcggccaaggtcaacgtgcatctggcgaagatggggtttgcgggatga

SEQ ID NO: 343445 - DNA, 1113 bp, Pseudomonas aeruginosa
atgaatgcggaagtgaagcctgggtataagcagactgaggcgggggtgattccggtggattggctctcgggaacacttggccagttcatatcactaagacgtggccatgatctaactcaccgagatagacgaaaaggcaccgtacctgtaatggggtcggcgggacagaatggctttcataatgtcgcactggcggctgggccgggcgtcacattaggtcgcagtggtgcatcatttgggcaggcccatttttgcagtgttgactactggccacataatactgctctgtatgtcactgattttcaaggaaacgatccgctattcatatactatttcctaacaaatatagacttttcttctcacaatacaggaggggcgcaacagtctctgaaccggaatttcatttacccaattccggtcgcgttgccgagaacctgtgagcagaaggaaatctctaccgctctgtccgatatggatgccctgatcagcagtctggatcgactgatcgccaaaaagagcaacctccagcaagccaccatgcagcaactcctcactggccaacgccgcctgccggggtttggtggggcgtgggaggtaaagtcatttagccaggttcttaaacgaatcaatgtaaaggctcatcaaatccagacatccgattatttagagagcgccaagtacccaattgtggatcaaggaaaagactctattgttggtttctctgatagcgaagaaaagctttttcgtaatactgatgatggcgtaatagttttcggcgatcacacctgcatcgtaaaatttgtcaactttgactttttgattggcgcggacggaacgcaagttattcgtggagtggaaggacaaaacactcgttttcacgctttccaactccagcatcggggggttgaaccaaccggatacaaccgtcacttcaagttcttaaaggagcggacttttcaagcgccaccactggacgagcaaaacgctataaccgctgttttgtcggacatggacaccgaactcgccgccctcgaaaccctccgcgacaaggctagacagctcaagcaggggacgatgcaggaactccttactggccggattcggctgatctag

SEQ ID NO: 343446 - DNA, 1788 bp, Pseudomonas aeruginosa
atgcataaaatcggatttataagcatcaaaaactaccgcctctgccgtgatgtttcactgccattggaggggtttacccctctggttgggcaaaacaacactggcaagtcatccatattggcggccttggcatgggtgctgaaaccctatgccttgcaggcatcagacttcgccgaggcggggcccattgaggtgactgcacgcatcgacgggatcactgctgacgttcttaatcaaattccagatggtcgtcaccgcgccgcgattgagccattctgccgcaatggatcgatttggatacgcgcacatacaactggcacaactgctcgggctatcacgcaggagatctacgatcacgagcaatacgctggcgaaggtatcccggagtcttggagagcatttcccacaggactgcctcaagccgttggagcattgcttccagagcccctgcaaattaacgccatggacgacattggtgaagatttaggcaaggccaaagctggtagcaccatcaaggcccttctggatgaaatcatggagcctattctccaggcccatgcggagctgacagaggcactctctgccattcgaagagtgctgacgacgggaggagaagcccgctcccagcacctgagcgattttgatcgtgacgcctcaagcgcgttggcccatttctttccaggccttaacttggaactcgaccttcaggtcatcgaagccaaggaattcttcaaggctggcgacctcatcgttacggactcgtcgacgggggataggagacgatttgatcaactaggaaccggtgcgcagcgagctattcaaatggcactcatccgtcatttggcagatctccgtaccaccgctcaagcgggtgtggcacgacgactgttgttaatagatgaacctgagctgtatctccacccacaagccgttcgtcgcttgaggcaagccttggaaacattgtccaagactggctttcaggttgtgtactcgacccactcaccgttgatgctaagtcgcgaaaatgctgccgataccatcatcgtgggtaaacagagagaaattggtacgttcactcgcttgccactgcgccaagcggttccctccgctttgcaagaagccgaggctcaatcccgcactctctttgagcttggcaacctctccgagatctacttttcggagcgtgtagtgttgtgcgaaggcaaaactgaccgtcggctgctgccactcgcatacgagactctgcatgggcgacatcccgagctagatcagatcacttttgtatctgtcggctcatgctccgatattccaaaggcattacctgtactcgctgctatgggcatcaaggcctgtgctgttgccgatttggattttgcgtttacagacgcgcgtaaggggcagagatccttgctccctaaagaagatgaacaactgaataccgccaaatccatcttgcggcgactgcaagccgagcatggcttcccgctaggtggaaatggcctgccgacaaaagacaagaacacaggttggcaggcggctgatacttgggcttgctttgccaaagatgcagagggggctgaggtagttcgtttggtacagcagactctcaaagagcagggtatttgggtatgggcggcggggtgcattgagcatgtcacagggcatctcgacaaaggcgaggatgccattcaggtgcaggagcttgcgattggacagctaacagccgaccaagtcgatgaacaaatgcccgagttcagggagtgctttgagtggatgcaagccagatga

SEQ ID NO: 343447 - DNA, 3105 bp, Pseudomonas aeruginosa
atgagtgtcggccagatcgagaaaaagacccagcaacgcgtcgtcaaactgttccggcagcagctgaattacgattatctgggcgactgggccgaacgcccgaacaacgccaatatcgagccagagttgctgcgtagctggctgattggccagggagtggaggcgaatctggccagccgcgccatcttcgagcttaacaaagctgccaatgacaccagtaagggtctatatgaccgcaacaaggcggtgtatgagctgctgcgctatggggtgaagatcaagccggacgttggggagaacaccaagaccgtctggctgattgactggaagcgccctgaacacaaccacttcgccattgctgaggaagtgacggtcaagggtgccgatgcaaaggcccatactaagcgcccggatattgtgctctatgtgaacggcatcgccctgggcgtgctggagttgaagcgctccaaggtggcggtgaacgagggtatccggcagaacctggataatcagaagaccgaattcatccagccgttcttctctaccatgcagtacgttatggcgggcaacgatacccagggcctgcgttacggcaccatccagaccggcgagaagtactacctgacctggaaggaagaaagcgaggagagcgccgctgccgacaatctgctggatcggcatctgcttcagctgtgcaacaagacgcgctttctggagctgatccacgactacatcgtgttcgacagcggggtgaaaaagctctgccggcataaccagtacttcggcatccgcgaggcgcagcgctacctgcgtcggcgcgagggcgggatcatctggcacacacaaggctcgggtaaatccctgaccatggtctggctgactaagtggattcgggaaaacatccatgactcacgggtgctgatcatcaccgaccgcaccgagcttgatgaacagatcgagaaggtgtttaccggcgtcaacgagcagatctaccgcaccaccagcggtgccgatctgatcgagaagctcaaccagccttcaccctggctgctgtgctcgctgatccacaagttcggtgcccgcgaagatgccgacgtggaaggcttcgtggaggagctgcgcaagagcctgccgccagacttccgcgccaagggcgatctctatgtgttcgtcgatgagtgccaccgcacccagtccggcgagctgcacaaagccatgaagatgatcctgcccaatgcggtgtttatcggcttcaccggcacgccgctgctcaaggccgacaagcagaagagcatcgaggtatttggccgctacatccatacctacaagttcaatgaagctgtggccgacggcgtcgtgctcgacctgcgttacgaagcccgcgacattgaccagaacatcacctcgcagaagaaaatcgatcagtggtttgatgccgaaaccaaggcgttgaatgatctggccaaagcccagctcaagcagcgctggggcaccatgcagaaggtactgtcgagccagtcgcgactggagaagatcgtcgccgacatcatgctggacatggccatcaaaccgcgcctggccgatggcaggggcaatgccatgctggtgaccagcagtatcttcgaagcctgtaaatgttatgagctgttcagcaagctgggcatgggcgaaaagtgcgccatcgtcaccagttacaagccatcacctgccgatatcaagggtgaggccactggcgaggggctgaccgagaagctgcgtcagtacgccatttacaaccagatgctgggcgacaaagacccggaaacgttcgagaaagaggtccagcagcgctttatcaaagagccggggcagatgcggctgctgatcgtggtggacaagctgctgaccggtttcgacgccccctcggcgacctacctttacatcgataaacagatgcgtgaccacggcctgtttcaggccatctgccgggtcaaccgcctggacggtgaggacaagcagtacggctacatcatcgactacaaagacttgttcaagcagctggaaggcgcgattggcgactacaccagcggtgcgctggacggttacgacaaagcagatgtggccgggctgctggaagaccgcctgggtaaggcgcaggaagatctggaagacgcacgcgaggcaatcaaggccctgtgcgaaccggtggagcaacccaaggatacaccggtttatctgcgtttcttctgcggcaacgactcgggcaacgccgagatactcaaggctaacgagcccaaacgcctgaacctgtacaagatgacctcggcgctgatccgctgcttcggcaatatcgccaacgagttgcaagaggcgggttacagcaccaaggaaatcaccgagattcagaccgaggtggatcacttctccaaagtgcgcgatgaggtaaagctcgcgagtggcgattacatcgacctgaaagtctatgagccgggcatgcgctttttgatcgacacctacatccgtgccgaggacagcgagaagatctctgcctttgatgatatgtcgctaattgagctgatcgttgagcgaggcgtgggtgccattgacgcgctgcccaagggcattcgcgaaagccagaaggccgtcgcagagaccatcgagaacaacgtgcgcaagttgatcatcgacgagtcgccgatcaacccgaagtactacgaaaccatgtcctctctgctcgatgcgctgatcgccaagcgcaaggaagacgccatcagctatcagcaatacctagccgaggtagtggagctgaccaagcaagcgaagaaccccaccagtgccaacagctaccctggctcgatcaacagcgatgcgcgaaagcatctatatgacaacctcggacataatgccggtctagccctagcagtggacgcggcggtgctggatagccggcaggacgactggcgcagcaatgccatgaagatcaaacgtgttcgccttgcgatcaagaacgtgctggatcagtggggcaaagactccgccgaatcgcagggcagctactcggccggacaagacaacgagcggctggaagccttgctggaactggtcaagcatcagcatgaatactga

SEQ ID NO: 343448 - DNA, 729 bp, Pseudomonas aeruginosa
atgaatactgagtcccgcagcatcacagtcagcggtttgaccgtggaggtcgtgcgcaagccgattaaaaacttgcatctgggcgtgtacccaccgcaaggccgcgtacgtgtagctgcaccgttggcgatagacgatgaagccgtgcgcttggcggtggtcggcaagctcggctggatcaaacgccaacgagcaaagtttcaggcccagccccggcaatcccagcggcgcatggtcagtggtgaaagccattactttctaggccgacgctaccgcctgcgcgttcacgaaaccacgggggcattacgcatcgccctgcgtggcacggccactatggatctgtttgtgcgccctgacaccacagtcgaacgccgcgaacaggtgctgcacgacttctaccgggccgaactgaaacgactggtgccggagctgctggagaaatggcagccgaagttaggggttgaagtgcgggtctggggcatcaagcggatgaagacgaagtggggcacctgcaacatcgaggcacgccgcatctggctgaatctggagctagccaagaaacccgtacagtgccttgagtacatcctggtgcacgaactggctcacctgcatgagcgccaccataacgaccgcttcatagctctgttggatcaacaacttccccagtggcgactggttcgggacgaactcaacaccagtttgctcgccgaagagcgatgggatcgctaa

SEQ ID NO: 343449 - DNA, 249 bp, Pseudomonas aeruginosa
atggatccccgcgaaaaagccaaaatgctcgcctatgtactctggaacgagttcaacgcaaaacaggtcaatattgcgaaggtacttaatgtctccgggccgactattagcctttggctcaaagaaatgcggtacagggccgagattcatagtctgacgcaggaactgcaggaggttcggatgattgcgcaggggcttcaagcccaaggtctcatcgaacaccgtcagacattcgacgttttggattga

SEQ ID NO: 343450 - DNA, 246 bp, Pseudomonas aeruginosa
atgaccactctttccgcgctcagccccgacctgctgacaaacgaagaagctgccgcactgctcggcatcaaacccaacacccttgaaatctggcgcacgaagggcaaaggccctgaattcgtgaagctcgggcacagcaagtccgcacccatccgctacctgcgcgccaagattttcgagtggctggagcgccaatccttccgcagtaccagcgcctacgcgccgaacgccaaacaagctgtttga

SEQ ID NO: 343451 - DNA, 717 bp, Pseudomonas aeruginosa
atgcctaccgaaattgatgcccgtatcacgcccacgctgcaccccgacaatgtcgcaagcattgacggctttgacgagcagaccgcgccgtatctcgcgcccaccatgaccgcgttcagtaccgcctatgaaggcattcgttctgtccatgaggcgcgggagaaagccaaaaccaatccgacttggaatgaggcgcatcagatcattcacacagacgacttcgcgcaaaagcacctcgctcgtatcaccaaaagtttcgacgtaacccgctcgaacttggagaagggtattgcgatgctggagcagcagcttgcaacgccccttgaatcgaaggctgcacagagcgtcagcgctgagattcgcgcctatgccaagaacctgcccagcgaacagcgccacaagttcatccagcaagccattgacgagggtgaccacactaccgtcagcgcactgctgggcgcacccgcctacctgtccggcctcgatgcgaacttccagcagacctatgttcgcttctggaacgagcgcagcgcgcccgaggttgcccggcgcctcaaggcgatgaagggtgccaagcagatgatcgaagaacgcgcggggctggtgttcaaagagcttgaaaaggctgttggcgcgcccccgcacaaggccgccgctcttcggaaagccaagacggaagcggagcaagccttcgtcctcaaggacattggccagtga

SEQ ID NO: 343452 - DNA, 474 bp, Pseudomonas aeruginosa
gtgtccgaatcccatacacctgaatggctcaagacgtggcaggactcccctgctgcgcaggagccgccgcaccgtggcgggttcttgcccggagtgagcggaaatcctcggggcaggccggtcgggtcgcggaacaagaagaacgtcatcgctgacgagcttgccaaggaaggtagcgcggtggcccgtgtggtcatggacgctgctcttgccggtgatatgcaggccgccaacatggtgctgcaacgtctgtcgcctccgctccgtgcccgcgctgaaaaggtgacgtttgaactgaccccggatgcgccgctgcaccagcaggcaaaccaagtgctcgcgtcggtggcggaaggcgcaattgacccggagaccggaaaactgctgatcgactgcatccagtcggttgcgggcatccgcgcggttgatgaactggaagcgcgccttatcgcgctggaggaaaagagccaatga

SEQ ID NO: 343453 - DNA, 213 bp, Pseudomonas aeruginosa
atgagcgtctacgacaccgacagcattccgcaacacggctgggcgcggccaaagatcgagcgcccgatagacacgccgcaggggcaagccgatctcaagctgatcgtcgagacctgctacgccgccattctgaattgcgacgaccctgccgtgcgctggcaggccgcgcgcctgttgcaagcaatcggcccgatgaaaggaaccctgcaatga

SEQ ID NO: 343454 - DNA, 183 bp, Pseudomonas aeruginosa
atgaagaacctgcacaccgacttgaaggaaaacggcccggtcaaaaactcgcccacacccgacgatctgcaacagatgcagcagcgccgcatcgaggcgcatgcagaacggcaaaccatgtccgacttgaacctgctccgcgctttcaagctgggcgaggcgctgcgcgaggcacgagagtaa

SEQ ID NO: 343455 - DNA, 228 bp, Pseudomonas aeruginosa
atgagcatcagcagcgccaagggcatgctcgcccgcctcaagcacttggagcgctcgcaaggtgcgaccgacgagatgcgaggctgggtcagtgacatgctcggcgctgccattgctgacggtcgcatgtgcccggtcgatggccctgtggtgcggcattgcgtgttgaactggatcgacgacggcaccgcacgcgccgggactgctggctggggtttgctgcgatga

SEQ ID NO: 343456 - DNA, 549 bp, Pseudomonas aeruginosa
atgtcggattttgaccgtttggatgacgtcttaaaaacctaccaaaattcattcgttggtaaggtttataacgaagaaaatgacgaccacgatttgctgatggatgcctttgggatacccccggccctcaagcgagagaaccgccagtactgggggcgcgagttgggattctgctggcaactcttagtgattgaggcgtgcagagggttgccgatctataaaccggctttcaagattggaggcgatgagccttgtgacctgattgtgggaaattacgcaattgacacaaaataccggatcggctccggtgactctgggacgctaaaaaaattcaaatcttatggcccgttgctgcgagagcatggctatgagcccgtgttcctcatactgcgggaggacaacctccccgcagcaattcaggcatgtcacatcggcacttggaaggtgctcacagggcagcaatccttccaatttatccagcagatcagcgggtttgatatggagtcttacctcaaagatcgagcatcaaagtttcttgtcgagcggtag

SEQ ID NO: 343457 - DNA, 942 bp, Pseudomonas aeruginosa
atgcttacagatttcagaaattcggttcttgcaggcgattgcagagaagtattgaggcgcttgcccgaggcgtgcataaccacatgcatcaccgatccgccgtacaactatgaattcatcggccacaagtgggacgatagtgagataacacggcggaaggagagggttgcgtcaaaagacagcaagacgcttgtgaagaacatcccttacggcagtggtctcgctggtggggttcgtaacgctgcttggtacagaaagaaccgcaagaacatcctcgactatgaagaatggtgtttcgagtgggggcaggagctttttcgagtctgcaaaccgggcgcaacggttgcggttttcaatagcactcgaacagttgcccatgttcaagtcgcgctagagcgagcaggattctacagccgggacattgttgtctatcgccgttccagcggaatcccgaaaggcgtcaatatcagcaagcagctccaaaaaaacggttttgaaggtgcagatgattggcagggatggcatagctgcttgcgcaacgagtgggaggcgatctgcgtcctgcagaaacccctgaccgataactacgtcaagacgttcatggagtttggaacaggtctgttctacaccgctaggcttgatggagggtttcaatcaaacatccttgaaaacatcgaacgggggccatcagaggacttcaatgtgcattgcacagtgaagccgctgccactcatggaaaagctcgtcaagatgtttgtgcccaagcaggaaggtgcactgttgcttgatcccttcgctggctcaggcactacactgctagccgcaaaaaacaatgggattgattatgtagggatagagattgaggaaaaatatctggacataatcaatgggcgactaaactcaactaccgctcgacaagaaactttgatgctcgatctttga

SEQ ID NO: 343458 - DNA, 1020 bp, Pseudomonas aeruginosa
atgtttttctttcttattttggctgtcattagcgtctcttgtgccggtacttggttattgcgtcgctatgccttggcgcgcagtattatcgatgtgcccaatgcccgtagctcccattcagtcccaacgcctcgtggtggcggggtggcgatagtcattagctatcttgcgctgctgcctgtattggtagcgctcgatgtggtgaccgcgccgctcgcgattgcccttgggggaggggctgctatcgctttgctggggtttcttgacgatcatggccatatcgctgcacggtggcgcttgttgggccacttctctgcagcaggatgggggcttttttggctgggagggttccctgcattgaagttcatcgggatacacatcgaggctggctgggtcttgaactctttggctgccctatatgttgtttggatgctgaatctctataattttatggacggtatcgatggtattgccagtgtcgaagcgattacggcttgcaccttggctagtcttattttctggggggtgggtcagcagcaactgttgatcgcgccgttgtttcttgctgcagcggtagctggctttctcatctggaattttccacccgccaagatcttcatgggcgatgccggaagtgggtttctcggaattacattggctgtgctgtcaatgcatgctgcgtgggtttcgatggatttcttctggtcttggttaatcctgttgggggtcttcgtcactgatgcgactgtgactttgattcgtcggcttatgcgtggagaaaaggtgtatgaggctcaccgaagccatgcctatcagtttgcggccaggcgttttggccaacacctcccagtaacgctgttcgtaggtgctatcaacatagtttggttagctccgatagcttggagtgttgcgcgtggattgctgccgggtgagcttggcgtggtcattgcttatctgccactggtttttcttgcggtcaggtatcgtgcgggccagatggaacatatcatagcgcgctag

SEQ ID NO: 343459 - DNA, 951 bp, Pseudomonas aeruginosa
atgagctcggtagttgtaactggtgcgaacggattcattggcagggcgctgtgtcgccatctggttgcaagcggccactccgtacgggggattgttcgtagctttgaagacccgatagctgatgtcgagtatgtgttagccgatttagagtccgaagtacctttaccacccggcactttagcggtggactgtatctatcatctcgcaggccgggctcatattctcaacgagcctgggcgaggtgctttggagagatttcgcaaggccaattgcgaagccacggtgcgactggccaaggcggcactgatagacggggcgcaaaggttcgtatttgtcagttcaattggtgtaaatggcgcaagcagtggtcgtttgccccttgacgaatcatcgccggccaatcctcacacggattatgctgtgtccaaatgggaggcagagcaagcgttacatcggttgctggatgggagggagatggcgcttgtcgtcgtgcgtcccccgatggtctatgacactgatgcgccaggaaactttgcacgcttgttacgcttagtttccaaaggaagagtgttgccgctcggggctattgataatcaccgcagtatcgtgtcgttgcgtaacttggttcattttctccagttatgcggtgagcatccttctgcgccggggcacattctctttccgtctgatggcgaagacgtatcgacctccgagatcattgcctatctgggcgaagggatgaagaaaaagaccgttcttattcccgtcccctattggttggcgagatggatcgcggcactgctgaggcgtcagtccctatatatccaactgtacgggtctttgcagattgagcacggcgaggcacgacggctactgggctggtctgctgctgaaacctctctcgaggcattgcgcagagtggggagggattatgtcggtgggctacgttga

SEQ ID NO: 343460 - DNA, 1341 bp, Pseudomonas aeruginosa
atgaaaattacagtttttggcagtggttacgttggtttggttactggcgcatgcctagcggatgtcgggcattccgtagtctgtgtggacgtcgataagggtaagatcgagcggctgaataacggcattattcctatctatgagccgggtcttcaggagttaatcgtaaataataccaaggcggggcgtttggtatttactaccaatgcgcaggccgctgtcgagcatggcctcctgcaattcattgcggttggcactccacctgatgaagatggtaaggctgatctacagtacgtcttgacggttgcacgtacgattggttccttcatgagtggcgaaaagattgtagtcaataagtctactgttcctgttggtaccgcagataaggtccgtgcggcgatcatggatgagttggccaagcgtgaagagttctattcttttgaagtttgctcaaaccctgagtttctaaaggagggcgctgcgattgaggactttaccaagggtgcacgcattgtcgtgggcactgagtccgaacatgtcatggacgtcatgcgtcactgctatgctccgtataaccgcaaccacgataagctgatgttcatggacgtgcggtctgctgagttaaccaagtatgcagccaatgcaatgctggcaaccaagatcagcttcatgaacgagatatccaatattgccgagcatcttggggctgatattgagcacgtacgccttgggattggctcggatccacgcattggttatcatttcatctatccgggctgtggttatggtggttcgtgtttccccaaggatgtccaggccttggctcggacggcagatgaagtgggttaccaagcggagcttttgaccgccgtagaggcagtgaacggccggcagaaacaggtgctcttcaagcgtttggcgcaggctttcgacgggcaactggccggcaagcgtattgctatctgggggctggccttcaagcctaatacagatgatatgcgcgatgctccgagtcgttcgctgatggaggcactttgggctgctggcgcgcaagtacaggcgcacgatccggaagcaatgcaggagtgcaggcgtttgtatggagagcgcaaggatctgcttttgtgtgcttcgcgcgaagaggctctggtcggggcagatgcactggtgatatgtacggagtggaaggcctatcgtgcgttggagccgcaatggctcaaagcgaatcttgcattccctgtggtcgttgatggccgtaacctgttcgatcctcaagagatggcggatgccggcttgctttatttcgctattgggcgtggcttgtccgtagctgggcgatga

SEQ ID NO: 343461 - DNA, 957 bp, Pseudomonas aeruginosa
atgaagcgtgttatggtgactggtggtgcaggttttttggggtcgcatctttgtgaacgcttgctcgatgctggaaacgaagtgctatgcgtggataattttttcaccggtagcaaaagaaacatcgcacatctgatgacgaatccctatttcgaattgattaggcatgacgttacgtttccattgtacgtagaggtcgatgagattttcaatttggcttgtcccgcatcgcctgtccactatcagttcgatcctgttcagacactcaagacgagtgttcatggtgccatcaatgtcttgggcttggccaagcgtgtcaaggccaagatctttcaggcatccaccagtgaggtatatggtgatcccgaggttcatccgcagccggagtcatattggggcaaagtaaatcccattggtatccgttcgtgttacgacgaaggcaaacgctgtgcggagacgcttttttccgactaccaccgtcagcatggcgttcagatcaagatagctcgtattttcaacacctatgggcctcgcatgcatcctaacgatggccgcgtagtgagtaacttcattgttcaggcattgcgcggtgatgacatcacgatctacggcgaagggcagcagacccgtagcttctgctatgtagatgatctggtcgaggggttcttgcggttgatggccagcgatggctcgatcaccggccccatcaacctaggtaaccctggcgagtttaccattcgtcaattggccgaacgggtgctggatctggtcggttcttcttcatccttggtatttaaacctctacctcaggatgatccgcaacaacgccagccggatatctcccaggcgaaggccgtattgggttgggagcccactatcatgcttgatgaaggcctcagtaagaccattacctactttgatgccctgctgtctgaagaaaagccaaaggaccagtaa

SEQ ID NO: 343462 - DNA, 795 bp, Pseudomonas aeruginosa
ttgacgctgtggaatgagggactggtttcaattattacgccttcctacaatgctgagaaactgatcgggcggacgatccagtcggtactcgaccagacctttgataattgggagatgattatcgttgatgactgttcgaaggattcgacacgttctgtcgtcgctgcatatgcggagaaggattcgcgtattcgcctcgtaggtttggaaaaaaacaatggcgcaccagcggcccctcgaaatataggtgttcagcatgcatctggtgactggattgctttcttggatgctgatgatatatggcatcctcgtaagttagaactgcaacttgaggctatcaagtcgactcgtgcacgattcagttgtacgcagatggtggatttttttgatgataaagaaattgtttttgagtctgtcaaaactgtgcctcaacagatcgtggatttctcccagcagcgaattaaagggcgaataccgacgtccagtgttttgcttgataaagaattaataatggaatttccattcaatgttgatatgcgttataaggctgtcgaggactatcattgttggctgcgaattctatcctctgaaacgaagtgtttaaagcttaatgcccccttgctgtactatcgtcgtgttgttggacagatatcaggttccaagaagtacatgctcgagcgaatgttcatgttgcaccgggagtaccccggtggttccattttgaaagcgactttgtatacactgacccatgcgttgggcggcttttactacagaatattgaggaagggactatga

SEQ ID NO: 343463 - DNA, 1554 bp, Pseudomonas aeruginosa
ttgaatatcggcttcgtcaatatgttctcttttcgcccgcatgttgaacatcttgtttttatggcgaggttgcttgagggcgccggacatacagtcaagtatctgacctgtgacgctcaggtttcaaactgctatccacgggcaatcaaggggacaacgaagcttaaggagtgtcccaggtgtataattggtggtgtgcggagctacgtatcgtctggtgtagagacgcttgttggtggcaatgcgtcattgtcggtcgagagattggatgccatagctctttctagctcttgtacgctaaatcggactgagtccgagagggagtggaatgaaccggcggtcgttgctgtcagggaaagtctgcatcaaccagtattgctagcttatcaaagtgcggttgcttggattgagcgaaatcaactagatgcagttgtttgtttcaatggccgtatggatcttaccagagcagttacttatgcatgtgagcaagtaggaattccttatgtcactcatgagagaacgtggtttggtgatgggttgcagttgattccaaatgcaaactgtctgtcgcttagagctttgggtaagttggtcaaggagttcgacaataagccattgaccaagatgcaggccgcggttgctggaaaactggccggcgagcgtttcctgcagcgtaactctttagagtggcggctctataataagaaccccaaacctgcgccatggccgttgactactccaggactgcgtgttttggtggtgcccagtagcaagaatgaattcgctgggcatgctgagtggaagactgagtggcaagacaatacggaagcgctggacgactttttcgaagcctttagcatccaccccgaacaggtcgtcgttcgctgtcatcccaattggtccgagtcgataggcaaggcgtctggtgatcgatcattgagcctttaccgtgattggacttccgcacgaggtattcactgtatctctagtgaggaaagggcaagtacctacgatctcattcaacaggctgacatcgttgtgatgaatggtggcagttcggctgtcgaagcgggcgtatgtggtaagcaagtagtgtgtctcgggccctctacttatcaggaagctggatttgtaagagtattcaaagatcgaaagtcattgttcgctcccgaggctcttgtccctcttgatgcggatgtcgtgattcggaagacgttgcgattcttatatcttcgttcgcatcgctttccgcaatatgtcgactatgtaagagcattggaaacaacgagatatgagtatcgcgatggtgcggaccctgagcgtttgattaaattgctgagaacgggggagttgactgctgatgatgacagctacgcgagtagtgatgttgaggagacttccgtcgtcgaagcgctgaagaacaagcagtgggggcagttggcagactatatcgttgagcgtccaggacttccctcactgatgattgagcggcgggtcggcttgcggtggattgacggcgtgcgggcaaaaatgcctagaggagatagaggttga

SEQ ID NO: 343464 - DNA, 1056 bp, Pseudomonas aeruginosa
atgaacaaggttatttccatcgctggtcgtgccatcgggcctgactatccgccttatattatcgcggagatgtcggcgaatcataacggaagtctggagactgctttcaggataatagaggcagccaaaagttgtggtgcggacgcgctcaagatccaaacctatcgccccgataccattaccctgaattccgatttgcctgacttcaggatttccggtggattatggggggggaagaccctgtatgagctctacgagtgggcgcatacgccttgggagtggcatactccaatgttcgaatatgcccgtaagatcggcgtgacaattttcagctctccatttgatcctactgctgttgatttactggaggatctgaatgctcctgcttacaagattgcatcttttgaggcaatcgatttgccacttatcaagtatgttgcagctacaggtaagcctatgatcatctcgactggaatggcagatctcgaggagattcaggaagcagttgatgctgcgcaggctggaggatgtaaagagctcgcgattctccactgtgtcagtgggtaccctgctcctgctcaggattacaatctgcggaccatcacagacatgcagaagcgccatggtctggttataggtctttcagaccatactttagataatacaacagcgattgccagtgttgcccttggtgcatccataatcgagaagcattttacgctgaatcgcaatggtggtggacctgatgatagcttttctctggaacctgctgagctctcggctctgtgccgagacagtaagacagcctgggcgtcgcttggtattgtcgactatggaagaaagtctagtgaggctgggaatgtgaagtttcggcgctctctgtatgctattcgcgacattgaggctggagagcctctaactgctgagaatattagaagtgtccgccccggatatgggctgtcgccaaagcattatacagaagtactcggaaaaacggcggctgtgaaaattccagcccatacgcctatacactgggaaaagttgtcggatgattga

SEQ ID NO: 343465 - DNA, 651 bp, Pseudomonas aeruginosa
atgagtagattgaaagttaccctgatgtgcagtgatccaaggcatcctgtcaatcggatgttggatagatggagagaggcgcaaggtcgagcgcatgagattacggtatgccgcaaaaaggcagagctacctggtggggatattctttttctcatctcttgcagcgagatcattcgcgaggtggatcgctctaaatactccaaggtgttggttcttcatgcgagcgatcttcctaaaggacgtggttggagtcctcatatttgggagttggccgcaggcgcagagtttattacgctttctcttttggaggccgcagaaaatgtggatagcggtgctatatggtctaaggaagtaatccctgtaccagtcaatgcattatacgatgagatcaatgatctgctgtttcaatctgagtctaggctcatggattttgcgattttgaattttgctactgtaattccgcagccgcaatcggaagagtttgagccaacgtattatcggcggcgtgtacctgaagatagtgagcttgatccaaagttgagtctggcggagcagttcaatcttcttcgtgtctgtgatccacagcgattccctgcatatttcaagctgcacggtcataagtataaaattgtgttggagaaactattctga

SEQ ID NO: 343466 - DNA, 1080 bp, Pseudomonas aeruginosa
atgagagctgtttttcgcgccgatgcctcgctgcagatcggaacaggtcatgtcatgcgctgcctttcgatggcacgtgagattgctgtgcgcggtggtgaatgtatctttatctgtcgagagcataaaggtcatttgattaggcagatacaggacttaggatttaaggtacatacgttaccgctcgaagcttgtctcgatagtgatactgccttgcctcacgcgcgatggttaggaagttcgcaggccaaggatgcggcgctttgcgtcgagatattgaagcatatcgatgccgaatggatggtagtggaccactatgcgctggacgagcaatgggaggcatttattaaaccactggtcagaaatctatttgtcatcgatgatctgactgaccggaagcatgattgcaatatcctacttaaccaaaatcttgcagtagagcccaacggctacgcgatgctcgttccggctgacgcccggatactgtgtgggcctgcttacgctctattgcggcctgagtttcatgctgctcgtcaagaaagcatcagggctcgccaaggacgaccgctcaagcatattctggtttccttgggaggcattgataaagataatataacactacgcgccattgatgccatcaagtcgctggacggttgtcagttcttcgatctgactgtagtcatggggcccaatgctccctggaaaaatagcgtccataatgctttgaagagctttccgggaagggcggagttacggataggtgtcagtaacatggctgagcttatggtcgcgagtgatgttgcgattggcgcagcaggaagtacctcatgggagcgctgtgtccttggattgccgacgctgatcctgatactggccgacaaccagttgtccattggtcgggcgctgcaagctgaaggggctgcccaagtaatcgaactggaaggtctagaacacgaactacccaggcagcttgcgctgcttatgtctcgtaatgatattcgagaggtcatgagccaagccgcatcatatgtctgtgatggtttgggggttcagcgagtagtggatcatatctatgagtag

SEQ ID NO: 343467 - DNA, 690 bp, Pseudomonas aeruginosa
atgaaacttgcagtcatacctgctcgtggcggtagcaagcgcattccacgaaagaatattaaaattttctgcgggcagccgatgatcgcttggtctatacaagcggcgctgaatagtgcttgcttcgatagaattgttgtttccacggatgatgccgagatcgctgaagttgcgcgggaacttggtgctgaagttccgttcattcgtccgcatgtcttggctgatgaccacacaggaacgctacctgtgattcgccatgctatccaggcttgtgcaatgcagggatttcatgcgactcaggtgtgttgtatatacgcaactgcaccgtttatcaccacaaaggatattctccaggggctggaaatttctgaacgctcggggattacctatgcatttacggcaactacctatgcttttccgattcagcgtgctttgaagcttcatcccgctggaggagttgaaatgttcaatccagagcatttcaacacgcgttcgcaggaccttgaagaggttattcatgatgcggggcagttctattggggaaaggtggactcttggatgcaagagcttcctttctttactgtgaattcatgtccagttcttctgcctcgccaccgcgtgcaggacatcgatacagtagaagactggcagcgtgctgagtggctattcaaggcaatgcggagccaataa

SEQ ID NO: 343468 - DNA, 1161 bp, Pseudomonas aeruginosa
atgattccttacggtcgccaggatattacacaggcagatatcgatgctgtcgttggtgtgttgaaatcagatttccttacgcaggggccaatggtgccccgctttgaacaggcagttgcacagcacgtgggtgcatcgtatgcgcttgcagtcaacagcgcaacatcggcattgcatattgcttgtctggcgttaggtcttggtgctggcgactgtttgtggacaactccagttacttttgtggcttctgcaaactgtggattgtattgtggggcggaggtcgacttcgttgatattgatccccatacctacaatctttgtccagaggcgtttaggcgaaagttagagcaggcgtcgcttgaggggcgtctaccgaaggtactggttgtggtgcatctatgtggtcagccttctgatatgcgctcgattcatatgctggccaagcaatatggagtgaagattatcgaggacgcctctcatgctattggtgggaagtaccgaggcgagttcattggaaatggtcgatacagtgatataactgttttcagctttcatccagttaagatcattaccaccgcagagggagggatggtcttaactaatgatgctgaattagcacgaaagatggagctattgcgcagtcatggtattacccgtgagccggagagaatgactcacgcgcctgaggggccttggtattatcagcaaatagaattaggtttcaattatcgtatgacagaactgcaggctgcgcttggtcttacgcagatgcagcgccttgatgaatatgtcgaagcccgtcacttgttagctcagcgttataatcagtttttggctcatcttccgattactttaccataccagcatgaagatagttactcgggtttccatctttatgtgattcgtctgcagttagaaaaaatttctcctactcatcgtcaagtttttgagtctctgcgggaacagggtgtaggggttaatctgcactatattccggttcatactcagccctattacaagaaaatggggtttatcgaggatgatttcccaaatgccatggcctattatcacgaggctatcagccttcccatattccaaatgatgagtcatgaacagcagaatgaggtggtgctggcggtcgagagagctatacaatcatga

SEQ ID NO: 343469 - DNA, 999 bp, Pseudomonas aeruginosa
atgcttagtgagaaaacaattcttgtaaccggtggtactggatcgtttggtaatactttcgttcctatgactttggctaaatataatcccaagaagattataattttctctcgtgacgagatgaaacaatgggatatggcaaaaaaattcgaaggtgatcctcgagttcgttttttcattggcgatgttcgcgataaagatcggctgtatcgtgctcttgatggtgtggattatgttgttcacgctgcagcaactaagatagtcccaactgccgaatataatccttttgaatgtatcaaaactaatatcaatggtgccatgaacttgatcgatgcttgcattgacaagggagtcaagcgcgtcgttgcattatctaccgataaggctagcagcccgatcaacttgtacggggcgaccaagctggcttccgataagttgttcgttgcgggaaactcctatgctggtggccatgaaactcgcatggccgtggtgcgttacggaaatgtaatgggatcgcgtgggtcggtaattccgttctttatgtcgatcaaggaaaagggtgaggtccccattaccgacgaacgcatgacccgcttcatgatttccttggaggagggtgttgagctggtgtggcatgcatttgaagacatggaaggtggagagatctatgttaaaaaaatcccctccatgaaaattaccgatctggctcgtgtggtggcccctgatgcaaaacagaaaattgtcggtattcgcccaggcgaaaaattgcatgaacaaatgatcagtgctgaagatgcttattacacatatgagtatcctgagcatttcaaaatcttgcccgttatcaatgactgggcaaattgcacaaatcgaattaaggatgggaaacgcgtagctgagggattcgtttattccagtgataataatacggagtggatgagcgatgaagccttgcaaagctggattgcgcgtaatcaagacaagatcgggagtatctaa

SEQ ID NO: 343470 - DNA, 1215 bp, Pseudomonas aeruginosa
ttgtttaaatttgcacattggcggtatatgatttttgcccttttggctgcgttcattacggcgctcaagggctttttttatgcccatcttttggatgaagtgcagtatgccaatgtaagctactaccttctcatgctgggggtgggagtattgtttattggctctggggttataatacgctgtcatactgaaattccgatattggcgaaagaagagtcctctgagtgtttgaatgattttatacggcaagttaaggtaacgggttttgtatactggctactgctctgtactttaattccgcttgctagttatatgaccggaatgtcgctctcgtttcaagtgcttttggttgttcaggttttagtattctttttgttcactattgatctgatggtggtgaaaggacggctagattttgttggttatgcgaggcagttatttctaagaaatgctgtcattgctgctgcgggctttttatttgcgcatctttctgcagactcgtttgtgacggttgcggcagaggtcttgtgtgcagttatattttattctcgtggggttctcttgttttttttggattttcgtgttccgagtttaacgttttttagtaagtctatcacttatatgcctgttactttagttggagcgcttttccagtttgttgatagactgctagcctcttctgtgctgagaacggaggagttctctcggttctcgtacttttctcttgtcataatggctgggctttccgtacagcagttgatgaatactagggtgattaccgttttaccagaaatgtgtgagaagggggcaagggttgggtatcgttatgtagttaagatttctcttgtgatggcgctactcatgctatttgcattgacgactggaatgtttgttctccaaagtccttggcttgtggctgattggtttgagattaactatatgttggggatggtttttgtgttggttgcactagttagatcggtggatttttactcttcttatctcttggtgatggggcgtagatttttgttgctcaagattcagctctctatgctttttctgttttgtgtaggcgcgttaatatttaaagtgttcctctcgaatacagggctttgggggtttgctttaatggtgctgtcgggattcttggtgtttttggtgtgtctgatattgtcggcttggtttgtaagtcgtaataaagatttttgtatttaa

SEQ ID NO: 343471 - DNA, 906 bp, Pseudomonas aeruginosa
atgtatgtaaataccttgatgtgcgctataccattgttacttctaagggttcgcgagaatttggcgcgatttatatttttctttgagtgttgcctgcttgttttggttcttcaggttgtgggtgagttttttatttatttctatgggaagagtctttgggagaataaggcttttatcggagggttggggaatccgtcgagctttggaattctttgtgacttgttaattgcctatttgttgttctggcgtaaaaaatcgttttattctttcttcgcattttttttattgtgtgctggagtcgtcatgactagcagcatgctgccggtgcttcttttgacttttattaccgttgcttggggaatgcttcgatctggggttaaatttgcaattctttgtctttcggtggctctcttatttatggttttttctgatcaaattttaagtgaccatcttcgctataagttggcatcaatggttggggtgattgatggtagccaagctgattcatcggcgtcggtgtccgtcagggtgaaaatacataaagagtatttagagtctttggggcgtgatgttccaggctttttgttttatgggttttcagaacgctattataatggtgtggatagtcagttgattacatatctttctagctttggtttgttggcttcggggggcttctggttttacgctgttttatctttttgtcgttctatttttaattcctcgcgtgcatctattttttttgttgtaggtatctttatatttataatagctttcttgtttaataggattcttgattattatcctatggcattgtttttctttttgatttgcatgctaccttcgtctcttgacctaagtagtccgcgaaatggtggaatagataaggggattgagaaaatttaa

SEQ ID NO: 343472 - DNA, 1092 bp, Pseudomonas aeruginosa
gtggaatatcaaaaaacggtaaaaatgggttgtattgtgactaacggcattggctcgagaaaacaatcgaaagattacgaaattgatgtgttggagctcgttcgagggatatggtcccggaagtggcttgtcatttcagggactgctcttggggcggttctggccgcggcttatgcatttttcagcgagccggtatatgagtcgcgagtggcggtactacctccttctcttagcgatgtggcgggattcaatatcgttcgcggaaaggatagtggccttcctccttttactgtcagtcaggtttattcggtgtttatacgaaacttacagtctgaaggtactcagagacgattctttcgcgagatatatctaccttctcttcagcagagtgaaggatcgatggacgtcttatacagagcattttcagaggacttgagggtcgtgccgccaaccaaggagttgccggagcgttatactgtggtgttgaatcgccatgatcctcaagaagctgcgaggtgggccaagcaatatatcgatctcgctgctcagcgctcgatggatgaaatgcgagggaacgctcagcgtgaacttgaagtgaagggacgtaacattcagcagcagatagacaccttgcggcaggtagtcaaggagcgtcgtactgaccgcatcgctcgattaaaagaagccctgcaggtcgcggaagcaataggtgtggaaaaaccacctcttattggtccccaggttgatcagcagttgtccgctataatggaaggtagtcttatgtacatgcgtggaacaaaagctttgcgcgccgagataaaggctttggaagcacgtatttcggatgatccttttatacctgctttacgtggtctgcaagaacaattggctctctatgaaaatgaaaaattgaacttcgatagagtcgccgtctttcgacaagatggggctgtagaagcatctgatgatccgattaagccgaggaaaattcttatattagttgtgggagttatattgggcggattaataggctgtggagttgctttgctaggattcctctaccgagaaaaaagtgttgatagtggggcttga

SEQ ID NO: 343473 - DNA, 303 bp, Pseudomonas aeruginosa
atgcaatggtttaagcgatttgctgctatagcggttctgctagtggtatctatcgcggtcgtggcattcgttctggagaatcaggggctggtccggctggccctcctcggttcccagtctcctcaatggcctttggctatctatctcattgctgcctttgtcctaggtggactcctggcgctggctatccaactgccttccctagctatctcgcgtgctcgagccagtggcctgcgcgcggagcttatgcaggcccgtaaagaagtcgaagccttgcggatggagtcttcgaaagcctcttga

SEQ ID NO: 343474 - DNA, 168 bp, Pseudomonas aeruginosa
atgcctaggcaagggcgagtggttttaccgaattatccgcttcacgtggtccagcgggaacacaatcggcaagtggtattcgtcgaggacgaggactaccagcgttacttctccgatctacgggacctcaaggatgccttcggtatcaaggtctacgcatttgcctga

SEQ ID NO: 343475 - DNA, 1686 bp, Pseudomonas aeruginosa
atggcggcgccgcgagtagccatgcgaaacatcaaagaatgtctgcgcctcaagttcgaggccggtttgtcccacgagaagatcgcccgcgccttgcagttgtccaaaggcgtggtcagcaaatacgtcacggcggcgcgcgtggccggactggactggccggcgctggcggccatggacgaggccgcactggcggccgccttgtttgcgtcggcgccgacaaacaagccgcgcggtgagcgggtgccacccgacgtgctgagcatccaccgcgagctgcggcgcaagggcgtgaccttgcagctgctgtgggaggaatatctcgccgcgcatgcgggccagccgacctaccgctacacccagttcgtcgagcactaccggcgctacgcccagacgctcaaacgttcgatgcgccaggtgcaccgcgcgggcgagaagctgttcatcgactatgcagggccgacgctgccggtggtcgacccggccaccggcgaagtccgccgggcgcatatcttcgtcgccgccctgggcgcctcgaattacacctatgcctgcgcgacgccgggcgaaacccaggtggactggctgacttcgctgggccaggcactgacctactttggcggtgtgccggagatggttgtgccggacaatccgcgcgccctggtcgcccagccagatcgctacgagccgggtctgaaccgggcaacgctggagtgtgcgcggcattaccagacggtgatcctgccggcccggccacgcaaaccccaggacaaggccaaggccgaggtggcggtgcaggtggtcgagcgctggatcatggcgcgactgcgccaccggcagttcttcagcctgcatgcgcttaaccaggccatcgccgagctgctggaggagctgaatcgacgcccgttcaagcgcctcgatggctgccggcgcgactggttcgagcgcctggatcgcccggccttgcgagcgctgccggtacatccctacgaggtcgccagcttcaagcgctgcaaggtcaacatcgactaccacatcgaggtcaatggcagcttctacagcgtgccctccgccctggcccggcagagcgtcgaggtgcggctgacagcgcacaccctggaagtgctgcatggcaaccggcgcgtggccagccatgtgctgctgggccgtcgcggcgcctacagcacccagcgcgaacacatgcccgccgcacaccaggcccatcgcgaatggacgccgcaacgcctgctcgactggggcgcgcggatcggcccctacacgcgccaactgatcgatcaccagctgacccacaagccgcatccggagatgggctaccgcgcctgtctcggcctgctctcgctggctcgtcgctacggcaatgcacgcttggaagccgccgccgaacgggccgtccagctgcgcgccttcaccgggcgcagcgtgcgcaacctgctccagcaaggcctggatcagcagccgctgcccacgcgcaccgccgaaacgagcttacccagcgaccacgagaacgtccgtggcgccgactactaccaccccccgcaacaggagctgttcgatgatgctgcaacacaccctgaatcaactgcaccagctacgcctggacggcatggcccgcgccctggaagagcaatggacgctgccggccagccacagcctgagcttcgatga

SEQ ID NO: 343476 - DNA, 1230 bp, Pseudomonas aeruginosa
gtggagcacacagcagcgcacgctcgcaatgaacaggagctgccgcaacctggcgcaattgccaagggctcgcggcttttttatttcgcctgcagcattattttcgtagccttcaacctgcgcactgcatacccaagccttgcggctgtgcttgccgatatatcaagcaaattgggcctgccgcctgccgccgccagtgcaattaccacgctgccggtactctgcctggggttgttcgcgcccgtggcgccctggcttgcccgcaaaatgggcacagaacgcacgatattggtattgatggcggcgttgtccgtgggactattgatacgtggcgctgggaacgtcagcggcctggtggtcggttcgatcgttatcggcagtgccatcgccgtcatcaacgtattgctgcctgggcttatcaaacgtgacttcgccaatatcaccgggctgatggccggcctctactccatggcgctgttgagcggtgcggcgactgccgcagggttcaccctggcgctgcaaagcaccttgggcggtggctggacaacggcgttggcgctgtggtcagtgcccgcagcggcagcctgtgcctgctggattttccaactgcccaagggcagggcgctggcacccaaggctgcgccgcgcgtactaggggtgtggcgttgcgcgctagcctggcaacttacgctgttcatggtgctgcagtcgatgtattcgttcaccgtgctcggctggttggccccgtttctgaatggccgggggatgacgccgctgcagtccagcgtcgtcgtctccagttcgatcctgctgcaaattgtcgcttgcctgctcgggccgctgatagccacacgcttgccgaatcaatcctggttcaatgtggttgtggtggtgctcaccacggtcggtttccttggatgcctgtccgcgccgctcggcactgtatggctatgggctggggtacaaggcatcgggcagggcgccctgacttccatcgccatcaccatgattgtgctgcgctcggcaaatgcacaggtcgcggcagagctttcgagcatggtgcaaggcgtcggttacggcctgggcgcactcgggccgctgctggtcggggtactttacaggccggccattggctatgcgcacattgagatatttcttagcgtggtaggcgtagcgatgctgtatttcgggtatacctcaggtcgacaccggctcgtagccgctcgctaa

SEQ ID NO: 343477 - DNA, 1212 bp, Pseudomonas aeruginosa
atgcaaatgccgaaaacaatacagattcacaacggcgaaaaagttaagccgacgttctcgcaccaggaatacgccaaccgtcaatccaagttgcgcagctacctggcccagaacaatatcgatgccgccgtcttcacgtcgtatcacaacatcaactactacagcgatttcctgtattgctcgttcggccgtccttatgccctagtggtgactcaggatgccgtggtgtcgatcagtgccaacatcgacggtggccagccatggcgacgtaccgtgggcaccgaaaacatcatctacaccgactggcagcgcgataactattttgtcgcgattcaacaagccttgcccaaggccggacgtatcggtatcgagttcgatcacctcaacttggtcaaccgcgacaaattggccagccgctatccgcaggccgagctggtggacgttgccgcgccgtgcatgcgtatgcgcatgatcaagtcggctgaagaacacgccatcattcgtcacggcgcccgggttgccgatattggtggtgctgcggtggtcgaggccttgcgagaccaggtgcctgagtacgaagtggcgctgcacgccacccaggccatggtccgtgaaattgcccgcaccttccccgatgccgaactgatggacacctggacctggttccaatccggtatcaacaccgatggcgcgcacaacccggtcacctcgcgcaaggtcaacaagggcgacattctgagcctcaactgcttcccgatgatcgccggttactacaccgcgctggagcgcacactgttcctcgaccattgctccgatgagcacctgcgcctgtgggaggtaaacgtcaaggtccacgaggccggcctgaagctgatcaagcctggcatgcgctgcagcgatatcgcccatcagttgaacgagattttcctcgagcacgacctgctgcaataccgcaccttcggttacggccattcgttcggcaccctgagccattactacggtcgtgaagcgggccttgagctgcgcgaagacatcgacaccgtgctggaacctggcatggtcgtgtccatcgagccgatgatcatgctgcccgaaggcctgccgggtgccggtggctaccgcgaacatgacattctgatcgtcaacgaaaacggcgctgaaaacatcaccaagttcccatacggcccggaacacaacatcatcaagaagtaa

SEQ ID NO: 343478 - DNA, 393 bp, Pseudomonas aeruginosa
atgcagcaattgactgaaaccagcgaaaacctggccagcgccgtgcgtattggcttcctgctggccgaagggttcgatttctacgccttggccgctgcgctggaacccttgcgccaagccaacgacgtggcccgctgcgtggtctgcgaatggcagatactgagccttcagggccagccgctgaaggccaacaatggtatcgtgatggctaccgtacaactaagccaggccaagcctctggatgtgctgattctgtgcctaggcagtgagttgcagttgtgtaccgatgacagcgtgcgggagtcgctggcgctgctgaccaaacctacttgccgcacgctcgatgtgggcgaattgaccgagctgatcggaatcgcccggttgagcccgtag

SEQ ID NO: 343479 - DNA, 1089 bp, Pseudomonas aeruginosa
atgactcaaccgttagtggtattcgataacgtagccaaaaactttggcagttacgtcgctgtcgaaccgatgaacctggaaatccacaagggcgagttcgttgcgatcatgggttccagtggctgtggtaaaaccaccacgctgcgcatgcttgccgggctcgacaagcccagcagcggcgaaattcgcttgaacggcgagcgcatcaacgacctgtattcctggcaaagggacaccccactggtgtggcagaacctggcgctgttcccctttctgaccgtgcttgaaaacgttgagttcggtttgcgcatgcgcggcatgggcaaagccgaacggcgcaaaaaagccctgcaatggctagagcgcctggacttgggcgagtttgccaagcgtgatatcagcatgctttctggcgggcaacggcagcgggtggcgctggcgcgttcactggttaccgagcccccgatactgctgctggacgaaccgctcagtgccctcgatgcgcacctgagcgtgcgcatgcaggcggtgttgactgggttgcagaaggaccttggcatcaccttcgtctatgtcactcacagccaatcagaagccttcgccatggctgaccgcgtggtgatcatgagccgtggccgggtcgagcagattggcacgcccaaggctattttcttcgaaccgcacaaccgttttgtcgctgagttcgtcggcggcaagaacatgtttgacggcgtcgtgcttggcctcgacgacaccgggctggtgcaactgaactcggcgcatggccgctttctggcgcgcttgcccgaagaccgacctgtcgaggtaggtgaagaggtcaccctgtgcatcagtgccgagcatatcaacctggccgtacaaccgaccagcaccagccgcctggagtgtaccgtggtgggagaggagttcatcggttcgatggtcaacgtctacctggaaaccgccaacgggctggaactgcaagtgcagaggctgcacgcggattacgacttgcttgggctcaagggtgggcagacggtgcatgccgggtgggacgacgcgcgggcgctgattttacgtggcaattag

SEQ ID NO: 343480 - DNA, 810 bp, Pseudomonas aeruginosa
atgaacgaacatcgagtcatcaatttcatgctgcgcagcttcgtagtgctggtgttcttgttcatcctcacgccaatcattggcagcttcgtgttttccttcgacgtcgaccgctttccttccttgcccttgggtggcttcagtttgcgctggtacgaggcgattgccgccgacccgcaagtctggcaagccttcaacaacagcctggtggttggtgtggtggtatcgctggtttccacgctgttgggcttcactgcagcctacaccgactttcgttatcacttttttggcaagtcggtgtacatggcattggcactgctgccaccgaccattccggtagtgattctgggcctggcgatgctcgcgttcttgtcgcgaatcggcctgtccggcgagctgtatgccgtcatgatctgccacatcgtcatgtgctcacccttcgccatggcggtgattcgcatgcgcctggcgcagatggagccgcagctggaggccgctgcctggaacctgggtgccagccaatggcaggccatgcgctacgtgatcctgccgttcaccgccccgagcattttcgccgcactgttcgtgaccatggccgtgtcgttcgacgagttcgcggtggcctggttcgtctcggggcttaacgagacagtcccggtacgcatcctcaataccttgcaagggcaggtcagcccgaccatcaatgcgataggcacgatcgttttcatgaccacgattacgctgacgatcgttgcccaggttttgctcatgcgccggcagaagaaaccggcatacggcaaaaacagctga

SEQ ID NO: 343481 - DNA, 918 bp, Pseudomonas aeruginosa
atgatttcgaacaagctatcgcccccactgcccgccagtgaggagcctgcacgcacgcgtgggcagttcggcaagcgcacctggcgcctgccggggtatgggctgagcctgtctctgccgatactggtctggcaactgctgttttttgtagcgcccttattgtttctgctgaccatcagcttttggctggtgcgcaactttcgcatggtccctgcgttcgagtggctgaactggaagtacctgttcagccgcgagtacttctgggatgcgtacttgcacacctgggcgatggcggcgggcgccagtgtgctgattagtgccgtggcttttccgtgcgcttataccattgccttcaagttccgcgaatcaacccggcaatggttggtgctgatgttgatcacgccattttttaccagttacctggtgcgcacctattcctggcaagtctttctcagtgaccaagggctgctcaatagcgccctggcgttgctgggggttggcccgttgcccatgctcaataccacctttggcagctatgtgggttacttcaccctgtgcctgccgctggtggtgttgctgcagttgttcagcctcatgtacatcgaccgcacgctgatcgaagctgcgcacaacttgcgcgcgggccgcttgcgcacggtatttggggtagtgctaccgtcgacgcgggtcggcatcgtcatcgccgcgctgttctgtttcatcatgaccttcggtgactttgtcagcccgctgtatctggggggtggccaaccaccaaccttgagcaccttgattaccgacacgaccaaatcggggcagcaatggccacgcgctgcggttattgccacaacgatgatcgtgactttgctggcgacagcgttcctgatggttcgctacgcctacaggaggcgcgcatga

SEQ ID NO: 343482 - DNA, 1128 bp, Pseudomonas aeruginosa
atgacgtatcgcgccgatctttcacgccgcacctttatcaagagcagcagcattctggccggtgtcgcggcgctttccggggtactgccgagcagaacctttgccgcggccgaaaaagaactggtgatactggcgtgggcaggccacgccgcgcccgacatcgtcgcggatttcgagcgcgagcatggggtcaaggtgcgggccaagtactacaccggcggcgataacatgctggggctcatttcgcagtcaccaccgggcaccttcgacctgatcctgtcggatgccgagtatgtgcaacaactcaacgccgccgactatatcgagcgactggaccctgccgattatcctttcgatgacttctacccagagtttcagcactttccagggcactggcagggcgatgaattgtactcggtcatggtccgcttcggctttctcggcatcgccttcaatacccagctgctgccggagtccaaggcgaaaagctaccaagtgttctgggacgacagcctcaagggcaaggtcggtcacttcgactggcacctgccgaacctggggcagatcagcttgctcaatggcaacaggctgccctacgacatcgacgcggcgcactggaagaggctccaggagaaaaccatgagcctacgcgggcaggtggccgggttcttcgattatggcagtaccttctcctccctgaaaaacggccagatccacgcgatgtgtggcattggtgactggattaccggggtcttgcagcgtgccggggcaccggtaaaaacagtgatacccgaggagggcggcctgcaatggaccgagtcgtattgcatcgccaagaaagcccgcagcccggaacttgcgaagaagttcattcaatacatcacctctcctgaaggccaggtgaagtcggcgaagatggaggcttacccggcgctgattcccaacaagcgcggctgggagttgctaaacactaccgaccttgccgaagccaaacgccaaggcatggtactgggccagcgcaatgtcatggatgacatccgcgaggggcgtattcagtatcgcgcgctccccgtgcagcagagcctggaggactggaacgacttctggtcgcaatacaagggcgcttga

SEQ ID NO: 343483 - DNA, 783 bp, Pseudomonas aeruginosa
atgaacgagagcgtagtggttggcgaactcacctggcctgagtacgcacagaaggtagcgtccggcagcacgattttcttgccggtgggcgccttggagcagcacggtcatcacatgtgcatggaagtggatgtgctattgcctaccgccctgtgcaaggcggtagcacgagaagtcgacggtttggtgttgcccgccttggcctacggctacaagtcacagcagaagtccggcggcggcaaccacttccccggcaccaccagcctggatggcgcaacgctgacccataccatccaggacatcatccgcgagctcgcccggcatggggcgcgcaagctggtcttgatgaatggccattatgaaaactcgatgttcatcgtcgaaggcattgacctggcgctgcgcgaactgcgctatggcggtatcaccgacttcaaggtggtggttctgtcctactgggacttcgtcaatgcgccggcggtcatcgaagagctctaccccgaaggtttcctcggttgggacatcgagcacggtggcgttttcgaaacttcattgatgctggccctgcaccctgaaaaggtcgacctgagccgcgccgtcgaccacccaccggcaaaattcccaccttacgacgtcttccccatcatccctgaacgcacccccgcctgcggaacgctttcctcgcccaagggcgccagccgagaaaaaggcgagttgactctgcgggtttgcgtagagggcatcagcagcgctgtgcgggaggccttcgacctgcagaaatag

SEQ ID NO: 343484 - DNA, 1386 bp, Pseudomonas aeruginosa
atgtccagcaactcaactctggcccccggcctcaagcagcgtcacgtcaccatgctgtcaatcgctggcgctatcggcgccggcctgttcatcggatcggggcatgccattgctgcggccggtcctgcggcaattctcgcgtacatcatgtctggcacgctggtcgttctggtcatgcgcatgctcggagaaatggcggtggcctcgcccgataccgggtcattctcgacctacgccgaacgggcaatgggacgtacggcaggctttaccatcggttggctgtactggtggttctgggtgctggtcattccaatcgaagccattgcggcagcggccattctgcatgcctggttccccgcgatagaaacctgggaattcgccctggcggtcaccggtttgctgaccttgaccaacctgttcagtgtggcgcgctacggtgaattcgagttctggtttgcgatgctcaaggttatcgcggtgctggggttcattgctctaggtgcattggcactgaccggcgcgttgcccgatgtttcggtcagcggcgtggtcaacctgagccatgagtttgggggtttcatgcccaacggcatgaccgcggtcatcggtgctatgctcaccaccgtgttcagcttcatgggtactgaaattgtcaccattgccgccgccgagtcgaaaaatccctccaagcaaatcacccgtgccaccaattcagtggtgtggcgaatggggatcttctacatcgtctcggtgttcctaatcatctccatcgtcccctggaacgaccccatgctggtgcaggtcggttcctatcaacgggcccttgaattgatgaacatcccgcacgccaaaatgatcgtcgatatcgtggtgctgattgccgtcgccagttgcctcaactcagccatctacaccgcatcgcgcatggtctattcgctgagtaagcgcggcgacggcccacgcgttctgcagcgcacctcagcggcgggcgtgccagtgattgcagtgctggccagtaccgcagtgggcttcttgaccactgcactcaattactttgctcccgacgaggtgttttccttcctgctggcaagttcgggggcggtagcgcttctggtctatctggcaatcgctgtttcgcaattggttctgcgtaagcggatggacagccaaggcactgcgctggacttcaagatgtggatgttcccctggctcagctacctggtcatctgctccataatcagcattctgacgatgatgctggtgatgccagggcatcgcatggaagtggtggcaaccggcgcgctggcgctgtccatcgtctgtatcagcgctattttctcgtctaaaaaaagcacttcggccactgtggcgagcaagcctgcctga

SEQ ID NO: 343485 - DNA, 1020 bp, Pseudomonas aeruginosa
atgggtacgttaaaatcctcgccgttggcaccggaataccctgtcaatgatgccccgctgctgagggtcgtcggtttcctgatcactcccaatttcaccaccattggcttcgcctcggcggtggaaaccttgcgcatggccaacctggcagcacgcaaaaccatgttccagaccctgatcattgcagccgacatggagccagtgagtgccagcaacggcatgcgcatcctgcccgacttcagtatcaaagatgccccaaagctggacatgctgttcgtggtcgggccaaacccgatcgtctccgatcagaatacccgccccatcctcaactggcttcgcaagctggcacatgaccaggtgccgttgggcggtatttgcacgggcagccatttgctagcgcgcgccaatctgctcacgggttatcggtgcaccatccactgggaagatatcgaggcgctaaaggagcgatttcccggcattatcatttccaaccaactgttcgagcttgaccgtgaccgcttcacgagctccggcggcgtggcctccatggacatgctcctacaactaattgcccgagaacctggcggacgagacattgccagtcatgcggctgaactgttgttgtgtgatcgagtacgtggttcgcaagagcgccagcgtgtgcctttgcggcaaaaactcggcacttcccagcccaaactcagtcagattgttactatcatggaagccaaccttgaagaccctatgaccttggaagagcttgccgaactgaatgagatctccgttcggcaaatggagcgtttgttccacaagcaccttcaaaacacaccgagtcagtattacttggagcttcgcctgacacgggccaggcaactactgctgcacagtgaatctcaagtgcgtgatattgccctcgcctgtggattcatttcgccagcgcatttctcaaagtgctacagtcgcttctttggtgtctcaccaatcggcgagcgaaaaaaagtagcctcttcacatcactga

SEQ ID NO: 343486 - DNA, 864 bp, Pseudomonas aeruginosa
gtgacccacctgatcgatagggccctgatgcatatgactcaagtacgacgctcgcgcaaccacattctcggccagttgctgaccggagattactcgagcttggccattgcacgacagcgggctgcgcatttgcaactgacgcttgatatcccacggcgactggtagcgctgcgtttgtttggtatcgagacgctgtttgagcgccaaggcctggctcagggcgagcagttgtggcaagccactcggcaggtcttggaagaccaacttgaagcctggagccgcagccgcccaggaacggtgacggtagatatgcagggcgacctcttcgtgctgctgctagtggatgccgatgacctgccggcagccttgaccacgttgcgtcggcaactgatcggagtggcaggggagttggaggtgtacatgggtctgtcgagcctggctgaagactgcggacattactgccgactgctcaacgaagcgcgtcaggcgctgaatgtggcgcagaacctgcgcccggagagcggttactgcgatttcaacaagttgggcgtgttgggtttgctgcaggggatagtcgaccacacgctaatcgatgacttcgtcgaaatgacactcggcccgctgttcgtgcccggtcgtaaacaccctaatgtacttgtacataccctcgaggctttgctcaaggaaaacggcaacgggatcaaggctgcccagcgcctgggacttcaccgcaacactattaatcaacgtatccagcgcatcgaacaaaggagtgggaaatccttggatgatccactttttcgtatgaatgcttcgatcgctattatggtatggcacatgtctgtagcccgaggtaaggaataa

SEQ ID NO: 343487 - DNA, 390 bp, Pseudomonas aeruginosa
atgtccaagcaacccaacttcatcagccagcagcgccattcgcagaaccacagatcggatgcactgaacaataatcgcggcacgtcgggtagcaacccgactaatgctctcgttcatggcaatcgcggcaaacagctcaacccaagccagcgcgaggcgtgcgtttccccagtcatcattggccgggggtatcaaggatttcagttgagtagagatacttgcttggtcaccgaatgcgagttggtcaagctggccttcgatgcattcggcgtgcttctccgcaaggaagccagtcatgataaaatcgatcagacgcagaagaagaccatccaaaaacagttggcgagactgtcccaagaagaagggggcttgctcgacttgtccagatag

SEQ ID NO: 343488 - DNA, 858 bp, Pseudomonas aeruginosa
atgaccaccagcctacgcgaactgattggcggtatcggcgctagcgtcatccaaatcgccagcgccgccgaagagctgtcggcggtcaccgagaagactagtgtcggagccaacagtcagaagatcgagaccgaccaggtgaccaccgccatgaacgaaatgaccgccactgtactggaagtcacacggaatgctgtggaagcatccaaagccgccgtcgtcgccgaccaacaggctcgcaaaagcgacaaagtcgttggcgaagccatcgcccaaatcgaacgcctagcgctcggggtaggagggtctactcaggccatgagccagctgaagcaggaaagtaacaagattggcagtgttctcgatgtgatcaaatcagtcgcccagcagaccgacctgctggcgctcaatgctgctattgaggctgcgcgggccggtgagggcgggcgcggctttgccgtggtggctgatgaggtacgcagcctggcccagcgcacccagcagtccaccgaggaaatcgaggagttgattgttggtctgaaaagtgggaccgagcacgtcgcgaaggtgatggaaagtagtcacgacctgaccaatatcactgtcgagctggcccgccgggccgcctgctcactggaaagtttcacccgctcggtgtcgtcaacccaagcgatgaatcagcaaatcgctgccgagcaacaaggcactgtggctgaagacatcaaccgtgatgtgcttagcgtgcgtgagatctctgaacaaaccgccagtgctagcgatgagaccgccgcctcaagtatcgaattagcacgccttggccatgagcttgattacttggttaagcgctttcgaccatag

SEQ ID NO: 343489 - DNA, 2256 bp, Pseudomonas aeruginosa
atgcccttcgaaccaccttcagatcagcaccgcgacggtgtcgatccgatcacgtcaggaggcgtaaagtcgattcctgcgcctgagcgtagtaaatttggcggtaccgatcgcctgtccaggcgtccaagctacgatgacgatacacccgtatcgcgcagcgacctgagcaaaggccatgacgaactcgtcgagcatcgtgaggttcatatcaactggagcgtcttgttgatttcgtcagtggtgatactgtcgttttccatcaccacgatcctcatgcccgatgctgcacgtgtggcaatgaagcagatcacagactggatcgcgacgaacctgggctggtactacgtactgacgatgaccctggtgatcgggttcgtgctatgggtggcgttttccaaagagggggacgtgcgtattggccccgaccactcgcggccgcagtacaagctggtgacgtgggtcgccatgctgtttgccgcaggggtcgggatagacatgctcttctattcggtcaccggcccggtcgtgcagtatttgcacccgcccagcggcaccggcgggactgccgaggctatacaggacgcagtgatctggaccatgtttcactatggcatcgcaggttgggcgatgtatgccttgctgggcatggccatgggttactttgcctatcgatgggacatgccgctgtcgattcgcgctgcgctctatccgctgtttggcaaacgcgtgcgcggcccgttgggcgatggcatcagcatcattgctttggtcggtaccgtgtttggcgtcgccacatcgatgggcatcggcgtggtactgttgagcgtgggtttctcgctgatttttggtctggatcagggccttaccttgcagaccgtactggtagtgggggctgtggcactgaccattgcggctaccacgtccggcgtcgaccgtggtatccgctggatcgccgagctgaacctatggagcgccgtggccatgatgctctacattctactgaccggggagacggcattcctgctaaacgcactagtgtcgaacattgggcaatttcttgtcacgttccccgcgcgtacctttcaaaccttcgcctactcgcccgatggtgccggatggatggcgggctggacgttgttcttctgggccttctggctggcatgggggccattcgttggcgtgttcctggcgcggatttcgcgggggcgcacgctgcgcgaattcgtcctggcggcagtgaccgcgccggtgctgtgcgatttcatcattgtttcactgtttggcaattccgcactgtttgaggtgctgcagggcaataccgcttttgcccaacttgcgatggacagccccgagcggggttggtacgcactgctggagatgttcccggccccaatgttcttgattggcctggcgacgctgtcaggtcttttgttctacctcaccagcgccaattccggggcaatggtgatgtcgaatttttcggcctcgattcccgacccttcccatgacgggccaagctggctgcgtatcttctgggccttgctcacggccatgctcaccgtggcgatgctagttgcgggaggggtcaagacaatggagtacgccacgctgatcttcgcgctaccggtgacgatcattgcttatctggtgatggcatcgttctacaaagtattgcgcatggagcgcgctgaacgcgagggaagggtaatacgtcgtccttccacgacagctatcggggggcatgtcccggagcgctcctggaagcagcggctcgagcacttgcgggcattcccatcgctgcgccaagtcacccagttcctcaaccgtattgtcgggccagcactggacgaagtcgcggccgagtttcgcaatcaggggtatgacgtcacacgggaaagtgtggtcaacagcgatggtttcgaggagccgttgctgctggtctcgatggatacgttccgcgatttccattaccacgtggccatcgtagaggcgccagtgcccatgttcagcggccgtatgacgcgagagatcgatgtctattatcggttggaggtgtatacccagaccgggtctggtggatatgacctgatggggctgaccaaacggcaggtcatcgacgatgtactcgatcgatatgagacccacctggcgttccttgtcttttcgagcgaaaatgctactgcctctgttctgacacccaggcagtaccagccccctgaggcgcccgatgaatccgggcagggcccgcgctga

SEQ ID NO: 343490 - DNA, 963 bp, Pseudomonas aeruginosa
atgatcttcaaattacaaggttctagtgtgttgctggcaggggttttcatcgtggcgtctcaggtggtcatggcagcaaatacacaggcagtgactcagatttatgcggggtccgagggcaacgtaatcggttactcccttgcgtttgatggcataatcacgcagaatagcgtgattcaattgcctgcactcttacagttcgcagttgccgaaaaaggcaatcgacacctttatgttgcgtccagcaacatcgacgatgccaagcctggcgactttcacaggcttagcgctttcaccatcgatcatgcttcaggtcacttggaacccctggacgacccagagaagtttgaacagtggccagtctatctgacgctcgatcgcgatggcacacattcctgctggcctacaatctggcgccaactctcaccgttcatgcgctggggtcagatggtcgtttcggtgtacagatcaagcaggatcaaccgattaagtcgggggttttcacccgtcaggtcacggtcgtacccaaacaacagatttgtgatatcaccgggtcgtggcaatgatgcgagctccagcaacccggaaaatttggggacgctttccacatatgcttatgtgcacggcaagtttcccccagtggggggcgatacctttgcatccaaggttggtccatgccatgtcgtctaccacccttgtgcgcccctggcgtacatggcgaaggagcgaggcagcagtatctacacctatcggttgacccaagaagggcggttggccaacgaacccgtgttcaaaaccagtatcctcaacccgcactggcaagccgaagacgatgagggcatcaacaaagacggggtgattctggtgcggccagacggcaagtatctatacggcacgaaccgctccgataagcttcacacgatcggaaaacccgccgtgttcaaacatgggaaaacgacgtag

SEQ ID NO: 343491 - DNA, 297 bp, Pseudomonas aeruginosa
atgttggtcggtattgatcacgagcatcgccacaccatcggttataccacgcaggcaatgggcgttgacgtgcaggctggcacggttaacgacgcctggatccagtgcggtagtacccatcagcacgactttgactttgccagcctagggcttcttggcctgacgttgatgaaccgttatatccaggggcgcgacatcgatgtgtccccggcagaccataatggcaaagaattgatacgcgaatcagaactcgcctattcggtacagaccgggacgttcaaggacctggtgctttaa

SEQ ID NO: 343492 - DNA, 738 bp, Pseudomonas aeruginosa
atgatctcgataagaagctcgtaccacccgattgatgccgcaattctgtggtgtggcctttcagagtatgaagaagagattctgcaggtggagttttcccaccctggcagcctgcgaaagcaattctcgcagtggccgggtctacacgaccatctcgagtgcatctacgacgccattctcagcggcgaattgcccgccacctacctggggcagccgatcacttcggatagcattgtccaccgagtgtactactccgttcggcgcgccgatctactgctctggttcttacgcagccagcccgatcagaagcccgccttcctgtttacccaagacgttgaccactcaggatgcgtcagcctgaatgcgcatttagccaagcaagccgagctcgactatgccctgcatacaattgagcaactgcaacaaacctatactgccgccactgatgagatggcatccctgtccgcgcttaacgacaaactgaaagcgcgactcgagtcgcttggcatcccgtctgagacttcggaagctatgcacgacacgctgatcggcgccatgctcgcgaccacgctcgggaaaaacccaaacggcaagcagcagtcgatctactccagtcaagcagcactggtccaagccatcctgctgcgttttccaggagtggatggcctgagcaaaagtaccattgatcggcgatttgccgacgcgcgccgtcttatagcccaggtaaaacggggctga

SEQ ID NO: 343493 - DNA, 216 bp, Pseudomonas aeruginosa
atgcaatcgaccaaccctgcccctctgccagtcaaccgtcacatcatgcgccgcgatgaagtggagcaaaaaaccggcttcaaacgctcgcacatctacaacctgatgaaggccggccagttcccacaatgccggcgcatcgggacgcgcgccgtcggttgggactcactggaaatcgaacaatgggtccaggaccggctgtccacgggagagtga

SEQ ID NO: 343494 - DNA, 879 bp, Pseudomonas aeruginosa
atggacgtcctctcacttatttcgaccaagggcggcgcaggcaagaccaccgtcgccgccaacctgggcggtgtgctcgccgatgccggccttcgcgttctactgctcgatctggacagccaaccaacgctgtccagttacttcgccttgggcgagtcccgggagggcggcagctacgagctcattgcccaacggctcacggcgcatgagcaggtcatctccaccaccgtcattcagcacctcgatttgatcgtctccaacgaccgcgccggacatatcagcaccctgctgcttcacgcggccgatggccgactacgactgcgtaacctgctgcctgccttcgaggatcattacgatgtgctgatcatcgacacccagggcgcacgcagcgtggtggtggagatggtcatcctcgcctccgcttgcgctctgtgcccagtcccgccagaaatgctcgccgcacgtgagcttcgccgtggcacgctgggactgtttgaagagttggagccctaccgctacctgggtgttgacttgccatcggtgaggctgctgctcaaccaggtcaacgccaatcgccgtgacacccgcttgatcatgcacagcctgcaggcgtccttccaaggcgacccgcatgtcagcgtctgcacaacggtgattcctgaccgtgtggcctacaccaatgccgcatcgctgggactgccggtgcaccgcgtcgagcctactccaccctctggcagccgaggcccttgcggcgcggcggtcatgcttgagctggccatcgagctgttcccgcagtgggctgagcgacttgtcggctcgggcgcatctgtgcccggccaagcgtcagtgatcgaccgccgactcaaccgtcgcggctga

SEQ ID NO: 343495 - DNA, 1542 bp, Pseudomonas aeruginosa
atgaagccgccatctcccgaagacatcacccgtcaattgcagcagacgcattttccgcagaaacagggtcgcgacatcgcgcccgtgctagccgaggacacaccgttggtggtcaacctcgaacaattgcgcccttacgagctcaacccacgggtggtccgcaacccgctgtatgacgaaatcaaagcctcgatccgtgagcgcggactggatcagccccccgcgataactcgtcgcccgggtgagccgcacttcatcatccgcaacggcggcaacacgcgcttgagcatcctcggcgaactctggcaggaaacccgcgaggagcggttctttcagatccactgcctgttccgcccttggcagtcagagtcgcatgtcttgatcgggcacttggccgaaagtgatctgcatggccagctcacattcattgagcgatccctcgcggtggcaaaactcaaggacatgatgcaggagccggatgtcctgctcagtcagcgtgaactgtccacacgcttgagcaagggcggctacccgatttcacaatcgcacatcagccgcatgttcgacaccctcgagcacctgcttccggtcatcccgcaggtgttgtatgccggtcttggcaaacccaccatcgtccgggttatcaacctgcggcgccgggcggagtccatctggaaccagtatttgggggacgttccgcaattcgcgctgctgtggttcgaagtgctgtcggcgttcgacagtgataagcccgaactgagttggagtgagctgcaggatgaactggttgccaggatggcggtgcagttgaagcagacgccccgcctgctcgccttggaaatgcaccaggaaacgcgtcgctcaccgccgccctcagacgcgcctcagcctctcccacaatgctcaccaggcgaggtcttcccccagccaccggccatcgaagatgaagcagaaacagcgcatcgattgccagcacctgagccgctgagcagcgcgaacaacacctcggcagccgaggctccacgcctccccaatatccgcgaggcgctgagtgaagacgacacgcttgctgcaaggctgtcaaacgctcttgaggtcggcgagtcctcgcagggctccgcctcacctctcggatcagtacaggatgacatctacgccttacgtgagcgttgtgctgacctggcggctgacctggccgcatatgccgatgccagtgccatggtcaaaccgcacgcagagggcttgggtttcaccttggccatcgaacatgaccagcaaatgggcccgcgacacaccggcattcaactattgctctccgccctgctgcgcctgcaggacgacgtgacctggcagcaacgccagcaattgccagccgcgctgtttggccaactgctgataggcgcctacgacctgcccttccccgaacgccctgccctgaccgtgggactcgaccgactacccgatgcccagctggagcagctgtacgccctgatccgccacgcccggcagttgattgacctgacgctgtcgtccacgcgttga

SEQ ID NO: 343496 - DNA, 552 bp, Pseudomonas aeruginosa
atgagtacgtccttcaatctgttaaaccatgcgatgttgaaccaggtgctgcatgagctgcgccatggccgcctgcaacgctgcaaagcgctgggcctcgccgacgaagacatcgaggttctgcaatcgctgccaccgaccaccctgtcccacctggcgcattcatcgatcgcctgggttgaggtcaaagtcgatatcaccgtgctgcgccgcctgatcatccaggccgagcgtgacgagcagaacgaacgcctgatcaaccgggcgctcaagcttggcgcaagctcgaccatcatgtaccgctgcttcggcctggaccattcggaaacagcgttgcgtcgccgcgtgctgaagattgaaacccaccgcggccgaccggtccaactcagtgaggcccaggagcatgccgtgtggaaccgttggagccaactgcggaaggatgatccagacaacgatccgctggacacaatgatgatgctggccgaggaacaacacatcagcctgacgctggtctggcatcaggtcgaactgtacggaggcaccccatgctga

SEQ ID NO: 343497 - DNA, 1218 bp, Pseudomonas aeruginosa
atgctgagtttctacgaagtggactggcaggacgtggtgcgccagtgctacgacgcccttcgacgccggaatgaatggcaggccgcccaggctcaggaagcggccgctgccgcggaaccggcgctgcgcacgatctactacggcgacaacaatcccttgccgcaggccttgttactcgatcgtaggctgaccccgctggagcgcaacacctggcaggtgctgcgctggctgatcaccgtgcggcaggtcaagacgccccgttaccaggacctgcagccctacctggcgaccagcccctgtggcgcccaggcgtcgcgcgagaccatcgctcgggcactgaacgtcctgcggacgacccgctggctcagtctggtcgaccgttcgcgcgatgcccaggggtgcctgcgcggctgcgtctatgtgctgcacggcgatccgttgacggcggccgagcagcttgaactggacagcggctacgcggatctgctgcaacagaacctcagccataccaccaagggggtgcgtgatgtgacgcagcatgtgctggccgaaattcaagccgacccgcaggttgcccagggcgacaaggacaggctgggctcactgccgccggcgcaacaacacacactgccgctgatgggcgatgacacggaggcgcaatattccgaacctggtctgcgccaccccgttcggaatcctcacgcctcggccatcgattccgaaccctgcggcaaggcaccggcttccgctgtagttcggaatgccgacgccggccgtacagtacagaaagaccaaagcaaaaaaagtacagtactggcgcaggtcgagtttggccgagcacgctggcctgaggatttaccgctgaacccgaccgagcggcgcatggcctcccaggcaatgcgccagctcgagccggaacagcaacaagcggtgatcaatgaagcggcggtgcgctgcgcccgcggcgagatccgaaaacccgtcgcctacctgatgggtttgatcaaacgcgcttgccagggcgagttcatcctgtgggctgcccgcaccgagacaacaccacccacgactgcgcctgcgcgcgcaccgaaggccatcccagcggagccacccgatgagcgacccaagcgcggaggtcagcgcaccgcctcgccactggccctctcctgcctggaggaactgaagaaacgctgccgcggttcgcttgcgcctacctag

SEQ ID NO: 343498 - DNA, 765 bp, Pseudomonas aeruginosa
atgaccgatcactaccagctcaacctgggttctctgcgcagcagcatcaccctcaccctgcacacccaccatgcggcgcgcctgtggcaagggcgcatggggcgcgaaggggtgcacccgatcatgggcatggccggttacatcggcgtcaccaacctgctcaagcacgccagcagccaggatgacccgttcgccgactggttcatgctgcagctggaggacaagctcctgcaggccaaggccgaaatgcgtgcgctgacccaacaggtcagtcaggtggaacgcgccctgcccacccaggtcgacatcggcgaaaacctcaatatccatcctgtcaccctccccctgttcatcggcagccagctgggctttcttgcggtctacctgctgaccgactacgacaccctggtgcgccgcgttttgctcgcccaccacacggcattgatcggccgccccgacatggaaacctggatcgatcacggtgcccacgagctgcgcagtctgttcggtctggctcagcgctaccgtctggcgggagtcagtcgggatgacgtggccgccaataacgcccgtgcccgcgaagcgatcgacaagttcggcctgccaccgcaggacattcttgaaggcagccgccgctctcaattcgcgccccccatcgcgcgaagtcaggccacgtcgaatcccgatgagccggatcaacctgccctgccggagaccgaggcacaacctacgccggaagagccgggcgaagggggtgaggcatga

SEQ ID NO: 343499 - DNA, 495 bp, Pseudomonas aeruginosa
atgaccctcgccgatgcgattgcccggcgcttgtcagcagatgcctatcgcgcgttcgcacaaggtgcctccctaaaaggccttttaaagccttttaagagtaaaggggagctgcagcagttcgccgagacgatcctgcgcctgcgcactcaggtcgccgaattgatggccgtgatgctagcaatcatggcgcagccccccttctcgctgctggagttgcgactggtcgtccagcgcagcgcgacgggcaccgacttcctgcgctggcgcagtccggactttcagcgcatgggcgcgcaggtgtggcaggaatcggtggttcacccgcacctgcaccctgagctgcggcgggcgttgtatcagctggagaccaaccgcgtcgtgctgaacctgcagatgagtagcctgcagtcgctgtatcgccaggccgtcgccggtgccaaaaagcttgaggccgccgagctcgctcttacctatttccccaccgaggagtga

SEQ ID NO: 343500 - DNA, 429 bp, Pseudomonas aeruginosa
atgagtacgttatttgtaggtgaaggcaacatcggcagcgttccggaatttcaggagttcaactccaacccggatgaaccgcggcgcctgctgcggctgaacgtctatttcgacaacccggtaccgcgtgaaggcggctatgaggaccgtggcggctactgggcgccggtcgaactctggcaccgcgatgccgagcactggagcacgctgtaccagaagggcatgcgtatcctggtcgagggtcgcacggtcaaggaggagtgggaggacagcgaggacaacgcgcgggtgaccttcaaggtcgaggctcggcgcatcggtatcttgccgcaccgtctggcctcggtctccatgcgcgagaaggcgcaggacactcccaacgccacgcgtagaggcggtgccaagaaagccccgcgcaagacggggtga

SEQ ID NO: 343501 - DNA, 1968 bp, Pseudomonas aeruginosa
atgcgcctgttcatctgcgagaaaccgtcccaagcccgtgacatcgcccgagtactgcaggccagccggcgcggcgatggctgcctgcagggccagaacgtcaccgtcacctggtgcgtcggccatctgctagaaaccgcgccccctgaggcctatggtgattacaaacgctggtcgctggacgacttgccgatcattcccgctcgctggcagttggtggtcaagcccaaggtcgccagccaactgaaggtgatcgaccaactattgcgtacgtgccgcgaagtggtcatcgccaccgatgctgatcgcgagggtgaaatgatcgcccgcgagatcctcgagcgctgtcagtaccagggtccgatcctgcgcctgtggctttcagccctggatgaagcctcgatccggcgggccttagccgccttgcgtccgggcgaacaaaccctgccgctgtaccactgtgcactggcccgttcccgcgccgactggctggtgggcatcaacttgagccgactgtttaccctgctcggccgccgtgccggctttgatggtgtgctgccggtcggccgcgtccagacaccaacgctgcgcctggtggtcgagcgcgaccgggccatcgccagcttcgtgccgcaacccttctggagcgtcgacgcccagttggtggcagaaggcgtgagcttcaaagcccgttggcaggctccagctacggtctgcgacgatgagagccgctgcaccgatgaagcggccgccaggcaagccgcactgcgcctgagccaacacggaacggcccgcattgacaccattgaggtggagcaggtccgcgagggcccaccactgccgtttgacctcggcacgctgcaggaagtctgctcggccaagctagggctcggtgcccaaaagacgctgggaatcgcccaggcgctgtacgaaacccacaaggccacgacctacccgcgcaccgattgcggttacctgcccgagagcatgctggatgaggtgccccgcatactgcatgctctggtggctgccagccctgctctcggccaggtcattaaagagctcgatccctatcgccgctcgcgggcctggaacagcagcaagatcaccgcgcaccacgggatcattccgaccgccatcaccctcgacttcactcagctttccgagcgtgagcaggcggtttacgcgctgattcgcgcccgctacctcgcgcagttccttcctgagcatgaatatctgaaaacccaggtgctgctgcagagtcaggccgatcagttgctcgcccgcggcaagcagattctggtgcgcggttggaaagcggtggtcaacgaagcccacggcaatgagcctggcgagcaggctcaacgcctgcccacactgcgcgaatccgcctcggcggccttgactgaggcgagcgccattgcccagcgcacgcagccccccaaagcctacaccgagggcacgctggtcaaggcgatgaaaactatcgccaaccaggtggccgatccgcggctcaagcaaacgctcaaggacagctgcggcctcggcaccgaggccactcgcgcggccatcatccaaggcctgatcgaccacggttacctgaccaagaagaaacgcagcttggccgcctcagcatcggcgcacaccctgatcgaagcggtgccaccggaagtggccgatccggtgctaacggcactgtgggagcaggcactggaacgcatcgagtcgggccagttgagcgtcgagacctttcttgccaagcaggcgcagtggctgacccgcttggtgcgcagcaacgcctcgctcaccctgcaatcgccaccctccaaagggccgttctgcccggtctgccgcagtgccatgcgccagcgcaaagggcgcaccggcagcttctggtcctgcatccgctacccggaatgcaagggcaccaagccggtagccaaaaccaagcgctcgaagcgcacatga

SEQ ID NO: 343502 - DNA, 540 bp, Pseudomonas aeruginosa
atggctactgcaagcaataacgcccccaccacctatttcaacctgcacacccaaggcatcggttacctgaaccgggtccgcgaagtcccagttcgccgtggccaagcgttcatggcctgcgacatcgccgcgttgcacggcgcctcggacgacgtcgagtacacccgcttcgactgcaaggtcgccagcggtgaagccgaccggctgatccgtgaacacctcgaagacgtgcgcgctgaacgcaaggtcctcatcgcgtttcgcattggcgacctttgggtagatcccttcctgtacgagaaaggcgaacgcaaggggcaacccggcgcaagcctcaagggccgtctgatattcatcgagtggatcaaggtcgatggccagttgagctaccgtgcgcccgcccgcaccgacgctgcctctgacgcgacagcacaagcggagacggatggatataaggtcaacactgacggtgactccgatcagcaccagccaactccaaccaccacccgtgaatccaccgcagcacgtcagtctgcctga

SEQ ID NO: 343503 - DNA, 258 bp, Pseudomonas aeruginosa
atggaaagcttctggctctgcgaagactgtctgcaggcggttgcctacgacgacttcagcgcgctgtcgctctactacagcgaggccgaagtcgaccagcgaatcgcgcagatgcgcaacgagctgcaggcactactgccgctcagcgccgatttcgatccgaacactggcgtcggcatcgaccccttctccacccgcccctgcgaaggctgtcactcgccgtcgcacggcactcgtcatcgcttcacccgcctgtaa

SEQ ID NO: 343504 - DNA, 495 bp, Pseudomonas aeruginosa
atgaacacgccattgaccctggtcgagcccctcgacccggccctgacccagcgcgcccacgaagatgcattgatcaacgaagccctgcagctgctggaccagcgctacttccagcgcggcgaagtcctcatcacccctgccgacgccgcgtcttacctgaagctgcgcctggcgccttatcaccacgaggtgtttgcgctgctgtacctcgattcccagcaccgagtgctggacttcgaggtgttgtttttcggcagcatcgatggggcctcggtgtacccccgtgaagtagtggtcaaggcactggcgcacaacgccgccgcagtcatcctcagccacaaccatccttccggctgccctgaacccagcggcgccgaccgcgtgctgacggcgcgcctgatcgaagtactggcgttggtcgaagtccgtgttctggaccacatcatcgttggcgaaggtcagccgctgtccctggccgaatacggctggatctga

SEQ ID NO: 343505 - DNA, 717 bp, Pseudomonas aeruginosa
atgctcacctcagcccccaacccctttgcccgcggcttccatgcgttctcctgcgaacgtgtggtccaaatccactacgacgaccagtgcccgccctgctaccgctccctgcacacggcccagttggacctggaggatgatcacatcaactgtcaggcctgcgtgttcgatgacgactgtgccgtcatcacggaaggccaggatgtctctgggtttcttcgcatgcagttgcccgcggatggtatggtcaccaccgtgctgtaccagatcacggccgagcggctgactggcttggtacacctcggcgaccttcccagccaagaagcagcggaccaactcatgcagcagctgtccttcgccaccggccagtacagccgcagctgggagatcagctcctcccacctaccggccgacgagtacgcctaccttgagcagcttgcccgcagcgaacgaccggccggcttctttgaatgcttccggttggtcagcaaccgctccatcggctgcaagctgtactcgacaccctggcaccgcagcggccatgtagagagcctgggttgctcggcggcagaggtctgcactcgcctactagacgaacaggtaccgccggtgttgatgaccttgttgctgctggccggccaagccgacacgcgctttctggtgttcgatcccgatgcagcgccgttggcaggactgccagtgtttacagacgattga

SEQ ID NO: 343506 - DNA, 366 bp, Pseudomonas aeruginosa
atgcacacgcccgcacttccttaccttgtcctgatgctcgcgctggcgggttgcaacacgtcgcctgccatcaccccaccgatggcgccagccaaggccgtaccagctccggctaccccctccaagccgttgtcagcgtcaccggcgtgggtccgccaggaccgctacaccctgacgaccttgttcagccgcttcctgccggccgtgcagcaccaactcgggccgatggcgctgctggacgccttgaccatcctcggcggcccggcttggcggctcgtgatcgatccggtcgaacgcagcgtgtgctacgcccttcgcgcaccggtgcccgccccacctcagccgcccctggagatcgcgccatga

SEQ ID NO: 343507 - DNA, 669 bp, Pseudomonas aeruginosa
atgaaagtccatcactttcaggccctggtgctcggggccctgtgcctcggcgccgccgtactggccgccgtgacctacaaccaccagcaacaactgaccgcgctcctggtcgctgctgagaatgcgccagccgatccagtaccggcgctgcggcgggacctcgatgtactcagcgccaccgtcgcggcactcccagcgcaagtgaaagcgctgggtgagcaccagcgccagcaggacgcgactttcgcgacgttgagcaaacagctggatgagatgagcgcgtcgctcaaggccattgaagcggagccgctgggtccgaccaatgccgatctggtcgcgctggaacaacgattggacaacaccgaaaccgccgtccacacccttgaggctcgatcgactgcgccatccgcacagacccagtctgcagcctccgccaaacgggccgccaaaatccaaaccccgacgccgccatttacgttgttgggtgtcgagactcggggcgacgtccgctttgtctcggccctaccggccggcgcgcacgccctgtcgaccgtccacctgctgcagcccggtgacagcctgaacgactggcagctcaaggccattcgccggaaccaggccgtgttccaagtgcctggcctcggcgaacgttcgctgcccctgccgtaa

SEQ ID NO: 343508 - DNA, 639 bp, Pseudomonas aeruginosa
atggttgaaactcaccagcagtccagcgagcaggccccgttgcagcaagcgcgatccgcagcacaggccaaggcctgggggctgaccgatgatgaatgggccaagttcgagcacctgcggagcggtccacgccagtactggtcaccccaactcgacccgctgaccaccctgggtgtggaagccgattcagaccaggagcgccgacgctatgccgagctacaggtgcgcctcgaagccaagcgtgccgagcgcgaactggcctatcaaaaagcctactccgcggcctgggcgcggctgttcccggggctgctgccggtgcaggggatgcgcgatgcaacaatcccgtcgagcagcgcgcgctacgccatttttgtagaggacccgtgctcgacctgtgaggccagcctccgccaatggctgagcatgggcgcccacctggacatctatctggtgggcagccagggcgacgatgcacgcattcggcaatgggcgcgcaaggtgggcattacccctgcccaggtcagcagagatcaagtcaccctcaatcacgaccgcggccgctggttcgccctcggcgccagccgccccttgcccgcgcgctttcaacaggtggaaggaaaatggcaacgcgtcgactga

SEQ ID NO: 343509 - DNA, 555 bp, Pseudomonas aeruginosa
atggcaacgcgtcgactgagcctcgccctggccctgattggggtggctgcggcccaggcaggcaacctacccccgcctgcgtaccagttggctgccgctgaggccgacatcccggcctcggtgttgttcgccattgcccagcaagagagcggcacgccgttgcgtgggagactcatcccttggccgtggaccttaaatgtggccggcactccacagcgtttcgccacccgtgaccaggcctgcaccgcactcaccatggcgctcacccggcatgatcccaaacgcatcgatgttggcctggggcaaaccaacctgggttatcacccggagcgttactccagcgcctgcgatgccctcgatccgcgtagcaacctcgccgtcaccgccgacctgttgcgcgagcactacgccgacgtcggtgactgggtcatcgccgccggccgctaccaccggcctgctggtggggctccggcggcgcgctaccgaacgcagttcagccagcactggcagcgccttgaagccgccacgtccagccgtggaggaccacgctcatga

SEQ ID NO: 343510 - DNA, 462 bp, Pseudomonas aeruginosa
atgacttacgttcgccggggcgcactgatctgcaggctggtggggtcgttggctaccggggcatggcttgtgccaacgccccctgtcatggccgctgaatcggccgcggcggtcgaacggcccgacccacgaacactgaactgggtgctgccggtgtacagtgcgcgccttacgccgggtgaggtgccgcgcagagccttggatctgacaggcatggtcccgctgttcttggttggtgcggacgccgcctcattggcgtggctggcgcagcacgcgccagcactgaagcggttgggcgccaacggtttggccgttgaggtcgctgatgtcgcggcgctgcagcgcatccaagcgctcgcgcctggattggccgtctggccggtgagcggcgacgacatcgctgagcgactggaactggagcactacccggtactgatcacaccgaccggcctggagcagtga

SEQ ID NO: 343511 - DNA, 2127 bp, Pseudomonas aeruginosa
atgggtgatcatgcgttggaatccctgctgcgcccggcagtagagctgtacaccgtgggcatctgtgcaagtgccggcgcgctgtgcctgcattcgccttggacagtagccctgtcaccggaggttggcgccggcatggccctggcctacaccgccttcggcctcaagcgcctgaatgaggctcgcattgtcctgcgctatcggcgcaacatacgccgtctaccccgctactcgctgaccagccgacagatcccggtcagcagcaagcgcctgttcatgggccgtggtttccgctggagccgcctgcacacccagcgtttgctcgaagcgcaggatcccgcactcgcccgctacgtcaaccagtcagcggcctaccaatgggcacggcgcctggagcacgtgctggaaaaagcgccgtcaggactctccctcctgcctcgcgtgaccgcctgggacagcccgctcaacccggtacgaccgctgccgcccgtaggtggctcaccgctgctgcatggcgtcgagcccaacgagctggaagcctccttgccactgggcgaacgcgtgggccacaccctggtgctgggcaccacgcgggtcggcaagacgcgcctggccgaggtctacatcacccaggacattcaccgaccaagccaggaagtggtgattgtttttgaccccaaaggcgatgccgacctgctcaagcgcatgtacgtggaagcgcgacgcgccggccgtgaacacgagttctacgtcttccacttgggctggcctgagatttccgcgcgctacaacgccatcggccgtttcggtcgcatctcggaggtcgccacccgtatcgctgggcaactgagcggtgaagggaactcggcagcgtttcgcgagttcgcctggcgcttcgtcaacatcatcgcccgggccctgatcgagctgggccggcgccccgactacctgcagatccagcgccatgtggtgaacatcgatgcgctgttcatcgaatacgcccagcacttcttcgcccggcatgatccgcaggcctgggagaccattgttgatctcgaagctcggctcaacgagaagaacgtgccacggcatatgatcggccgcgagaaacgcgtggtcgccatcgagcagtacctgaccgccaagcgcctcttcgacccggtcatggatggcctgcgctcggcggtgcgctacgaccgcacctacttcgacaagatcgtcgcctcgctgctgccgctgctggaaaagctcaccagcggcaagacggcccagttgctggcccctaactacgccgacctggacgatccacggccgatcttcgactggctgcaggtcatccgtaaacgcggcatcgtctatgtcggcctggatgccctgtccgatgccgaggtcgcggccgcggtcggtaactcgatgtttgccgacttggtctccgtcgctgggcatatctacaaacacggcattgactatggtctgccgggctcctccagctcggctgacaaggtgcccatcaacttgcacgccgacgagttcaacgagctgatgggcgacgagttcatcccgctgatcaacaagggcggcggtgccggtatccaggtcaccgcctacacccaaaccttgagcgacatcgaggcacgtatcggcagccgggccaaggccggccaggtcatcggcaacttcaacaccctgcagatgctgcgcgtacgggaaactgcgaccgctgaactgctgaccaaccaactgcccaaggtcaacgtgcagacacgcaccctggtctccggcgcgaccgacacggccgatccggatgcccgtaccgacttcacctcgtcctcgcaggaccgcgtgaccaccaccgccgtgccgctgatcgagcccgcgcacatcatcgctctgccgaagggccagatgttctcgttccaggaaggcgggcaactgtggaaagtgcgaatgccgctgcccaaaccggccagcgacgatgcgatgccggcggatctgcaggccctagctgcgcgcatgcgcgagtcctacaacgccaatgcaagtagctggtggaccagcgccagcggtgcaccgacgatcgacttcgatcccgagatgccaccactaggacgtaaacctgcccagtga

SEQ ID NO: 343512 - DNA, 729 bp, Pseudomonas aeruginosa
atgcctactaccccaaccaacccgcctcagacacaacgacgaccagggctgatcatcggcacgcttgagctgtgtctgcgattgctcggcctactgtttgcttccttactcttctccatcctgttggagttcataggcatgctgtggttctggccagaacaaggctggcatcacagccatgcgatgtgggtgagtgaacttggctggctcagcaaccatttcaaaagctcgttgttggtacaagagccggcgcaagcgacatcgaagattctcgagcgcatcaacgactgggttgtcgtccgctccggttgggctcaatctgacatccaactgaagctgctcagtcgcgagtcatcgccgcaaggacagcttgctcaagcatatgtcgcaggccaagactacctgctggcgacactgttcacgatcttcactttcgtggtgcgcttaaccgtcctcactctggccaccccccttttcttgcttgcgatgctcactggcatgatcgacgggttgatgcgccgcgacctgcgcaagttcggagcggacagggaaagtagcttcgtctatcatcgagccaagcgaacattgttgccgcttttgattagcccttgggtaatctatctgtcacttccgtggtcactgaatccgagttgggtattactcccatgtgctgcgttgcttggattcatggtggcaatcactgccgcatcgtttaaaaaatacctgtaa

SEQ ID NO: 343513 - DNA, 1299 bp, Pseudomonas aeruginosa
gtggacagttcaattgagaacttcgcggggcgcagtactcccgccggggtagctaggaatgatcggagccggcgtagcgtggcgctggtcgccgcgacatcaatcgggttggcgggcgggtataccgcgctatttgccggcaccaccggcgtgttcctgctgcccatcgcgcagtcgctgaatgccgggcgcggcgtggtcgccagctgtatggccctggcatcgctgggcctggccatcagttcgcctgtggcgggccgcctgatggatcgcttcggttatcagcgtgtcatcggtgtgtccatcatctgcttcgtactcggtctgctgctgctggccacgggcccgatgacgacgtcggcgctgggcaccaaggccttcttgcttgggttgctgggcgtggcgacttcgccggtcggctacctgcctatcctagcctatgccttcgaacggcgcgtcggtttggtgttcggcatcgcttcgatcggagcgggtatcggggcagcgctggcaccgctgtttaccggctggatgatccgccattacgactggcagacggcatacctgttgttggccgtggtggcgtcggtgatcggttacatcgcgcacaccatgctgcggcgtattcccaaccaagtaaagaccgcagatgcgtcggccgttgccaggccgttggtcgttctgtcgggggatgaggcgaaaactgctttcgccaatccatgcttctggctgatcggcgtgtgtgttgcgtcggtcgcggcggtcggcctgggcgggatcgtgcacttgccggccctactgtcggacaacggcgtgtcgcccgagatggcggcggccggtgccgcattttccgccctcggcctgacggtgggacggttcctggtgggcttgctcctagacctgattccagcgagagtgctggcttctatagtgttcctgttcggtggctgcggcgtgatgctgctgggtaccgcaacgcacgaaaccccctatctgcagcttgcattgggagcgatgctgacaggcatgttaatcggcggggaaggcgatctggtgccgttcttcgtgaaacgttactttggccttaagagcttcggtgccatttacggcctactgatctcgctgttctgcctgggcacaatgttcggccccgcgctgtatggcttggccttcgaccgctttcatagctacgacatcgtgatggtaaccgccggcatcgtgtgcttcgcctgcgcgctgggaattctaatgatcggctcctatcgttatcccgatccgcatccggtcatccgtacctag

SEQ ID NO: 343514 - DNA, 240 bp, Pseudomonas aeruginosa
atgagcatgactgacgcccaactcagcgcattctcggccgtggccgggtttaccccgcagctcagttcggtgttgtggcgttcatcggtgctggtgctggcgttgctctggtgtgcctgggccctgtggaccggctaccgcggttgggcggccggcaatctcaatttcggtgcgctcggcggcagcacgctgcgtctggccctagccctgatcgtgatgatgtttttcatgctgtcgtaa

SEQ ID NO: 343515 - DNA, 378 bp, Pseudomonas aeruginosa
atgaaacgctcccgtcgctacttccttccactgctcctgctgcgggccacctatgcaaaaaccttgttcggcagtctggtgctactgagctcgacgctggccagggctgacttgccgaccatggaagcgccctcccgcggcgaagggtcggggctgatcgacaccatcaagaactacgcctacgacggcggcatcctactcgggctgctgattgccacccttgccttcctgggcgtggcctggcattcgctcaccgtctacgccgacgtgcagaaccagcgcaagacctggaaggacctcggtgccgtggtcggcgtaggcgcgctgctggtggtggtgatcctgtggttcctcaccaaagctgcgacgatcctgtga

SEQ ID NO: 343516 - DNA, 402 bp, Pseudomonas aeruginosa
atgtccgacgcccctgccaccctccccgacggcacgctgaccttcctgccggaacgcctcaaccgcgatccggccgtcctgcgtggtctcaccaacgacgagatgtgggtcgcgctgattgttggtgccgtactgggtgtggtcctcggcgcgccgctggcggtggccaccgtctccatcgccaccctccccacctgcatgttcctgtgcatggcgttggtgctgctcggtggcggcaagctactccgtcgggccaaacgcgctcgccctgagacctggctgtatcgacgccttcagtggcaactggccgtgaactggggcatcggcactcagtacctgattctgcactccggcccgtggacggtccggcgcacgcgccggtctgcaaggaccgacccatga

SEQ ID NO: 343517 - DNA, 639 bp, Pseudomonas aeruginosa
atgagccgctttcgcaacaaggtggatgcgcagcaggcgcatatcctcagcctgcgcctggccgtggcgaccttggcactgatatgtatgggtctgtggtacggctggcagtccgcgccttccgaactgaccatacacgtgccgccggatctgcgctccggcagtacgcgcaaatggtgggacgtgccacccgagaacatctatgcctttgccctgtacatcttcggccagctcaaccgttggcccaccgacggcgaggtcgactaccaccgtgccatcttcgccctgcagccctacctgacaccggcgtgcaagaccttcttcgacggcgacttcgagtaccgcaaggcggccggcgaactgcgcggtcgcgtgcgcggtgtatacgaggtcctgggccgcggctacagcgatgatcccgacttgcgggtaaagcagctggataagcacagctggctggtcaagctcgacctaaatgctgacgagtactacgccgccgagccggtaaagcgcgtggtcgtgcgttaccccctgcgtgtggtgcgtttcgacgtcgaccccgagcacaacaaatggggcctggccctggactgctacgaaggcacaccgcagaagctgacgctgcctggaggtgcgtga

SEQ ID NO: 343518 - DNA, 807 bp, Pseudomonas aeruginosa
atgatgcgtgtcttgatcctgattctggtgtcggtggccgggtggtgttcagccgcagccgccgttgaggtcaagtactgggaccgcctgccgctggccgtgccgctgacggtaggccaggaacgtctcctgatgttggatgaagatgtccgcgtcgggctacccagtgcgatcagcagtaagctgcgcgtgcagtcagtcgacgggacggtgtacctgcgtgcgtcggaagccatccccccgacccgactgcagctgcagtcggtgaagtcaggggacatcatcctggtcgacatcgaagcgctcgagggcagcgagacgctggagccggtcaagatcgttgctcaggcacaggcaccagatgtggacaccgcgccggacgcagcgcctgcagcgacgccggtaccggtggtgctgacgcgctatgccgcgcagaacctgtacgcgccactgcgcaccgtggcgcccttacccggtgtgcgccgggtcccgctgggcgagtcctcaggcttcagcacactgctgccgaccgagcacgtggccatcaagggactcgccgtctggcggctgggtgactactgggtgacggcggtgaagatcgtcaaccgtgggccggccaaggtcacgctggacccgcgtcacttgcaggccacgctgtacgccgccaccttccagcatgagtatctggggcacgccggcacacctgaagacaccaccgtggcgtacctcgtcacccgcggcggcgacctgaagcacgcactgctgctgccaccgccagcgccggaggctgccgaccatgaaagctaa

SEQ ID NO: 343519 - DNA, 1509 bp, Pseudomonas aeruginosa
atgaaagctaacggcttactgaaatggctggtacccgcaatcctgctggggattgtgctgatcatcggcaaatcctggatggcggcgccggatggacaacctgcccacgacccagagaacaccgcactcagccctgaccaggctaaggccctcggcattgccggcgacacgccgcgcgacaccgtggcaacgctgattggccaggtcaaagcgatgcgcagcgagatgctgtcgctgaagaaaggcaatgagacgctgcagactgagaacaaccggctgcgcacgcgcgaaggcaatatcgacagccggatccagaacacgctgagcagtgtcacccagcaagtcaccgagcagcgccagcaggccaacgatgctcggcagaaggccgagcaacagcaccgagagacccagggtttgctatcccgactcaaggaccagctcaccagtaagccggccgcgaagtccgacgtacccgtgggcttcggtctagagccgggtgacgggcaacaattctccggggcccaaccggcagcggatgcggtgcagtgggtcgagccttccaatgcacgtgccggccaggagggggccagcaaagcggaggggccattgtcgtcgctgacgtcaaagttcaaggatctgcatggcctggacaacaacgccatcgaccggagccaagaccatctgcgcgccgtggccaagggcgagcgcgacctggagaacacccaggatcgggccgaaggcgccaagccggtctacaccatcccagagaactcgaccctgatgggctcgatcgccatgaccgccctgattggccgcgtgccggtggacggcacggtgaatgatccctacccgttcaaggtactggtgggaccggacaacctcaccgccaacggcatcgatctgccggacgtggtcggcgccgtcatgagtgggactgcggcgggtgattggaccttgtcttgcgtgcgcggccaggtcgagtcgatcacctttgttttcagcgacggcaccattcgcacggtgccgcagccgcagaaggtggtcagtcgcaaccgcagcagcgcacagacctcggacaccgaaaaaatccgcgggggcctcggctacatctccgacccttacggcattccctgcatcgccggcgagcgccgttccaacgcccaacagtacctgggcagccaaagcctgatcaccgcagccggcgccggcttcgcggcagcgctaggcagcgaacagaccaatacctcattcatcaactctgccagcggcagcctggggctctcgcaaaacagcggcaacagcgcgctgaactcggtcatcagcgggggcatcggcgacatccgtgactggatcaacaagctctacggagaagccttcgccgccatctacgtcccgccgggggccaaggtggccttgcacctggatcacgaaatcagcatcgactacgaacccaaaggccggagagtgaatcatgaacgcccatccgtttcggtactggacctggattag

SEQ ID NO: 343520 - DNA, 420 bp, Pseudomonas aeruginosa
atgaacgcccatccgtttcggtactggacctggattagcctgctgctgtgcctgcacctggcaggctgcaccaccagcaaggacgagatgctgccccacggcgatcacaccatgctggatatctggaacagcggcggcgcggtcggcacgcagcagcagttgcaagaggctcgcggcgaactgcgccggccagtgctcgatcccgagcgcctgatcaaggaccagagcgcctacacccgcacagccgccaacgagatccgcgctcagttcccacgcctgcctaatcccgacctggtgatgtacgtctacccgcacctggccggcacccagcaggcgccggtgcccggctactcgaccgtgttcccgttgtacgaaaaggtccagtacgcactgcccggcgaacgcctggacgatctgtga

SEQ ID NO: 343521 - DNA, 2742 bp, Pseudomonas aeruginosa
atggacgaggatgcagatcgcacgtcgccgcgctggcagccctggcgcgcggcgcagcgtcggcgcgcaacacgtgcggacgagactgagcagtacgcgcacaaccccagcttcaccgaccacttgccctgggtcgaatacctcgaggaggagcagtgttttctgctcgatgacaaccgctcggtaggcgccgtgttcgaactgcagccgatcggcaccgagggccgtgagcccgaatggctgatggcggcgcgcgatgcgttggaggatgcgctgcaggacagcttcgacgagctcgaccaggcaccctgggtggtgcagttcttctgtcaggacgacagtgatttttccccgtacctggagcgcctggaacagtacgttgcaccacgggcgacaggcacaccgttcaccgccgctttcctcgcctcgatgcaacaccacctcgatgccattgccaagccaggcggcttgttcgacgaccatgtcgtgtcgcacctgccctggcgcggcagcaatcgacggattcggctggtggtctatcgctggctcggtgaccaggccgacgacgaagggcaaaaccccgctcagttgctgggaaggacttgtgaccgcctaatggcatcgttacaggcctgcggggtcaatcctcgccggctgaacgggcgtgacttctacgcctggttgctgccttggttcaacccagcccccaccctcacgggcgaatcaccagcggcattctatcgacgcgtgccctacccggagaccgatgacggcgatgggctgtcgctaccgttcgaccacgactttgccgagcgactgttctttcaggagccacgctcggaccgcgagcaggggctgtggtatttcgatcaacagccgcacgcggtgatggtggtcgacaaactgcgcaggccaccccacatcggccagctgaccggcgagacccgcaagggggaggcgctcaacgccctgtttgaccagttacccgagcaggccatcctgagcctgaccttggtcatcacaccccaggatgtgctcgaggagcaactcaaccgcttggcgcgcaaagccatcggcgaaaacctggcctcgacccagacccgccaggacgtggaagaggcccgcgcgctgattggccgccagcacaagctataccgcggcaccttggcactgtacctgcgtggcgccgatgagccgcaattgcgccagcgctcgatccaggccgccaacgtactgctcggcgccggcctgcaaccggtgcgtgagggcgatgaagtggccgcctgcaacagctacctgcgctggctgccgatggtctacaaccccgcgcgggataaacggaactggtacacccgcctgttgttcgctcagcatgtcgccaacctgttgccgctgtgggggcgtagcatcggtaccggcaacccagggatcaccttcttcaaccgaggtggtgcgccgctgtcgttcgatcccctatcccgcttcgaccgctccatgaatggtcacctgctgttgttcggcccgaccggcgctggcaagtcggccaccttggtctcgatcctgatgcaagtcatggcggtgtatcggccgcggctgttcatcgtcgaagccggcaactccttcggcctgcagggcgactacttcgccaccctcggcctgaccgtcactaaggttcagctcaagcccggcagcggcttgagcctggctcccttcgccgatgctcggcggctgatcgagcgccccgaccaggtcgccagtctgtcgaccgaagacctggatgaagacgcttcgggcagtgacgagcaacgcgatgtgctgggcgaactggagattaccgctcgcctgatgatcaccgggggcgaagccaaggaagaggcccgcctcacccgggctgaccgcagcctgattcgcgagtgcatcctcgacgccgccaggcactgtgcggccagcgatcagcaggtcatgacgcgccatgttcgtgatgcccttcgagtggtggccagcgacacccacctgccagacaagcgtcgcgagcgggcccaagaaatggccgagtccatcgacctgttctgccagggcttcgagggtgcgctgttcgaccgaccaggcaccccttggccggaaagcgatgtcacgatcgtcgacctcgccacctatgcccgcgagggctatgaagcgcagatgtcgatcagctacatcagcctgatgaacacggtgaacaacctcgccgaacgcgatcaatacctcggtcgtccgatcatcatggtcaccgacgaaggtcacatcatcaccaaaaacccgctgctggcgcccttcgtggtcaagggcaccaagatgtggcgcaagctcggtgcctggttctggttggcaacgcagaacctggccgacttccccgacgcggcacaaaccatgctcaacatgatcgagtggtggatctgcctgaacatgccgccggcggaaatcgaggaaatcgcgcgcttcaagaagctcacgccggcgcagaagaccctgctgctgtcggcgagcaagtcctcgggcaagtacaccgagggcgtggttctgtcgaagcaactggagacactgtttcgtgcagtcccgccaagcctgtacctcgccctggccatgaccgagcccgaggaaaaggcccagcgctggcggctgatggaagcgcatcagttatccgagctggaggctgcgctgcagattgcggcggacatcgatcgcttgcgcggcatgtcctga

SEQ ID NO: 343522 - DNA, 972 bp, Pseudomonas aeruginosa
atgaacctgaccgccccataccgaacgccacagccaaacaaacccggccgaggtcgcgccttcgtcgcgatcgctttgctcctggccgctgagcagtgcctggcgctgaccacccctgccatcattgcctcggtcgcgtcgctgcagtgtttggagtaccggatcgtcgggatctgctactggctgctgtgtactccgttcggctgtacggtgcgaacctcgcccaaggtccgtcacttcattcccgaattggtggtcgcgagctattccgataccggcagcaacccctggggcgagatgtctgccttgtcggcaccgacacccctgtcgcaaggcgggggcaacctgatcacatcctcgccgcagcgcaacaacctgccccgcttcaagaatgtcgacggcatcggacatcctggcggcgctgcactgactgccctggcccacagcttcggctatgcatgtccaagcggggcggtgccacttgcgccctactacctcagcacgctcgatccactagcctggcgccaggccatccccgagtccgtctacccgcaagcgctcattccgggcatgcgtgagatcggtagccaggccctcggcaacatgtggggcaacgtctacccccgccagggtgtcttggtacaacccgacgacttcaaggccgctgcggtgatggcgcagcgcgccagcgatttcatcacccgtgtcggccagccgcacgtctatttgccgctgcagccgatgccctctcccggctattggccgccacagccggtgatggagaacaacgtcaacaaccaccgctggcagttgctcgcaccgagggtgcagagcacctgcgccatcttccccagcccaacgatccagagtgccgagggcgcctacgcctggtcgctgtggcggccgtacaggtgctgccaacgcatgggccagaccttcctgttcagcatcgactttgatggaggccagtga

SEQ ID NO: 343523 - DNA, 1356 bp, Pseudomonas aeruginosa
atgaacaccctttcattcgggttggtatgcatcttcgtatgcgccgccggccacgccgccgagagcggctaccacctgggcgatcaggcccaggttctggacgaccgggtgatgtacaccatcggtggcgggtcggcggcgggcgcgccctcctcgctctaccgccccagtgaactcggcgtgggcctgtcctggcgcgcgaacatgatgtgcggaaacatgaacctctccaacaccctgcagaaccagctcaacggtgccacccagggtttccagcagatcatgggcaacgtcatccagaacgccacccaggcggtgatgtcgctgccggcaatgatcatccagcgcgccaaccccgggctgtacgagctgctgagcaacggcgtgctgcaggggcgcatcgactttgaccgttcgaagctcacctgccaggcgatggcggcgaagatggccgacaaggtggatcaggccggttggggggcactggcgcagaaccaggaaatgcagcacaacctggagcagtccgacggtgatgccgttacggcggtaaaggacaccgagtccaacaacggcaacaacggcgtcagctggattggcgggcagaaagccggcggccatggccaggcgccgatccgggtgacctcggacgtggtcaagacgggttacaacctgctgcacaaccgctcggtcgaagacacctcgaccgtcggctcaagttgtcagaatggcgcgatttgccaggcttggtcgagccccgacgaggctgctgagtgggccactcgagtgctcggcgaaaccgaggtaaagacctgtaacgattgcgagacgctgcgcgtgagcgcgggcgccggtcttacgccactgattcaggaaacctacacccagcaccttgagggcttgcagcgcatgttgtcaggcgctgaggaacccaccccagagaacttgggcaaagtctccagcccgttgctgcaggtctcacgcggcgtcatcgaaggcctgcgcgatgaccccgaccagaacctactggcccgacgtttggccagcgagaccgcgttgtcgagcgtgatctacaaggcaatgctgctgcagcgcacgttgctggccggcagccatgaacccaatgtggcgtcggcgcagcccgccactaccgccctcaacagcaacgtcgaaacgctggagcgcgagatccgcctgctgcaaaccgagttgcaggtgcgccaagcgctggccaccaataccgccagtctggtcctcgatcgtcacgccggcggcgccgatgcctcacgcaatatcgaccagcgcgatccacgcccagaccgcctgcagcgagcggatcagggaaggagcacgccatga

SEQ ID NO: 343524 - DNA, 306 bp, Pseudomonas aeruginosa
atgatgccgttttctgtgaggagctcggtcgttcggggcctgctgatcctcggcgtcgtgatggtcatgttgctgattgcctgggtagcgctgcaactgagcggcccccagctggattggttcgaggaagcacaggggcgtacgccctatttcgcctactggcgaaccctactgtacaccctgattttcgccggctggaccgcggcactccgcttgcggtcgcgccctgatgaccagcaccggctcttgcgcctgggccttatcggattcagctcgatcatcctggtcgaactctcgcgtgtgtga

SEQ ID NO: 343525 - DNA, 1539 bp, Pseudomonas aeruginosa
atgaacatgagcaccaacagttacctcgagtattacctgtcgctgctggcgtggatcatcaacaacggaatctggaacacactggcggacactgggctgtttgccgcgccgtttggcgcgatcatcctgcaggaatggttgtcggcccgccaacagggggccgatgagggcaacaagggcttactgtcgatcccccgcgtcgagaaccggctgtggatgagctacgtcgtcatcctgtttggctgcatgccgtttttcccgttgaacctttcctccgtgaccttcgaggatgcggcgagccagcgctgtggcgtgtcgatggccaagcccgccgacacagcctggggaaccaccttcaataccatcggcgagaaatccgccaacgtgccggtgtggtggtacctagtgcatgccatgagcaagggcatcaccgccgccgccacggcgtcgatcccctgcgcacccgacattcgcgcgatgcggatggagatcgacagctcgcggatcaatgaccagttactactgcaggaggtcgccgatttcacccgcgactgctacggtttttcacgctcgcggctgtttaccaaccgccctgagctggacgaatcgcagagctacgatgcgtcctggatcggctcaacctacttgctcgacacgccgggttactacgacacggatcgctcgcgcacgccacgggttgattggccgtatgacgagacgcgggatacctctctgccccgattggacaacggtgcgggttacccaacctgcaagcaatggtggagcgatgccacggtgggcttgcgcgaccgcctggtcgccgaggtcgatcccaatctgctcacgcagttgcgcggctggctgaccgggcgcagctcgaccgaaatcgaagatgccaccctccgtgaactggtgagcccgcgccagcagtcattgagcatggcgcctggtcaggtgttccaggactacggcagcagtgcccgaggcggctcgttgacgcaagggctcaacaacctcgccaccaacaccggcctggccctgggctcgttcagcaacttcccggcaatgaatgcgctacgcgctgctctgccaatggtgcaggccttcctgatcatgggcacgatcatcagcctgccgctggtgctgctgatcagcacctatcagctcaaagcgctgatgacgatcaccttcgcgctgttcaccctgcatatgctgacgttttggtgggagctggcccgctggatcgactcgagcatgctcgacacgctgtaccaccaggtctctgtcacggaccaggcgcttttaacattaccaacggcaggcttcatggatgggacggtcactgcgcaagtcatcgagtatgtgatgggagtcatgtttgtggtgttgccgatgtttttcctcagcgtgatgagttgggctggatataacgtgggcagtggcgttcaaactctcttaacgcgcgcaacggaaggagctcaggcacaggctgaaaaaggaacatcgcagctaatgtcggcagcccgaaaatcgaaatga

SEQ ID NO: 343526 - DNA, 366 bp, Pseudomonas aeruginosa
atgttgcgcttcacaggaactgaacttcacgctgtgttggccgaagccggcatcaatggttgcagagtgatactggtcaaggatcacggtgtctaccttatgtccgagatcggcgaaagcaaaccggatggcaacggccgtaaacgcgtggcctatgccactggctgcaaccctgaggtcgacgaatttgatgcctggtggaatcgagcccgcgatgagttcggcggcgatgattttgccgagtacttcgacattgacgatcctgttctcgcaagtcttcgaggaacagcaggatcgctggtgattgaggccacctccacgcacttgtacatcgctgccgaggttgccctaactggcaaatcctga

SEQ ID NO: 343527 - DNA, 939 bp, Pseudomonas aeruginosa
atgtccgatatctacctggacgtcaccaacaagattgtcaacgccctgaatcagggggtgatcccgtggatcaagccctggaccactacaggcttgcagaatgactcgccttttcccatcaacgcgattacccgacgtccctacgccggcatcaacattccactgctgtgggccgaagcccgcctgcgtgggtaccgccaggatctctggctcacctacaaccaggcgcgcaaggccggcggccatgtgcgcaagggcgagcaatcgacccttgcggtgctgtacaaacccatgagcaaggaagcgcacgacgaagagggtcaggtcgtccgcgatgagcaaggtaatatcaagatggtgcagttcgcgctgctgcggacgcattgcctgttcaacatcgagcagaccgagggacttcccaacgaagaacagccatgggatgagagcatagattcgacagcgttcatcgatcatgcccccgccgagcaactgctgatcgccagcggcgcacgcatcgaacaccgttacggcgatagcgcatgctatctgccgattcgggatctcatccaattgcccaccaaggcccagttcgtggacgtcggcagctactacgcaaccgcgttacacgaactgacgcactggtcgggtcaccacgcccgcctcaaccgggaaggcatcacgggcgggcatgcgttcggctctgcggcgtacgccttcgaggagttggtcgcggagatgggcgcagcgtttctctgcgccttcaccggcacccagggcgagttgcgccacgaggagtatctggcgtcctggttgaaaatcctcaaggaagataaacgcaccattttccgcgccagcggtcaggcacgtgaggcgtccgagtacctgttagcgctgcagtcggatcaggccagcgagacgaccgaacggctaacggcgtga

SEQ ID NO: 343528 - DNA, 366 bp, Pseudomonas aeruginosa
atgtccaaacttgccgaattcaaagcactggaagctcaactggctgctcaacttcaacagctggacgcgatgaaaaacgattccggcctgaagcaggaaatcgagtttgaacaaaagctcaaggctttgctggaccagtacggcatgagcctgcgccaagtcatcaccattctcgacccatccagaggtgtgagtgtgagtgctgcctccgcctccactggcgctcagcgcaagccgcgcgaggtcaagcgctacgagaatccgcacagtggtgaggtcgttgaaaccaagggcggtaaccacaagatcctcaagcagtggaagcaggaacacggctcggataccgtcgagagctggctgcagtaa

SEQ ID NO: 343529 - DNA, 1710 bp, Pseudomonas aeruginosa
atgaaacgcaggtggttcaaacgtaaaaaaggcaatgctgcagagcccacgctcgctccatcgcctgagggatatttccttccactggcccctgaatccctgctctgtgccgaccaccggaaaaagctgttggagcgcatctggcagtacacagcgctctccgagcctcagtttgaacagctctaccttgatccgatccgccgttacgccgcctttgtacagcaactccccgccagcgaaagccaccaccatgcctactcgggcggcatgctcgaccatggactagaattagtggcctgcagcctgaagctgcgccagtcgtacctgctacccagcggcgctgcgccagaagaccaggccgcgcaggccgatgcctggagcgcggcgattgcctatggcgccctgctccacgacattggcaagattgccgtcgaccttcaagtggagtatcagagtggggaggtgtggcacccctggcacggccctttgaaccagccctaccgctttcgctacgtgaccggtcgcgactacaaacttcacggcgccgctgccgggctgctgtacacacagatattgacgccccgccagctcgactggctcagcaactatccaatcctgtggggccacctactgtttctgctggccaaccactacgagcacgccggcatcctcggggaactggtgatgcaagctgaccgggtctccactgcgcagaacatcggcgccaaccccaccaaggcccttcaggcacccaaacactcgttgcagcatcacctgctcacgggcctgcgtcacctggtcaaaaacgagttcaagctcaaccagcccggcgcggtcggctggcttacccaagaccatctgtggctggtcagcaagaccgccaccgacaaactgcgcgcctttctgttagctcaggcggtggatggcatcccttcctccaatatcgccctgttcgatgagctgcaatcacatgggctggtggatgcgacaccaggaggcaaagcggtatggagcgccaccgtaacagacgatgtctggcaacagcgctttacctttctccgcctgcagccaagtcttatttgggccaatgagtcgaggccggactgctttgcaggcacggtagaaccgatgatggacggtccactacagaccagcgaagccaagacagttaggccgcaaactgctgaagatgagaagcagccggtcgcctctccccaaagtcaggatttcgactatctcgaggatttgatgaacatgttgcaagaaccgagcgagctcgaaactggaccaagcgcgggaaacctgcaatccaccgctccgccatccaaggatgccgaggggctggacttcctcgattggctgcgcaaaggggttctcaatcatcgtttggtggtcaacgacagcaatgccaagatccacaccgtagacggcacatttttcctggtcaccccgggcattttccaacgctacgctgccgaacaccccgagttagccgaagcagaccctcaaagcgacgcatggcgacgaatccaacgtcactttgaaaagctggatgctcatctaagaaagcccaataggcagaatatttggacttgcaaggttcgaggtcctcgcaaaacaagcttattaaatggctacctcctgcgagagaaagcagccatatctcgagagccaccaacggacaacccattcctcacattgattaaataa

SEQ ID NO: 343530 - DNA, 1314 bp, Pseudomonas aeruginosa
gtgagcgtagttaaaggtcttttgtatccgttgcctctcttgattggttttgcttgcgcgccctctgcacttggtgcttttctgaaagattcaaagctaaatcttaatctgcgtaacttctatataaatacggactatcgagagggacatgccggaacctcgaaggccgaggagtggggacagggttttcgattgttgtatgagtccggttataccgatggaaaaattggagttggtgtggatgctcttggcttgttgggtgtgaagctggatagtgggaagggtcgtcatcagggtagtaccacacttacttctgacggtgaccatgccgctgaccagtggagtcgatttggggcgacgctaaaacttaaggcatcaaaaaccgatctgcgcgttggtacgttgatgcctaagttacccgttctcgtgtttaccgatactcgacctcttccacagacctaccaagggggcatggtgactttacgcgagttagacgatattacgctaacggcaggtaagatcacccaagttacaggagtcgcttcagctgatcgtactggtatggctgttgcgggaggacggcgacagagtaatgacttccgtttcgcaggggtcgactaccgaacacgggacaattttttgctccagtattatcaagccgccctagaggattactatagccaacagtttctgggtgtttcccatatttggaaagttaccgaagggcgaagcttgaagagtgatctgcgttactttcgttcgcgtggtatcggagccaatgctgccggtgaaccaggctatcagatagcgggatatactcctgaccaccgtggtgagatcgataacgatacttggagcttggcgtttacctatgctgttggcgggcacagttttatgctggggtatcagagcgtatcggatgacagtgattttgttcaccttaatcagggcagcctgagcggtgaccttggagcgagaggtgcaagtacatacttgatcgccgagcggttgcagtcatattttggtcgtgctggtcaagacacacagatcgcccagtatagctacgattttgcagcgaagggtatcccaggcttgaatgtgactgttgctcaccaagattcagagggtattcagagtttcgctggtagctcacttcgtgagcgagaaactgacattatacttacctatgcagtccgaagcgggccgttacggggcttaggtctgggcttgctttatggagagctgaatagtgaagtaactccagatcagaatcagcttcggttgatggtgagctataatgtcgagttgttttga

SEQ ID NO: 343531 - DNA, 783 bp, Pseudomonas aeruginosa
atggaactgaattcagacatttctgccgttgtcacaggaggtgcttctggtttgggggctgccacagcaaggcgtttggccaggtatggcgtgaaagtcgccattttcgatatgaacgagacagtaggcttggcgctggcaaacgaaatcggtggcatttactgcaatgtagatgtgacttctgacgagcaagtggacaaggcatttaccaaagcccgtgctgctatcggacaggaacgcattttggttaactgtgcgggtactgccgatgctgttaaaaccgttagccgagacaagaagactggtgaaattcgtccatgcactacagatcgatttaatcgcatcattcaaattaacctgctaggcactttccgttgtatcaccaaatcggtcgccggcatgatgacgcttgcgccgctggacgatggcgaccgcggtgtcatcatcaacaccgcttcggcggctgcacaggacggtcaagtcggccaggccagttatgctgcaagcaaggcggctgttgtaggcatgactttgccgatcgcgcgtgacctgatggacgaaggtatccgagtcaataccgttatgcctgggctgtttggtacgccactgatgcaaagtcttcctgacaacgtgcaacaggcgctcgcggcatctgtgccatttcctaagcgcttgggtgagcctgacgaattcgcgaggaccgtcgagtttctcgtcaattgtggctacatgaacgccgagtctctccgcgtggacggcgccattcgcatggcaccacgttaa

SEQ ID NO: 343532 - DNA, 777 bp, Pseudomonas aeruginosa
atgagcgaagtacttgtcagccgtgaaggtgccacggttattttgaccatcaaccgcacaagcgcaaagaacagtttgaacagcctggtatttgaaggcctccgtgcacagtttgcgcaactgcgtcacgacgatactgtgcgagtagtcatagtcaccggtgccgagggcatgttttgcgctggagccgatatcacggcgttcgatgcaattcgtaccgaatcgttgttgggcgatcgaactgcggcgggtggcacattctggtcggaactaggcagtttcccaaaacccgtcatcgcagcggtggaaaggtttgcgctcggcggtggtatggaactggcattggcatgcgacatcgtgatcgctggcgagtcagctaagttcggtgtgccggaagtcaagctgggcgccatccctggtgcgggaggtacccaacgcctgattcgcaccacaggtaaatcaaaagctatggccttgctgctgactggcgattttgtcgatgctcgtacggcgtgtgatgccggaatcgtagctcaagtgacagtggatggagaggcgttgtccactgcgcgagctatggccgatcgaatcgctctcaactcgccgttggctgtggctctcgcaaaaaatgcggccttgaccagcttcgaaacaccgctggcgcaaggtttggaacatgagaaacgcaatttcttcgtcgctttgcgttcagccgacaacctagaagggcaagcgtcatttttgagcaagcgcgctcccaagttcactggccagtaa

SEQ ID NO: 343533 - DNA, 1182 bp, Pseudomonas aeruginosa
atgaataaccttgaacccgtcatcgtaggtgcggtccgcacccccgtgggtaaacgcggggggcgcttgcataaatggcatcccgtggacctattggccgaaacgctgcgccagttggtggaacaatctggtattgacccattagacctagacgatgtgatcgttgggtgtgtacttcaatgggatcagcagcacggcaacttaggtcgtcatgccgtgttggctgcagggttgcccgaatctgttcctgcggtgacggtcgaccggcaatgcgggtctggccagcaagcggtgagttttgcagtgcatggcatccaggcaggcgcttacaaattggttatcggtgcgggggtggagtcgatgtcgcaagctcccatgcctccgtcgtttaagcccggagcgccgcttggattgcaatatagcccgcgcgagctagcacgttaccagagtaccccactgactccgcaaggcgtgtcatcagaattgatgaacaagcgttttggcctcacacgcgagactctggatgcgttcgccgtacgcagtcatcagcgtgcccaccaagccgcacaagccggcaactttagtgcccaattggtccggctcaccgaggatccaagtgatccgaatagcgcgctgatcagcgtcgacgaaggtgtgcgcccggataccagcctagagaagatagccaagctcaagccggtgtttgccgataacggaggtaccacagcggccaacgcatcgcaacttagcgacggagcctccgcgcttatgattgccagtcgcggctatgccgagcaacacgggctgaggccgcgagcgcgcttcgttagtaccgctgtggccgcagcagatcctgtaatccagttcactgctgttcttgactcgactcgtaaggccttagaggaagctgggctgggtctcgacgacatcgatctgtttgaagtcaacgaagccttcggtggagtgcctcttatgttccagcaggaatttggtatcccggacgatcggctcaatgtcaacggcggttcgatagcgatcggccacccgctgggttccaccggtgcccgcatgcttactgacttgctgtgcgaactcgaacgccgaggcggacgctatgccctgcaaactatctgtgaagcgtcgggcacggccaataccaccatcatcgagcgactggaatga

SEQ ID NO: 343534 - DNA, 1677 bp, Pseudomonas aeruginosa
gtgatggatactgcccggcgcacccagccccttcgcggctgcccctccaccatgggcgatacgcgtcagctcaacactacgacactgatccggcacgccgttcgcactcaccctgagcaagagattgtttaccgtacacaagatggaggctgggctcgttacacatatgccgactgctatgtgcggatctgccgcagcgccaatgcccttcgcgcgcttggcgtcagggtaggtgatcgggtgggtatcttggactggaacagccgacggcatttcgagctctactgggcgattcctggtctgggcgcggtgatgctgcaaatgaacttgcgactgggcaacgaggatctggggtacgtggtcggccacagcaacgtgtcctacgtttgtgtggacgaatcactgttgccagtggccgagtcaatcgctgcacattctcctcagatcaagggctggatcgtcatgactgacaagccgttagcccagcttaagacttccctgacgccgctgttgcattacgaggatctcctggcagcctccgataatacggttgactggcccgaaatcgaggaaagttcagcctacagtgcctgctacaccaccggaacaacgggcagacctaaaggtgtgtattactcgcaccgtggcatctacctgcattccacggccatggccaccaatcttggcattacgctagacgactgtaccatgctcattacgcccatgtttcacgggcagtgttggggcttgccgcaagctgcggtactggtggccaacaagatcgtgttaccaggccgttacgccgccgaggacactaggccattggtggacgcgatgattgctgaaggcgtaacagtcgccaacggtgcaccggccatcttccaacccatgctgcagtacatcgagactttgccggtcaagccagactttaaccgcatgcgcatgctttccggtgccagcgagccgccgctgtcgatgatgatagggttccacgaactcactggagctgaggtggtgcatgcctatggcgccaccgaaaccacgacgctggtatctctcaaccgcctcaagcccatcctgaagaagcacttgacgctggacgcgcagtggaaccttaagcgcaaacagggcctggtcgttactggtgtagaaatccgcatcctaggcgaggaaggccaggacctaccgcatgatggaaagtcagcaggcgaaatttgtctacgtggcccctggatcacgacgagctaccacaacacgcctgactccactgatcgcttcttagagggtggctggtggcgctcaggagatgtcggaacgatcgacgaaaacggttacctcaagctctccgaccgtatcaaggatgtgatcaagagcggcggtgagtggatctcctccatcgacatggaaaacctgctcatgggccacccggccgtgtgcgacgccgcagttgtcggaattcctcatacaaagtggcaggaacggccgctggccatggtggtattgaggccccggcataacgtgaccacagaacaactgcaagaacacctcagcagtgccttcgccaaatggcagttgccagaccagatcttgttcgtcgaggccatccccaagaccagtgtcggcaagattgacaaaaaacgtatacgagctgaacaggcagatcgctacgcccagtag

SEQ ID NO: 343535 - DNA, 1059 bp, Pseudomonas aeruginosa
atgagcgcgcttcagctgctgcatatgccgcttcatggtatccagatagttgagtttgagggcatcggcccaggtccgctggcggccagaatgctggccgacatgggggctgaagtgatcgtacttgcccgagccgagcaggcggctgcggcgcagcggctgggtggaacagtggcaaacccgttgcaccgcggaaagacgatcgaggtcgttgacctgaagtcgctccacggcaaggcccgcgccctggagttgatcagtcaggccgatgcactgattgagggataccgtcctggggtgatggaacggctggggattgggcctgttgaatgtgcggcgcgcaatcctaggctcgtgtatggccggatgacaggttggggacaggaaggcccgctcgcacaggccgccggtcacgacctgaactacgtagcgctaacaggattgctgtcattgtcggcgcacaaggggcaagcgcctattgtaccgcccaccgtactcggtgacgcagccggcgctctgggcctcgccttcggcgtcgcctgcgccttggtggatgcgcgtgcctccgggcatggccgagtagtagatgcagcgatcgtcgatattgtggctatgttaggcacactggtgcattggatccgtgcaaatggacagatcgatagcgaccggccgagcccatttcacgactcgccgttctatgacgtgtactcctgctccgacggaggttacatcagcctcgcagcggtggagcctgggttccatgcactgttgctgtcgaagctgggtctatctgacgtggatcctaccgatcagtacgacatagcaacgtggccatcgctcaaagatcgcatcgcgactctgattcgcagtcagccccaggcgtattggtgtgaactgcttgaaggcagcgacacctgctttgctcccgtgctcagcttggccgaagcagtgctacatccgcacaacgcagcacggggcatttatcagtcctcaccttcgggtgccatcgaagtttctccggccccacggttccaggcactgaacacaacaacaatatag

SEQ ID NO: 343536 - DNA, 1146 bp, Pseudomonas aeruginosa
atgctgccacaactacatcgtcattcctggatggacagcgatatcgagacctttcgcgaacaggtgcgccgctatatcgccgccgaaatggctcccaaactgcccggctggcgtgaacaaggctatatcccacgcgagacctggcgtcccttcggtgaaatgggctttctgctaccggaattggacgaagcgtacggcggtgctggagccagccttgcttatcaactggtagtgcaggatgagctaactaaggctgaaatgcctaacaacgtcacagtgcatagtatcgcgtcacattacatcatggacttcggtactgaagagcaaaaacagcgttggttacccaaactgagcagcggtgagatgttggccggtatcgcgatgaccgagcctggttgcggtaccgatctcaaggccatcgccacacgtgcccgccgcgatggcgatcactatgtgatcgacggagccaagacgttcatcactaatggctttacttgcagtcttttaatcgtggtcgcacgcaccggcgaggtgggtagtaagggactgtctctgatcgtggtggagaccgaggacttacctggattccgcgtaggccgattgctcgaaaaaattggcatgccagcctcggacacagccgagctcttttttggagacgtgcgcgtgccggttgatcaattacttggtggtgtcgaagggcacggtttcaagcaactcatgggccaattgccctatgaacgtatgtcgatcgcagtaccagctgcagccgtcattgatcgggcgttggagctcaccattgaatacacgaaggagcgcaagatcttcggtgctccgctgttcgatatgcaggccacgcgccataaactggccgagctagccaccatcgctcacgttgtgcgcacttttgttaacgattgcattcagcgtctactggacggaacgctcgacgacgaagcggcgtacatggccaagtggtggtgcactgaacagcagtgccgcgtgaccgacgagtgcctgcaattgtttggcggttacggcttcatggctgaatacccaatcgcacgcatgtacgcagcctcgcgcgtacagaaaatctatggtggcgcgaacgaggtcatgaaagaactgatcgcgaggaagctatga

SEQ ID NO: 343537 - DNA, 1170 bp, Pseudomonas aeruginosa
gtgcaaaaacagtcactcacggaattgcccactaaccacgtttccatcgatggcaggaatgatgcgttggaggcaatggaacatagttttcaaggctgcttccagcgttggaatctatcctcatcggcggagcttactgagtttcaacgtaagttgcgagcaaatgggctcggagtagtctcccaggtgcacattgtggtcgatccctgcgttggccggtttccacttgcatattcgcaatggggcgatgagctctacatagctctgcagttgcatctgagcggtcgtgtgcggatgcggcaatggggtgagcagatctgtgcgggtgatatgttcgtctggcgctctgatcggcggcaagactatgaagtgttagagcgagcatgcagtgtgtctcttatgattccgtggcaacttttgcgcgagtatctgccggggcgcaagcagccgccttcagcttgtcgtatcgatacccgtacaggcgtgggttcgttgctaagccgccacctggtcgggttgtccgaagagatcgatgctgtaccgccttctgcacacttcactctatgccgcacggtgatcgggctgctggacattgcactgcccgaaccgccgtgcgctagcaaacttacggcaaagaatgctttgagggagcgagtgttgtcctacatcgctcagcatttgcatgaagataacttgatcccgacgcgcatcgctgcggcacagggcatttcggtgcgctaccttcatgcgctttttgcgcagagcgataccacggtggtcggccatatcttggaaagccgattgtatgcgtgtcggcagacactcgccgatccagcttgcaagcacctgcagatctccgagattgctttccgctggggcttcaactccaccagccacttttgtcgcacgttcaaacaattctttggaatgtcgccgagcgagttacgccgtagggctgctgcttgctacccctatctacccggtagacgtatcaggtttttccctcatgtacaagaagacaactcacagtgtattggcaggcaggtcgcgcagccctatgccaacgaggggccttgtatggtctcagaacgcaaagattcaactcttcgccagcactcgcagtgttttgctgcaacgcaactcgggcccttgtttcaggccaagccctaa

SEQ ID NO: 343538 - DNA, 342 bp, Pseudomonas aeruginosa
atggatcttggtgcaatgcttaccggcaagcaggtgttggtaacgggggcctcttcaggtctgggcgagaacttcgcccggctggctatcgactgcaaagccaatatggtgatcggagcacggcgcaagaatcggttagacgaattcgccaaggaactggagaggcctggctccccacagatcagcgtactggaaatggatgtgacatccgaacaatccctcgaccaagctttcgccgagctggacatctcgggtgccatccttgaagttgtagtaagcaatgcagggggttccatcggtagtctttcgctcgtacttacagcgagcgattccactcgttga

SEQ ID NO: 343539 - DNA, 1029 bp, Pseudomonas aeruginosa
atgttaaaacctgtcgacactgttcctgtcttcgccgtgcatggtctgcttgatggtgcgcgcgaaaaaagactagccactgagtcttggctgtgtggcgttctggcgcaggcccgtatcgccgaatcgcttctgcatctgggccagtcgcgtgtgaccgtcgagcagtacatcgcgctatttagcgccgtgaaggaaagcctaaatgatgaatgtctgggctatctacgtggtcggccgttgcgtagtggcagtttcgcgttgatagctcgttcaacgctcggggcaaagacagttgcggccgcccttgagcgcgtcagcgagtccttcgccctcttgcaggatgatattgatcttgttccggtttccgatgactcgcttagtggagcagctctttgtgcgcgtgacgtctcagttgagcactccgatttcctgcatggactgctgttgcgggttttctggcgcctgcttgtatggttgcacggcggtcgcctggtgcctaagagattcgattttgcctttcaaccacctccacatgcctcagattactcccgaatctttactggtactttgaggttcgggcaggagaggtcggcggtctggtttgaaaccacggcatttgcgcagccgatgcgccgtgacaccgtcgcactccaaacatttctgcgcgccacgccaagtaatctagtcggaccacatttaaatgagcgaacatccagcgcgcgcgtgcgaatgctattgcagcatgcgtgtcctgcgtggcctgatctggctgatgctgcgcagcggttgcatgtatcagtcagtgcattacagcggcatctggctgtggaggggaaatcgtttcaaatgttaaaagacgagttgcggcgcgacatggcgattgttcgattgaccagcactgatgccacgctgagcgccatcgctgtcgagttggggttcgctgacagtaccgcatttcagcgggccttcaaatcgtggactggttgcgcacctggtgtttatcgatcacttacgaggcagtattag

SEQ ID NO: 343540 - DNA, 702 bp, Pseudomonas aeruginosa
atgtctggcaataacgcgcctacgagcgacataccgattgaagtggtaatgcgcggacgtcgttcggttcgggcctttctgccgaccgctgtgtcccaggaaatggtggctgacattctgtcgacggcagccagcgcgcccagcggcaccaatacccagccttggcaggttatcgctgtagcaggtgaggtcaggaaacgcttgtgtgaccgtgtggtggaggccttcaaccatgaacaaggagagcatcagtccgaatacgatatctatccggccgagttcgtggaaccctacctgactaggcggcgccggtgcggtcttgcgctttatgctgctgtcggaatttctaagggaaacacggctgcaatgcgcgcccaacatacgcgcaactttacctttttcgatgcaccggtaggtttgatatttattttggaccggcgtatggccttgagcagttgggtggattacggcatgttcttgcagaacatcatgttggctgcccgcgctcgagggctcgacacctgcgcacagatggcatgggccctctacccacgtattttgggcgaaattttggcaatcccagaccaacacatggtgctgtgtggcatggcactgggctatgccgacccagcggctgcagaaaacagcatgcgcaccgagcgtgagccagtcaaaaacttcacacgcttctgcggattctga

SEQ ID NO: 343541 - DNA, 1785 bp, Pseudomonas aeruginosa
atgtctgtctacactgcacccttgcgtgacatgctgttcacgatgaaggtagttggaaacttaaaggcgatctgtgcccagcctggcaacgaggagactacgcctgaattggtcgaggcaatcctgcaggaggctgccaactacgctgccggcatactggatccgttgaatcgttcgggagacatacagggcgcgcgctggcacgatggcgaagtcacatccgccgagggcttccgcgaggcctggtccagcttttgcgagaacggttggatcggcatgccggcctccctcgaatggggtggacacggcctgccgacgctggtgtctaccgccgtgctggaaatgtggaaatcgtccaacttggctttcagtctgtgccagatgctcacactcggtgccgtggaggcgatcgctcatcacggcagcaatgcgctcaagcagcgctttctcgaacctatggtcgccggccgctggaccgggaccatgaatcttaccgagccgcaggccgggtcagatctcgcggcactgcgcggccgcgccgtacccgagggcgatcactatcgtatcgtcggcaacaagatcttcatcacctggggtgagcacgacatggccgagaacatcgttcacctggtgctcgctcgcctgcccgatgcgccgccgggcgtgaagggcatctcgttgttcctatgccccaaattcctgatcaatgccgacggctctcttggtgaacgcaatgacttaatctgcacgtccattgagcacaaactaggcatccatggcagccccacagcgtccatgagctttggcgacggcggaggtgctataggctatctcgtcggcgagcctcaccaggggctggcctgcatgttcactatgatgaatcacgcgcgcctaaacgtcggactggagggcgtaggtgtttccgagcgagcctaccagcatgcgcgcagttatgcgctccagcgcgtgcagggaaaaccgacgctggccggtagcagtaccatcgccggccacgccgacgtgcggcgtatgctgatggacatgaaggcacgcaccgaggccatgcgcgcagtggcttacttctgcgccggccagatggatcgagcagccggccaccccgacgcgcaagagcgcacgcaggcacaggacctagtcggcctactgacaccggtagtcaaaggttggtgtactgacaacgcagagggcatcacttccgacggcgtgcagatacatggaggcatgggttacgtagaggaaaccggtgccgcgcagtacttccgcgatgctcgcatcacaacaatttacgaaggcaccactggcatccaggccaatgacctgattggccgcaagatcgcacgagagggtggacgcacgataaaagcgttgttgacccgtatagacagcgatgctcgccggctaatggatgcgcacgaccctgagttgtcgccaatcggtcacgccctgatgagggcggccatggccctcgaggaaagcgtcgactggctgctcattaacagtgaaacgcagtcgcagaactgtgctgcaggtgccgttccgttcctacggctggtgggcacagtaatcggcggctggctttcggcgcgcatggccgaggccgccacgacacaattgtcatgcaccccgagcgacacggactttctccaggccaagatcattacggccactcactacgcgacgcacattctggtaggggcctccacgctacgagacatcgtagttcatggcgctgccagcacattagcattgacggatgatcaactctaa

SEQ ID NO: 343542 - DNA, 855 bp, Pseudomonas aeruginosa
atgtacatcggctttgagcttgaaaattacaagccttttgagatgattagtgggtcggcggttaataactttcgtgatcaagcgcgagatgtggtcgtgaatgatctggccgattatgtcatcggtcagatcgacaacaaagatatcatagatgtcaaggagctaacgctgaggattttccctcagcaagatgcccagattttcctttcacattcgcaccgggatgagcgcaaagctattgagtttgctttgtccttggagaagcgaggtgtcagcgtgtttgttgattcatgcgtttggggttacgttggtgacctcttgttaaaagtcaacaagcattactccgacagtgaagtggtcggggattttaccaatttttcctatgaaaagtgtaatgaggtcgcagcctcactttatttgatgttgaatgaagagctgcatcgaatgattgacgcggctgagtgctttatttttttcaataccaaaaattcgatcccgattaaaggtcacgagggctttgcagagggtgaccgtacgttgtctccctggatttactccgagctcgctttcagtgccaaggtacgttacaggccattggtgcgtaagcgcttacgcagaaagatcgtaggcgcaatggagtcttacttagtggagaaggcgtttggatcagcttcttttgcattcgaggtcgtcaacgagcaccttccaaagctcgatgggagtacactgaggacattggctcagacgacgcctgagaccggcgatttttggctagatgctttgtactatgcgtatgagctcgaagctaagttcaaaggtctctgtgaggcccgtgctcttgagcccattgcatag

SEQ ID NO: 343543 - DNA, 552 bp, Pseudomonas aeruginosa
gtggctttctttactaaagaacaggcgcgagctgcggcgaagcgaaccaaggtcacgcttgggtcggttaccggcacgcagtcctattccagtgagcaatatgatccgacccaacggtttgacatcttcctgtcgcactctatcgccgacaaagatctggtgctcggggtcaaggagcttctggaggaaaagcactatacggtttatgtcgactgggtgaacgatgaggagctcgatcgtacgcaggtcaacaaggaaacagcggatctactgcgcaaccgtatgcagcattgttccagtttggtctacattgccacggataacgccgagaactccaagtggatgccttgggaactgggctattttgacggtcaaaaggcaggcggagtcgcgattatgcctctggtagagagcgaacgatcagggtacaacggacaggagtacctcgggctgtatccgctggtgattgaggatgattcacagatttacgttgagggggtatctgagggcaggattggtttgtatgcctttgtgaacgatacctctagatag

SEQ ID NO: 343544 - DNA, 477 bp, Pseudomonas aeruginosa
atgaagcgtaacgtgttttatagcttccacttcggcaaggatgtgttgcgcgtgcagcagattcgcaacatgggggtgatcgatggtgatgaacccgtgagcccaaaccactgggaggagatcaagcgttcggaggagggggtcaagcgttggatcaccgagaatctcaagcgcaagacctgcctggtggtactgattggtgaagagacagtatcacgcaaatgggtgaagttcgagatcatgaaggcctgggagttgggcatccctgtggttggtgttcgtatccacaacctcaagtgtccaaatgctggcactggggcatacggcctcaaccccttcgactacgtgacgctcaagcgggctaacggaacggtgtacagcccacgggtttacgacccccgggcagatgatgcttacggttctataaaagcgaacctgccagcatggattgaaactgccatcaaggagtgcgcgtaa

SEQ ID NO: 343545 - DNA, 1449 bp, Pseudomonas aeruginosa
atgcgtaagaaattttcaccagagattgagattttcatcaggcgctacgttcgtgacttgaacgaaggtgttgcagcagtttttgcaggagcagggctctccaggaacagtggttttgtgaactggccggagctgatgcgcgaggtggccgaagaggtagggttgtcagtcgacaaagagcacgacctcgtggccctcgcccagttccatgtgaacgagcgcagcggctcgggtggcttggctcgtcgtattatcgaagagttttctgagcatgcggaaccgtcaacttcgcatcagatcctggcgcggttgcccattcgtacctactggacaaccaactacgaccaactgattgaggactccctgaggaagcatcagcgtgtaccggatgtgaagcacaagattgatgacttgttgaccacccggcccaagcgtgatgctgtggtttacaagatgcacggtgacgcgttgtccccgacccaagcgatcctctacaaatcacagtacgagcagtactacaagacccacgaagcctttgtgacggctttgagcggcgatctgatctccaaaacgttccttttcatcgggttcagtttcacggatccgaaccttgactacgtgctcagtcgcttgcacgtgccgcagcatgctcgccgtgagcatttctgcttcctgcgtcgcgagccttccagcctgtatgagaacgaagacgaagaagcggctcggtaccgccggcgtaagcaggaactgcacatccaggatctgaaacgcttcggcattcagacgctgctggtggacgaatacgccgatatcccagcgatcctgcgcgccatcgaagagcaattcttgaagaaaaccatcttcatttccggcagcgccgaggagtatggcgactggaaaaaggatgaagcactggatttcattcactccctctcatccagtttggtgaagcatggttatcgggtggtgaacggcttcggctggggggtgggcagcgctgtgatcaacggtgctctggatgcaatctactccaaccctgagaagttctcagaagaccagcttgtgatgaggcccttcccgcaggttgcttcccaggggcaggacctgaaagtgctatggcagcaataccgtgagcggatgatcgcactctcaggcatcgcgcttttcgtcttcggcaacaagactgaaggcggggagatcgtgagcgcgcctggtgtggagcgagagttcgacattgctgtgcgccagggggttgttccggtgccgatcggtgctacggggtacaaggccaaggagcttgcagagaaggtcatggctgatccggccaagtacgctcctgatgatcagtggctggctgaaagccttaagaatctgaacgatccggctgccggtgcgaaatccatcgaagctgcagtgctcaccatcatcaagaagctggaaggggtataa

SEQ ID NO: 343546 - DNA, 1998 bp, Pseudomonas aeruginosa
atgaaattcacgattgacgcagtcatcctctggccacgctgccctggcttggagccacgagtcattccctttcaagacgggaagatcaacatcatttacgggctgagcggcaccggcaagtcgtcaattgtgcacatcattgactacgtgctgggcgcgaccaagtgccatattccgatcggcatcatccgcgacacagtggattggttcgggatgaaaatccgcgttctcggtacgacctacatcgtcgcgcgacgcactccaggaaactcccaaggctccaacgagctttgcatgctggaggtggacgatgaacagatcccggactccgtttaccgtacccattccctggcgcagtacaaagccgcctttgatggcatggttcgggtcagtgacctgccccactccgatgaggaagagccgtccagctttgatcgccgcagctcctatcgcgacatggcagcgttcaatttcctgcctcagcacatcgtggcaaaccccaacaccctgttcttcaaaaccgactcgtttgctcacaaggagcgcctgacgcgagccatgccctacgcgctcggtatggtggatgcaaactacatcatgaacgaacggcgtcgggatgaagcgcagcgcgagcaagatcggctgcgcaagcagctagcagtccacgatgcggccaaggcgagccaatatgctgacgtcgaccaactgtttgatcgctgcattcagctgggcttgcttgagcgcaccagcacccagggcgctcagaaagtcgaactgctcaagaaggtcgtcatcgcgacccatgaaggacggcttgagcagacacttctggaacctcaacgactgcatatctcagaaaagctgaaggtgatcatcgaggaagtcgggaagcaacaacgtatcgttgacgaatttgatgcccagatcgatggcttcgaccacctggcacgtaacagcaagcgattcgtcgcggccattgatactgagaagtcccatgtcattggtctcgactggctcaaacagagcgtctctgacggtgggcactgcgtggcctgtggctcgttcaccaacgccttgcctatggtgatcgagaatctggaagagaaggtcaacaaggttacccggatttcggacgcgctcaaggacaatcccgtcgtcgacaagcaactggccacgctgaaacggcagcgcgccaaggaggagcgtgagctgtcgcgtttgatgcgagagcagagtcgcttgatccaagaggatgagcgtacccgaaatgccattggccagatctactatgtggcgggtgagatcagccggctaatcaaacaactggacggcgctgaagcagacgagggtctgaccaagcgcatgaccgagctggaaagcctgattcggcattacaacttccagatgtcgttgactgacatggctgagcaagagcggaaggtcgatgcccagctggccccgatgttcgaggactatgcggatcagttcggcttgaacggaacgcctggcgctcagatttatctcgatcggaaagagctcacgcttcgcttcgactcccacggccagcgggattttctctgggaaatcggcagtggtgcgaactggatgggctatcacatcgcgacgttcctaggcattcatgaatacctgtcgaaggaggagaatcgcaagctcccacctttcagcttcatcgtgatcgaccaaccgagccaggtctatttcccaagcaataccggtggcatcaacgcactggatgcgggtttcgaagcggtgaatcaagcccggccagcggatgtcgttgccacgcgccgaatcttcgaagtcttggctgaaggcctcaagcgtgccggccatttcatccagatcattgtccttgaacatgcgggcccagacatctggggacaggtcgctgacaccgtgcccgtagcggcgtggcagagcaaagacgacgggctcatccctgcccactggatccaccgtcacaatgacttagcgtaa

SEQ ID NO: 343547 - DNA, 507 bp, Pseudomonas aeruginosa
atgagtgaggtgtatctggatcatcaattgatccacaactcgtcattggcctgctttctgctgacacacttcataggcgaataccaagaggcagggcttgggcaaaccccggatctaccgaaactgatgttggtgctgcccttggtgtggaatcagcgctcacgcgatgcgttgagcccgcgcaccagccgctccaccttgggtgctgtgctcagggagaccccggtgttgaaaattgatctgcagcgaagggtgtccgcccatgcggctaccaccctacaagggctcaatctcgccgtttcttcgcgcctgattggaaagatcggcaccaaggggagtgagaccagcttccaagtcttggtcgaccgttggccacgaggcatcaagaacaccattccctcggccatgctgcagaccactgagaaactggcgaagtggtttgccaccgacacgacagaaaacctgtacaagctcttgtttgggattcccaatgaaattcacgattga

SEQ ID NO: 343548 - DNA, 789 bp, Pseudomonas aeruginosa
atgacaggcaagcctggcgagatcgctcgggatgtcatcgcctactcggacgccgacttggtatttctgatcgagcacatgtccattgaggacggccaactcaatgcccagatgaagcagcgggtgatcgcgtccctccacctcccggaagacgcagtggcgaatgctgaggacatctaccatggtctggtcggtttcctgttcgaccgttgccaggaatcctgggtagcccgcaagcctttctggacgaccgctcagccttactacaacaagcgtcaaacgctcgttgaagcgttcatgaatggcccttgggaacctctgcccttcgagaaaaccgagttcgcagagtgggccgagaagatcgaccccgcggacatgcttttcgtggagcaactcaccaaaatcaacatgccgaaaaacctgctgatgaagcaattcggcttctactgtgccgcctactctgagcgcatccgcctcctggaatcaggtggagttctggccgaggactttgatgtagctgagcgtgtgctcagtgatcgctgggaagcgatcaacgaccgccaccagctggacaatatgacgtcgctggatgactacgacacggctgattacaggtctgtgatgaccaaaaccttgtttccagaaacctttcccatgaaagtgggacgggtgagctccacggctcagtacctgttcagcggcacctaccaccggatggccaatgccgatggaacacagtcccccattcattggcaccgtgaagcgccgacctcggaggaggagtcatga

SEQ ID NO: 343549 - DNA, 756 bp, Pseudomonas aeruginosa
atgaagctcaagagcttcaccctggccggcgagagcttcctcatggccggctatcatttcgccgtgaaatcggccttccgccgcgcccgcgaactgaccgtcagcgaagaagccaagaaaaccctctacaccctggggcgcatccatcaggagcagggatccttcgccgaggcccagaaatactacgaagtggtgtttaccctcagccccgactacctcgacgtcgacgcccggctgcagcacctccgacgccagggcgcacaacctgaaggcctgcgcccaagcgacgacaaggactggtacgccaacctgatcctggaactgctcgaccccgccgcgcaacgcggctttaccccaagcaccgtacgggccacccaactggcgggcgttgccgaacagcgcgggcggctgctctcggtgatcgccgagttcgcgcaggacaaggccgccgatgccgccgatgccgcactggactatgacgtggcggcctacatgcgctacgactgctccgtgcctgaggacgaagccaagaaatccctcgagctggtcaacatgctcgactgcctgccgcgaccggccgctacccgaccctgctggcccgacaaggcatccaggcctttcgcgtcgacctggaacccagggcggtcgagtatgcccggcagaagaccggcggcgcgctcaatccggacttccaccaaggcgacgccagggcgctgccgttcgaaagcactcagttcgacctcattacctgcatga

SEQ ID NO: 343550 - DNA, 402 bp, Pseudomonas aeruginosa
atgatgggcacggcggcgcacttcccaaggcaagacttctccagggtcatgtcggaaatccatcgctgcctggtgccgggcgggttctgcgtgatctcgacctgggacatcgagtgtccacacctgacctacctttcgatctactcccacgagcagaaggaactgatgcgacagaacgccatcagccgtggcgaggccattgagatcgcccgggcgcagggcttcgcggtcgaggaaatccgtccgctgggcctgctccccgaatcgctgggctacgagctcgacctgcagcaggacgggcccgccaggatccacaacctgctggacatggatcttgcgctgaaggccaaattcccgagcctgcacggccagatgtacatgctgatcatccgcaagacctaa

SEQ ID NO: 343551 - DNA, 213 bp, Pseudomonas aeruginosa
atgttcttcggaaagcgtctgcatgtggcagtgatccaaggcgaaccgctgatgcagaaggcgatggacgttcttctgaagtttcatgaggcgcagggggggctacctgtcgatcaagtcgaagagctgcgcgttgaagctgagttctttttccaggccgtcagtgcctatcaattccgagtgttggccggtgcggcctctacccttcaatga

SEQ ID NO: 343552 - DNA, 798 bp, Pseudomonas aeruginosa
atggctgagacccaaatcgagtggacggactccacatggaatcctgttgcgggctgctcaataattagtgatgggtgcaaaaactgttacgccatggaaatggccaagcgcctagaagcgatgcgcgttgaaaaatatgctggacttactagaaagtctggcaagcgcacagtctggaacggtgtaatacgcgaagacgaaaaatcattagccattccttacagctggaaaaagccgcggaaaatttttgtcaactcgatgagcgacctattccacgacgacgtaagcgatgagtttatccttaaagtctggaatgtcatgcgcgaaacaccgcgccacagctatcaaattttgacaaagcgccctgagcgcatgaagaacatattgcagagcaagatcaaagacattctacccaacgtttggataggcaccagtgttgaaaacgccgatgtcctagatagaattgatagtcttcgcgacatacctgcaagcattcgattcatttcgttcgagccgctcataaactcagtagccggcgtcaatcttaaaaacatcgactgggcaatcgttggcggtgaaagcggacgatccgcacgaccaataaaagaagagtggattgacgaaatttacgaacaatgcttgatcagcgaaaccgcatttttcttcaagcaatggggcgcttggggaaaagacaataagaaaagatctaaaaaagataatggcagagagtaccgtggtcgtacctgggacgaaatgcctatcacaatcctaggcgagctggggcaggcttcaatctga

SEQ ID NO: 343553 - DNA, 1230 bp, Pseudomonas aeruginosa
atggctggaaaactgtatgaatggctctctggagctgttttagatgatcattcacgccgaaaacacaaaatacttagagagtatttctttcagtatttaaccgtgagatgccaacttcctcagcagtcacgatttaaactagcggtaattgatgggttctctggtggcggtcggtaccagtgcggagcagctgggtcgccagtcattttcattgaagagttgaagagagctctgcgccatataaatatcaaccgtggatcacaggggcttggactggtaactattgagtgttttttgatactcaatgatgcagacaaaaatgtcactgcattcctacaggaaaatctagcacctataatcgccgaggccaaagatacagaatctagacttatcctaaataccgtatttttcagcgagccattcgaacagctttatccaaaagtcaaagaactcctatcaaaatatcgctgccgaaacgttcttttcaatttagatcagtgcggccatagccatgtcgatagaaaaacgatcctcgacataactcgatcaaacccatcggccgaaattttctatacctttgcgatcgaagcgctggtttcatatctaaaaaaatcagaccccacaatgctaataagccagctagccccaattggtttaagggaagacgacattagaaatctcgaaaaccatctaaccaaaaaaagttggcttggtgcggcggagcgactagtattccaggcattcaaagagtgtgctccttatgtaagccccttctccatcaataatccgtcaggctggagatactggctaattcacttcgccaactcttacaaagcccgccaagtctacaataacattctgcacgacaatagtagctctcaagcccactttggtagatcgggcctgaacatgctctcttatgacccagcggaagatggctcactttacttattcggcgagtcagatcgagaaaatgctcgaaatgaactccaagaagatatccctcggatcatatctgaatcgggtgatgccgtgtctgttagcgatttctatgcaagtatctacaacgagacgcctgctcataccgacgatgtacatgctgctatcatccaaagccccgaaattgaggttatcactcctgggggcggcacccgaagaaagccgaatacaatcacggtaaatgacactttgaaattcaagagccaaagaacattcttccacatgctgtaa

SEQ ID NO: 343554 - DNA, 1806 bp, Pseudomonas aeruginosa
atggcactcacggaaatggcgattcggcatgctcgagtcactgccaaggagtacacgctcgcagacagtgatggcttgttcctcaacgtcactgcccagggcagcaaaatctggcatttccgttattactgggaaggtcggcagaagcgcatgtccttcggcagttacccgcaggtggggttgcgtgacgcgcgggagcggcgagatgaggcacgagcgctgattgctcagggattcaatccctgtgaacaacgcaagcagcagcgtgtggccctgcgccttgccaatgatcagaccttcgatgcggtgttcgagcagtggattgcctttcgcaggttgagtctcaaagaagggcgacagagcacgctgtcgcagatactgcgcatttttgccaaagacattcagccctacatcggcgagcagtcgatccatgagatcaatcggcatgtactcatggatctgctcagccgtatcgaatgcaggaaagccttcacgactgcggagaagtgccggacctggctcaatcagttgttccgctacgcactggtacgcatagcgggccttgaacacaatcctgccgcagatctcgatgtggtggcggtgcccaagccgccggtggagcacaatcccttcctgcgcatggaggagcttccgcacttcctgggtaagctgcgtgcgttccgcggctcgcagcagacgcaactcggtatccgcttgttgctgttgaccggcgtgcgtactggtgagttgcgtctggcgacccctgaccagttcgacctggagcgtaggctttggatcatcccgccggaagtggtcaagcagctccagctcaagatgcgcaacacgcgccgccaaaccgccaaggtgccgccctatatcgttccgctgtctatccaggcggccgaagtcgtgcgcctgttgctcgatcaggtggtgcccgctcaacggcatttgctcacccatcgaagcgatctgagcaagcgcatcagcgagaacaccctgaacagtgcgttgcgacgtatgggctttgctgaccggctcacggggcacggcgtgagggcgacgatctcaacggcactcaacgagatcggttacccgaagatctggatcgatgcgcagctgtcacatgctgatccggacaaggtgagttcagcgtacaaccatgcggaatacgttgagcaacgccgtacgatgatgcaagactgggccaaccgattagatctctgggtgcaaggacataccaaggcggcagcctcaccgttaactattcgcttggagggggtatcgcagctgtcgttcgggctacagagtttacttctccctcccgtacgcagtggcatgaaaccagaaatgagttcgttagacgttgaaggtagtaaggctttagcggatcgattcggcgcgtcggaagtgtctgccgtccggctggtttctgatatccaaagagagcgtgcggagatgcttgaaatctacgaagcagcgaccaatttacctcttctctcttttgcacggctggctggaaaatcgcgagatcaaatcaaccgtgatatcaaggcacgacgtctgctgtcacttagcttggggaatcggggccagcgtattccagactggcagttggatccggtgaagcataagctggttctggcaatcttcaagtcgttgcctcaactcgaagcctgggaagtctaccgtctgctcagtgagccacacgataggctgagagggcgtataccgctagatgtggtgcaaacagagaattttgagactaccttggcttcactgattcgggtgcgacaaatagcatag

SEQ ID NO: 343555 - DNA, 303 bp, Pseudomonas aeruginosa
atggacgaggaactgaaccgggcggcgagcctggccatcgagctggcggacgtggacagcgccgcgcgcttgcacgaacgcctgcgcgaggccctggcgttgccgccgtggtacggatgcaactgggatgccttctgggacgccatcagcggcctggtgccgatgccccggcgattgcgtctgcaaggctggagcgacttcgcccggcgcctgccggaggaagcggcgcagctgtcggcctgcctggaggcgttgcgcgagacgtacccgcaactggcgccggaagtcctgcgcgacgcttga

SEQ ID NO: 343556 - DNA, 879 bp, Pseudomonas aeruginosa
atgcggctgatggctattggactttgggccgtgctctgtcttgcagccgttcccgtgatggccaacagcaaatcgtttgtctgcgttaatgagaaagaccatttgccgccgttggattcgcaagccgatgcttggtaccgcgaagcagcagccttggccaagccagatactctacggccctggggccgtatcgtcgagctttacagcaaggcagtggagcgtggtcactggaaggccatgcataacctggcgaatctttatcgtacagggtggcctggtggggtagagaaggatacgcagaaagcgttggacctttaccagaagatgatcgatctgggagtgccccaaggcttctataacatgggggcaatgattggcaatcgtgccggtgttaagaatcctgctaccgatggcctgaccttcttggacaaggccgccagtatgggtaaccctccagccttaactgcgttaggtaagctttatatttatgaagcgaatcaggacgaactaggacttcgttacacgcaatgcgctgctgagcaaggatatgctcccgctaattatgaattgggtgcgtattacaaaatagttaagcataattatcctaaggcgctgagctattaccagcttgctacttctcaaggggatggtgatgctgcgcttctaatgacagatatattcgatgaaaaaagtcgaccagttgataggatgtggtatgacgcggataaggagctttatgagatgtattactctatttacaagaagcttgaagttgatccagatctacgttttaccaacttgataaaggatcatcctctgcctcctcacccgacccagggctacgacgcagatcggcccgactggaaaccggagcaatga

SEQ ID NO: 343557 - DNA, 1200 bp, Pseudomonas aeruginosa
atgagtaaagaattaaagcttacagtcctgaaagtccgccagccaattggcgatttttatatcgcatcaataagggcacaagacctagtagatatatccttctcggatgtaaggcggttagccaaagaccagcgtgaccttgagaaatatcttggtatccagcgccctgtcagccccaagagaattaaagaaataaagcaatatatcgaaggagaggattcgacatttccaacatcagttatccttgctgtggatgaaaagtgcgctgaatatgactcagatgggaacggcatcggcacactggttcttaaggagtatcaagccgatgcctctgatgaggcagactcaataccttacgctagaattgcaaaagttatagatggtcaacaccgcattgctgccttcatggatgaaaacaataattggtgttttgattacgatgagcgagattttgatattaatgttgcgatatttatcggggcggatgtctccgagcaggcaaatatatttgcaaccgtaaatcttgcgcaaacaaaagttaataaaagccttgtgtatgacctgacggagctggcaaaaacatcaagtcctcataagacatgccacaatgtagcggtggcattggataaagagccaagcagcccgctatatcaaaggattaagcggctaggaacagctacgccaggtcgaaaaaaagagcccttgacacaagcatcctttgttgaatctttagttaaattcatttcacccaaccccgttcaagatagaaatgatctcttggcagggaagaaaataaagcacgtcgctggatctgatttgaaaaaatttccatttagaaatttatttattgatggaaaagagattgatattaccgaaataatttacaactactttaaggcagttgagaaaaaatggccagactcatggaatgcaactgatcgcgtgggcaatctccttcctcgatcaaacgcctttaaagccttcatgatttatttgcgagaagatgcgtatccagaacttgcgcaaggaaactatggactgattccgtccgtgaatgaattttataaaaaactggatcacatcgagttaaaagacgaagactttacaacccgaaatttcgcaccaggcagtggtggacaagccacgttcttaaagatgttgcgtggggagatatcgctcgaagatatgctagacgggtaa

SEQ ID NO: 343558 - DNA, 627 bp, Pseudomonas aeruginosa
atgctactaaagaccatcggccgcctgcctctaattcaatgcctggtgcattttcctctgaatgctcataaaacagcattaaagaaattctctacgctttggattttgaccagccttcctgtcatcgtcgctgtatttctgtcgccaataccagatggaacctcgggtgtgggagtaaagcttctgctgaagctaagagagtccattacagtttcagaattatttgtgtacaccgccacatttcttacgcctattttctatatgatttttgagaagtaccaagaatcatcagaaactcaatttggcgaaaaaatagtacaaagcgttagaaggttattcaagggctacgggttgctggcgttgatttcaatcgtcatcatgatcttgaccgctattgctttcgggcagattaaggcagggtcgagtgacttccaaaactcgtttctcggctactacctaagtagtttatcactgccaatctacatcttttctttatactgctggtatctcacgctccttgatggagcatggagaggtgattttgtatcggagaatagaagctctgaaaaaaatatagtgaacgatttttctgcaaggctgcgtgctcgggagtctggtgatgagtaa

SEQ ID NO: 343559 - DNA, 942 bp, Pseudomonas aeruginosa
atgggcttgaggcaatcaagggaaaataacccattccaatgcgctgctgttgcaacgatcgaaggggtctctttggagttggaggaaggtttttgcgaaacaaaaatcattcccgccccaccgcacgcgaatagccactatcaagaaacctcgccttttctgaaatgggcaggagggaaaaggtggttggtcgaaaagcactcacaccttctaaatatagagcacgaaagatatatcgagccttttgtgggtagtggcgcagttttttttagcctgcttccgcattccgctattctttgcgataaaaacgaaaagctcatagaagtttatgaggcaataaaaagcgactggaagaaagttgcagatttgcttcgagttcatcacaaaaatcactcttcagaatattattatcaaactcgccgaaagcggttacgcacgccagaaacacgagcagcgcaatttatttacctaaacagaacctgttggaatggcttataccgggtaaataagaaaggtgaattcaacgtcccaataggaacgaagcagaatgtagttctgtcgactgatgattttgaaaaaatcgccttgtgcttaaaaaatgtagagcttctctctggcgactttgaaattgctcttgaaaaggccgggcagggggattttgtttttatagatcctccttatacagtcaaacataactacaacggctttctaaagtacaacgaaagtatattttcctgggaagaccaggttcgacttcgtgatgccgtcgagcttgctgtatcacgaggggcaaaagtgcttgtgactaacgcctgccatgacagcataaaacgcctatatgaaaacctaggcgagatctcaacgttaaatagagccagcatcatagccgggaaatcttccgctcggggcaggtacgaggaggtcgtcatcaaatgctactaa

SEQ ID NO: 343560 - DNA, 348 bp, Pseudomonas aeruginosa
gtgaccccgcttgtcaccgaggacgaccgggcgcggctgctggcccacggccaggcccgcgccgccgggcaggataccgacccgctgcccgtggtgcggctgttcacccccgacgcgcacgcaacctggctgctggcctcgctcgatcccaccgacggcgatacggcctatggcctgatcgacctgggcatcgggatgcctgccctgggcacggtgaagctctccgatctggcgtccatcgtcgggccgcgcaagcagcccgtgatgcgcgatcgttactttcaaccgacacggcggctgtcggagtatgtgcggctggccgaagaagacggttcgataccggactga

SEQ ID NO: 343561 - DNA, 777 bp, Pseudomonas aeruginosa
atggctggcccgagtgccgaacatcgagaacactggtatccgaccgctgcgtatctctacacgctgcatcttgatggcccggccttggcctgggagtacctgcgccgcaatcccgactaccggctagactggctgcgccgtcgccgccgcccggatgcggcgcaccgctggggcctgcgcctgctggaagatcccgccctagacgcacgtgacgcgcatccggcctggtttcccgaccacgatgccgtggtgcagctttatcccgatgccgacccaccgcccgaagcctatgccttcgagttctggtgtgttcccggccgcaagcatctgatccacgacggcaaacgcctggtgctggtgtcgcgctggcccggttgctgcctgcggctcgcgctggcgccgggcctggaagacggcatggcctacctctacgctacccgcgcctgcgccacaccctgcgcgcgttatcaggcactggtggccgaactggacaagctggcggcgctgccggatgccgtgcctgcggcaatggcccgttcccggcccacgctcgcggcggtgcaggaactgcacacgctccaggcgcttgacgcgaccctggccggcgcgtccttgcgcgaggtggccgaagggttgttcggcgtggatgccgtggccgccgactggcacgccgacagcgccttgcgtgcccgcgtgcggcggctggcgcgtcgcggcgaggcgctgatgcgcggcggctatcgcagcctggcgcagcttgggccagttgcatcgtag

SEQ ID NO: 343562 - DNA, 558 bp, Pseudomonas aeruginosa
atgaacgcatccatcgcacctgccgcgaacgcggtcacggcttctgcatcgaccacgccagcgacttcgctttcgacactcgcccgccaggccggcaacgtgccgctgacgcgcgtatcgctggcctacatcgaaccgcgcttcaagctctacctgcgcttcggcgaacctgcgcgcacgctccagctcgaccgctggcggcgctgcgcggtgttcctgccgaacgctgttctctgccgcatccgctggcagaccaacgactacggcacgatccgctggcagctcatggtgatgcaggctggcacgccattggatgccttgcagcgcatccccggcgtgcggccaggcgcacgtctgctgctgcacgccgaggatgacgccaacgtgcgcgccgtgttggaacgcatcgacggcatcgaggcgctgggcatcgccgcgtctgccgtctcgcccgcgtactggcgcacgctgggcaaccgtctggaggcccgcctgccgctgcccgaatacaccgccgagcggcattccgcgtggctcgctgggaaggcgctgccatga

SEQ ID NO: 343563 - DNA, 1512 bp, Pseudomonas aeruginosa
atgagcgctgacgacaaggtatcgctgcgtgcctgggtcgccgtcaccggcggcctgttcggctgcttcatggccggcatgaacgtgcacgtcaccagcgcggcgctgccggagatagaaggcgcgctgggagccaccttcgaggagggctcgtggatctccaccgcctatctggtcgcggaaatcagcatgatcccgcttaccgcctggctggtggaagtgttctccttgcgccgggtgatgctcctcggctcgctggtgttcctgctcagttcgctgagctgcgcgctggcgccgaacctgtcgacgctgatcctgatccgggtgatccagggggcttcgggggcggtgctgatcccgctgtcgatgcaactgatcctcaccgagctgccgtccagccgggtacccctcggcatggcgctgttcagcctttccaacagtgtggcccaggccgccggcccgtcgatcggcggctggctggcggatgcctattcctggcgctggatctttctcctgcaactgttgccggggatcgccctgctggccgcggtggcctggtcgatccgcccccgcgacggcgaccgcgaacgcctgcgccaggccgactggctcggcatcggcgcgatggtcgccggcctcggcgctctgcagatagtgctggaggaaggtggccgccgcgactggttcgagtccggcttcatccgcaccttcgccgtcctcgccgtgctcgccctgctgctcttcgtacagcgccaactgtggggcgcgcggccgttcatcaacctgcgcctgctgggcagctacaacttcggcgtgtccagcctggcgatggcggtgttcggcgcggcgaccttcggcctggtgttcctggtgcccaactacctgtcccagttgcagggtttcaacgcccggcagatcggcgacagcctgatcctctacggcctcgtgcaactgctcctggcgccgctgctgccgcgcctgatgcgctggctgaaccccaagctgctggtggccggcggcttcgcgatcatggccctgggctgctggatgggcgcgcacctgaacgccgacgcgggacgcaacgtgatcatcccctccatcgtcgtgcgcggcatcggccagccgctgatcatggtcgcgctctcggtactggcggtgaagggcctggacaaggcccaggccggctcggcctcggcgctgatctcgatgctgcgcaacctcggcggcgcgatcggcaccgcgctgctgacgcaactggtctcgctgcgcgagcgcttccactccgagcggatcggcgagaccctgacgatcttcgacggcgccctgcagcagcgcctgggcggtggccaggtgcggatacaactgccggagcagcagcaggcgctggccctgctcgaccacggggtgcgccagcaggcctacctgatggcctactccgacgccttctacctttcctgcgtggcgctcctggcctgcgccctggcctcgctgatgctgcgccagaaggactga

SEQ ID NO: 343564 - DNA, 807 bp, Pseudomonas aeruginosa; identical to SEQ ID NO: 325481

SEQ ID NO: 343565 - DNA, 303 bp, Pseudomonas aeruginosa; identical to SEQ ID NO: 328176

SEQ ID NO: 343566 - DNA, 276 bp, Pseudomonas aeruginosa
atgcgcacacccgcctggctcggcagcggcatgccgctgctcttcgtgctgctctggagcactggattcctcggcgccaagttcggcctgccgtacgccgagcccttcaccttcctggccatccgcctgctcctcgcggccaccctgctggccgccttcgccctgctcagcggtgcgccctggccgggcatgtcgcggtcgccggcctgctggtccatggcctgtacctgggcggggtgttcctcgccatcgagcacggcatgtcggccggcctga

SEQ ID NO: 343567 - DNA, 984 bp, Pseudomonas aeruginosa
atgaagcagagtttccactcacattttgatcgggacttgaccaaggccggctcggcggtactcggggaggcagtccgacgcggtctacttgggcaacacgaggccatgatccacgaccagcaatgggcgcagttctgtgtttatgccagggactctcatgaggtggatatcctggaattcgtcaataaaaaacttgtgagggagtacggggaagagctgtacatccaggcataccaagggaaccttccgcagcaaaacgtaatcgctctgcttgagactgtacattcagtaatgagcttcgcaagtgatggacgctggaagggctcagccgctgatgctggtagccggcttggctttccaagccatgcacggattacggtacctcgcggtcttgaccgaactaggtttgaagccgcgatggtagatattcaggctctccactcagagcagctagcaacattgatcagattggttcgatacctcggcatgtcaatgctagacgcttttttcttcgacgcagaagatgctcataaagaagccgaggcggaaaacatcttttatgcgttcagcaaagataagcgtgagcatcggatcattaatatttctgatcctgagcaaattgtcattctggataaggccgcagcatttcaaaaacgacatggcagcaggcgcccgaagcctgcagcttggcgtacatggaaatcaaagaacctacctgcagcgcaagagcttttactttctcacggactaaacattgatgactgtcgcgcagcatatgcctgcgagctctaccagcggacgtctggtcaccacgccccgattcttggaggaaaagcacccgacgatgaggatctggaggctcggaatgacgtcgcctacgagttagggcatttgcatatttgggaaactgatgcgtacgtcggtgccagggcctacatgcggaaagagcctgcaggcaccgggcgcaaagccgtcacacagtag

SEQ ID NO: 343568 - DNA, 834 bp, Pseudomonas aeruginosa
atgtcggtgcttttttctgtgaagggatgcgttggtaccttgctgttggttgcgttggtgggttgctccagtaccccgaaggtaacgttgccagaacctaaagatgttcctcgcgaaaaatggtccgatgccatgttggttctggaagccatgcgcatcgatggtcagcgcgatattccaagggtaatggtcgggaatgaagtagataacctgagcgcgccgcgatcttcgggaagctctggaggtttagcaacggcgggtttgggatacgtgtcgcctccaactggttttagcagcgcaggcgcagcctctcttggcgtcgggttattcttgctgggtggtggcagtgctggccctgtctatcgctaccaggttgctgcgtgggtgcctgaggaactcgcgtctaacccgaaggaggcatctgcgttggtcaggtcggcctggcttgatgcgagagaaaaatactttggtggaaaaatctcaaagttgcgtcatgagccggctaagtacgctgacggatcaggcaagaaatacgacaggcttgcagatttggctgctgggaaccccgcgccgttcgacgctccggcgagcgctgcgccagcgttcatttcggccgagaaagcctacggcccgattttcctgaccgatccctcaggcgaactatttgctgacgctagcagagctgataaggacggcatggatgcgctggcgggtattgctcgtcacctgcccgaatggatgtatgcatactatcctgggcggaattggcctaaggacttccggcctgccgcgatttacaacaagaacggcaatctctatttcattgggaagtag

SEQ ID NO: 343569 - DNA, 1056 bp, Pseudomonas aeruginosa
atgcagccccaaacacctcaacagccaggctggatggtggaactcacagcagcggtcgatattccagtggaaaagatccagtggatttggccaggctggctgccaagggcaaagctatccattcttgccggcgctggtgggtgcggcaaaaccacgttggcaatctcgctggcagccaggcttagtaaaggagatgcctggccagatggcagcaaatgtgaggccgcaggcaacgtcataatctggagtggtgaggatggtatagctgacacgataattcctcgccttacggctgcagatgcagacctaaaccgcgtgcacattatcgaagggctcagggatcagagtgggaataggcgacaatttgatcctgcagccaactttgcccttttgaacgaggcagccacacggattaacggcgtttcattgctgattttcgacccactgatcaacctcattcggggggacatgcaccgagcaaacgaagttcgacaggggctacaaatggtagtggattttgcagagcggcattgttgcgctgtcctcggcatatctcacctgagcaaaggtacggcccagtcctccgcagctaatcgtgtaatcggcagccaggcattctccgcgctcgctcgcactgtactggtggcagagaaggatcagaattcagaagccagggtgcttgtccgagccaagtctaacgtttcgattgatagcggggggatcgagtatttcgttgagcccatcgttatagacgagcagttggagacaacctgcatccgatggggagaggccatcgaaggaagcgctgaagccattctggctgctatcgagcaaacgaacagcccaataccagcatcagccattcaagaagcgtgcagctttctggaggagacgttacaagctgggcctgttgcaatcactgcgttgaagtctctagctgaagagtcttgcatttcgtgggcatcagttcgtagagctcggaaaaagctcggtatacggtcacacaaaacaggtatgcagggcggatgggcattgggactgcccacctcttcctga

SEQ ID NO: 343570 - DNA, 4905 bp, Pseudomonas aeruginosa
atgtcagccttatcagctttgctgaatacctaccgcagcgcttctgtcaccgaacgcgaaaaaggtacttacttcgaagagctgatttgcacttacctccgcaacgaagccacctaccgtgacctttacgacagagtatggacgtatgcggagtgggcgaaggaacaaagcctcagtggcaaggatgcgggcattgatttagtggctcgcacccaaggcaccggcgagtaccacgccatccagtgcaagctgtacgccgaggactacaaggtccagaagaaggacatagacagtttcttcaccgcctcgggcaaggcaccgttctcgcaccgcttcatcgtcgccaccaccaacaactggagcgagcacgctgaggacgcgttgcagggccagcagcctccggtcagtaaaatcgacctgcaagccctggaagacagccagatagactgggccaagtaccagcccaatcaggcagtcgctctcaaggccaagaagcagctgcgagagcaccagcaaaccgcgttgaatgccgtggccgctggcctcaaggacgcagaacgcggcaagctgatcatggcctgcggcaccggcaagaccttcaccagcctgaaaattgccgagcagcaggccggtaagggtaagcgtgtactgttcctggtgcccagcctgtcgctgctatcgcagacccttaccgaatggacgcaggaaagcgcaaccccgctccacagctttgccgtctgctccgacagcgacgttggcaagaagcgcaaagcagaggatgacgcggttcaggtgttcacccacgagctacgctacccagccaccactaaggcagatcgcctcgcagcggaaatgctcaagcgccatgatgccgagcacatgagcgtagtgttctccacctatcactccatcgacgtgatcagccgtgcccaggctgatcatggcctggccgctttcgatctggtgatctgcgacgaagcgcaccgcaccacgggcgccacctttggcgacgatgacgaaagcaactttgtgcgcgttcatgatgccgactacatccgcgccaccaaacgtctgtacatgaccgccacgccgcgcatctacggtgacaacgcgaagctcaaggccgagtccggtgaagtcaccctgtgctcgatggatgacgacgcgctctacggcaaagagctgttcgtcatcaacttctccgaggccgttcagcggggcctgctcaccgattacaaggtgctggtactcaccgtcgaggagagcaccatcagccggcgccttcaggagatgctgaaggacgagaacaaccagctcaaggtagacgacgccgccaagatagtcggttgctggaaggcgctggccaagcagggattggccgaaaacctggtgggtgatgatcagcccatgaggcgcgctgtagctttctgccaggtcatctcgcccaactacaagggcaccaagcacaaggtcagctcgatcaacatcgccagcatgttccagtcggtggtggaggcttatcaggagtcagaaaacatcgatgaggcctcacgcatcatctgcgaagccgcacatgtcgatggcggcatgaacgccagcgccaaggaagccaagctcaactggcttaaggaagaaccgccagccaacacctgccgcatcctcagtaacgtgcgctgcctgtcggaaggtgtggacgtaccggcgcttgacgccgtgctcttcctcaccccgcgcaattcccaggtcgacgttgtgcaatcggtgggccgggtgatgcgcaacgcaccgggtaaaaaacgcggctacgtggtgctgcccgtggtcattccggccggcatggagccccacgaagcgcttaatgacaaccagacctacaaagtggtctggcaggtgcttcaggcactgcgttcgcacgacgacagcttcgacgccatggtcaacaagctcgacctgatcggctctgacccgcgcaagatggaagtcatcgccatcaccgacaaggccgataaaaaagccaggaaaactagcggcaccagcaacggccaggcaggcaaaggccagtacggcattggtgagaaacgcgctaagtacgatgtcgaaggccagatgacccagcaggcggagctggcctatgaggtgggggaaatcgagaaggccatctacgccaaaatcgtcgacaagtgcggcaaccgccatcactgggaagactgggcaaacgacattgccaagatcgcccgcacccatattgaccgcatccagggcatcttggagaacccggccaacatccaagaaaaggctgccttcaacgccttcgccgccgagctgcgcgacgacctcaacgacagcatcagcgatggcgagattgtcgaaatgctcgcccagcacctggtaaccaagccggtattcgatgcgctgtttgacgagtacagttttgccagcaacaaccccatgtccaaggccatgcaaggcgtgctggacgcgcttcatgagcaccacctggccaaggaagctgacaccttggagaagttctacgccagcgtgcgtcagcgcgctgccggcatcaacaacgcccaaggcaagcagaagatcatcgtcgagctgtacgacaagttcttccgcaacgccttccccaagatgaccgagcgcctgggtatcgtttacaccccggtcgaggtggtggacttcatccttcacagcgtcaaccacctgctgcaacaagagttcggtcagaccctgggcagtaagggcgtccacatcatcgacccctttaccggcaccggtacttttatcacccgcctgattcagtcaggtctaattaaaccggaagagctgccgcataagtacaagaatgaaatccacgccaacgagttggttttgctggcctactacatagctgccatcaatatcgaagctgcctaccacggcgaagtaatcgatgagtacgcgccgtttgaaggtatctgtctgaccgacaccttccaaatgtacgagaaagacgacctggtggacgccctgttggaggacaacagcgctcggcgtaagcgtcagaaggcgctggatattcgggtgattgtgggtaatccaccgtattcggcgaagcaggatagcggtaatgacaacaatgctaatttggcctatctcaatctcgattcctccattcgtgaaagttatgctgcgcgctcagctgcgaccaataaaaacgccttgtacgacagctacattcgagctattcgatgggccagtgatcgtatagggggagcaggcattatcggatttgtaaccaatgcggggtttgttgaatccaacacagcagatggcgttcgcaagtgtttggtggatgagttctccagcctctatgtgttccatttacgtggtaatcagcgcacaagcggcgaaacctcccgcaaggaaggtggcaagattttcggcagtggcagtcgcgcccctatcgcaatctcattgttggtcaagaaccctcaatcaccggctcacggtcagatttatttccacgatattggtgactatctcagccgcgaggaaaaactagagctgatcgccagctacgtcagcgtggaaggcattaggaattggcaaaccatcaccccggatgagcacggtgactggctcaaacagcgtgacgacagcttcaaccatttcatagttttgggcgataaggaggacaaatcagcaccgagcttgtttgagaactactcacgaggagttgaatcgggacgagacgtttgggtttacaactcaagcaaaatcgctgtggctgagaatgtcagcgatatgctggccgtctatcacaaagaggtgacggctctcaccaacgccgatctgaaaggaacaaagaaagatcggattgcccaagctgttcaattggtttgtaacgaccccacaaaaattagctggacaagtagcttgttagccgatgcggcgagcggtattcagcatagcttcgatggcgatgctctatgtcatgccctctaccgaccatttaccaaacagtggctggtttatgatgcgtctgttattcatcgagtaggccagatgccacgaatttttccaagatcgcctagtcagaatataggaatttgtgttcctggcttaggcggggataaaggattctcggcactaatagttaatcgtattccggatctgaatttggctccaggcatggggggataccaatgcttccccctctacctctacgacgaagccccccaccccgcagagaacgatctcttttccaagtcaactgaaggtggcttgcgcagccgcaatgcaattactgacaccggccttgctcatttccaagcagcctaccctggcgagcagatcagcaaagaagacctgttctactacgtctacggtatcctccattccccggactaccgcgagcgctttgccgacaatctgagcaaggagctgccgcgtatcccggcagtgaagaacgccgtcgacttctgggcgttcagcaaggctggccgtgccctggccgagcttcacctgaactacgaaaccgtcgagccctacccgctgaccatcgaggccaagagcacgctcaccgacgcagattaccgcgtggagaagatgaagttcgccaagaagggcgacaagagcgccgtcatctacaaccaccgcatcaccctcaagggcatccctgaggcggcatgggactatgtggtcaacggcaaggccgcgttggactgggtgatggagcgccaagccgtgcgcaccgacaaagccagcggcatcgtcaacgacgccaacgactgggccgtggaaaccatgggcaaccccaagtaccctctggagctgttccagcgcgtggtcactgttagcctggaaacccagagaatcgtcaaggcgctgcccaagctcgatatcgctacagataactag

SEQ ID NO: 343571 - DNA, 312 bp, Pseudomonas aeruginosa
gtggcctatccggccctcggcctgagcatgctgcgctctttctacgagcaccgtccggcccgcgagccggcgcagcgcagcgtgctggtcgaggcggggtggccgtggcggctgctgttcctcaacaacaacttgcatctggtccaccacgatctgccgggcctgccctggtacctgctgccgcgcgtgtatagcgcaagccgccgtgcctaccggcgacgtagtggcgatttccacctgcccggctatggtcgtctatggcggcgccacggttggcggccagtggatgcgccggtgcatcccgagcattga

SEQ ID NO: 343572 - DNA, 378 bp, Pseudomonas aeruginosa
atgaacgaccgcgaactactcgaactggcggcgcgggcggcggggatcaaggcacgctggttccgagtaaaacaatggcgacaagtcggtggttataggatgcaaacagggcaggaagatgtttttggaactcatcatagcaagccttggaacccgctcaccgacgacggcgacgcgctgaggctggctgtgaagctgggccttaccgtagacattgatctagatgagtcgtggaccgaaatcgattacacggcagactatcaagataaggaaattcgggaaggccatgggggcggcacagacccatacggggctactcgactagccatcgtccgcgccgccgccgagatcggcaagtctatgggaggtggggagtga

SEQ ID NO: 343573 - DNA, 294 bp, Pseudomonas aeruginosa
atgggcctcattatgaggcttggagatgtctacgaaactaggggcgattcattcgagaacgccaatcaaagcgtaattggctgcaagctgcgtaacacaccctggacggatcagcacctggacctgttcaacaccagttcggctgagctgcgtcagcagcagttggactatgggttgcccgccgaactcgtggagatcctgcacctggcagggcaggccgatgtgcgctttttgctgttcgacccggatgcggcgttgctggatgggctgccagtgttcaaggacgtggcgtaa

SEQ ID NO: 343574 - DNA, 444 bp, Pseudomonas aeruginosa
atgagcacggaagatttcttctcaaaacttgatgaaaagctaaaagcagcacaggaaaaggaagtgcttaaaaaagcaaccatggagaaaaaccttagtttcctcaaggaagtttcatcccgcctttcccctctagcaaaagactataaatcaaaactacaagagcgcggaatcaaggtagacttaaagatttcagattactgcatatcgtttagcctaacttatagagatggcggccatcacgccataactctcggggctgctctaaactccaaccgcctcgaaataactgagaacttcaccgatgacgacggaagaaactatacatctctagatggttcatcttatgattcagcgaactggaaagatgaaatctacgaagaaaaactaaaaaaatctatcgagagctttatttcctacgcagacaggcatggcggaatatag

SEQ ID NO: 343575 - DNA, 1359 bp, Pseudomonas aeruginosa
gtggaccccaacgagcaaaagcggctagaggccgctgctaaggctgctgaggcagcacagaagaagctccaggggcagatagattccaccgctcaggactacgaacgtcagatcgccctgatcaacaccgaggtggataaacgcaaggacgccaccgaggtagcaaagcttcagttcgaaattgagtcgggcaagctggttggaatcaatgccgagcagcagaaacgcttgaatggcttggcagaagagcttgaccgcctgaagcagctaaagcaggcgaacgaggatgcggcgaaggcgcaggctttccgtgcaacgctcaatgaatcgaacgcaactgctcgggcaggatttgcgattgaactggcgggatctggaagcggcgacaagctgagagagcgactgcgggcagacctggagatccagcaggactacaacaaacagcttgccgatctccagaagcagttcaacagcgccgaaatcagcaaggaactctacgaccaagaaacggacatgctgcgccaggctctcgctgagcgcttggaaatccagcacgagtattacgctgcgcaggatgaggctcaaagcaactggctggacggcgtaacgtcggcttgggagaactaccgcgacacagccacggactatcaacagcaagctgccgacttcaccacgcagacgctggacgggctcacctctgctgtaggagacggcatcgcttcgatgatcatggacggcgaaagtcttgccgatgttttcaagaacatcgcgcagacgatggccacgagcatcatcaacgcgcttgcgcagatggcagcccaatggctggtctatcaggcggtgcaactggtgagcgggaaagctgctcaggctagcgccgcctctactctcatcgcgaacgcacaagcaactgccttccaggctcaactggcggcatttgcgagcaccgctgcaatcccaatcgtaggcccgctgttggctccggcggcggctgcttcggctgccggcatcaccgctccaatggttgccggagttgctgcgtccgcccttgctggcatggcgcacgagggcattgactccatcccgcagaccggcacttggttgctggaaaagggcgagcgggtaaccacagccgaaaccagcgccaagctcgacaagaccctgagtgacattcagtcgggaggcactggcgccccggtcgtgaacctgtacgaagacgccagtaaggctggaacggtaaacagtcggcaggagaacggacagaacgtcatcgatatcttcgtgagcaacatcatgagcgacggcaaggcgcagcaagcgattagccggaaatttggactgcaaggggtagggcaatga

SEQ ID NO: 343576 - DNA, 516 bp, Pseudomonas aeruginosa
atgatcgagtatccgcgcgagtatttgccccttccgctgcgcgagggctatgccttccaggcggtgagccccatgcagcgcacggagatgcagagcggtcgagccaggcagcggcgccggtttacgtcggtgccgactatggcctcggtcgcgtggattctcgatgacgttcaggcgcagctgttcgaggcatggtttgaggatgcgctgaagtcaggctcggagtggttcgactgtccgctgaagactccagagggtggcatccagaattacgccgcgcgtttcaccgatatctaccaaggcccggcgctagtcggcaaaagccactggcggttttcggctgagctggagctgcgcgagcggccgattctggcgcccggctggggcaaattccccggcctgatcgccgggcagagcctcatcgacctcgccctaaaccgcgaatggcccgaatccccctaccagacccacatgggcgcccttgactcgggtgtgaacgaggagtggccgcaatga

SEQ ID NO: 343577 - DNA, 483 bp, Pseudomonas aeruginosa
atgacagtacttgaaaaagtctatgcctctggcggcgaaaccatcctctatacgctggagctggcgtgcgaggcatgggcagagccgatcctgctggccgaagggttcgaggatcagcactgcatcaccgaggacggccggcagctgacgttcaaggcgtcgggcattggcctgtcgctgccgaagaagaccagcagcggcgcgcagaacctaagtttcgcgatagataacgtgacaggggaggcgcaagccaagattgacgcggcgcttgaggcggagaagaaggtgttcctgaccttcaggacctacctcgccagcgatctaacggcgccgtccgatcaggtttatcgcgcgacagtgctgagcggcaagatcaagggttcaaccgtgcaggtggaggccggcttcttcgacctcatcaacacggcgttcccgcgcgacctctacaccgtcaacttcgcccccggcattcgttacctatga

SEQ ID NO: 343578 - DNA, 396 bp, Pseudomonas aeruginosa
atgacctggctcgacaaatacctctcgtcctcatatcgggacgggggacgcgacctgccgttcgtggattgttacggcctggtgcgcctggtgcgtgaggaagtgttcggcaagggcgatctgccggccttcggccatgtgcgcaacaccatgcccgccgagttcacgcgctgcgttaagcaggcggcgaccgagttcgaggagtgccggcctgagcctggcgcggtcgcgacagtctggcgcggacgcatctgcgtgcatatcgccatcgtcgtcgagatcgacgggcgcctggccgtgctcgacaccggcagcaagaccggcccgagctggtccagcgttccaaggttcgaggcgcgctttgccaaagtggcctatttcagggaaaaaccatga

SEQ ID NO: 343579 - DNA, 2709 bp, Pseudomonas aeruginosa
atgattcggatttatccgtcaaagctccaaggcgagccgctggagacgcatcacatcggctcggcgatgaccatcggcgcctggttgcgcgccaatgtggcgagctattcggagcgcgaggttcatccgatctcgttcgaagtgaatggcgccatggttccgtccgaggagtgggatagtttcgtcattacgccggatgatgtggtggatatcacacctgagccgaaggagccggtcagcgcgaccgcgatgctcgtctatgcggccgtcgcagtggcggctgcggtgctcgtcgtcgcgctaatgcccaagccgcagacgaaaggcggcggcggagtggggcgaggcgatgcgctcaacgaggcgtcggccaagggcaacaaagtccgcatcaatgacccaatccgcgaagtcgccggcaagcgccgcgtctacccggattacctgctgccgccgcatcgcttcttttcggcaccgcgtgaccagtgggtggaaatgctgctgtgcatcggcaagggcaaattcgagattccggccagccgcatactcgtcggtgatacgccgctgatttccctcggcagcgacgcggaatattcgatctaccagcccggccaatcgctgggaggcgagagcgccgcagagtggtggcactcggctgacgaagtgggcgcgacctcgaccggctccgcaggccttgagttgacggcaacctacgccgtcgacccagagcctacggccaccagctacattttcagcggcgacaccatcaccattccgtccggtgccggatcgttcccggcgggctgggcgccaggcatgatcgtgcgcattgaagcgccgcgcccctataccgtcatcgacggcgggccggatcgagacatcatcgaaggcagcttcgcctggatggcgccgtttgcgggaatggtcattgaggtggctggcgactatgccggttcgttcgtggtgcacagctacacgcccggcgtcgatgcgccggatgagatgaccctgaactatcctgacggctcgcccgtggccgcgctgccggacgggactgcgagcctgagcgtgggctatgccggcctgcgctatcgcatcgtcgcggccggcacgtcggccatctcggttgagcgactgaccgatgccggcgcgcctgatccggtcgcatggccgggattcgatgacttcaacagtaccgacgcctcgatcagcctcgacgcatccacgcaggagggcgactggaccgggccgttcatggcctgcccgccgaacgaggtggccagccatatcgagtgggacgtgatgttccccggcggcctgtgcggcgtcgacaaaaaggggcgcaaatactcgatatccgtgaccgttgagatgcagtaccgcgacgctgcggtagcgggtgcctggacgtcggtctggaaaacctacagtggcgcgcaggtcgatcagctcggatacaccgaatcgctgacgctgccgagcatgatgcgccccgaagtgcggctgaggcgcatcggcgcgaaatctgacagcacgcagatcatcgatggcgtcgaatggtacgggctgcgcgccaagttgcaggcgccgaccgcatacgagggcgtcacggtgatggccgtgcgcgtcaagggcggcaaccgcctggccgcacagtcagagcagctgatttccgctgaggtcacgcgcgtgctgccggttcgcaccggtgacggcacatgggatatcgagacgccgacgcgcgatatcgtgccgttcgtggcctacgttgcacgatccatcggctataccgatgacgacctggatttcgccgaactggatcgcctcggagccctatgggcgcagcgcggcgacacattcgacatggcgtatgagtccgcgtccacggtcaagcagatcattggccatgcgctaaaagccggctttgcggacctgaccatcgagcgggggcgcctgtccgctgcccgtgacgagatccgcgacgcgccggaacagacgttcgcgccgaaaaccgacttgtacacgccgcagaacatgaccgaggagctggagcgcgacttctccgcagtcggcccggatgacttcgacggcgtggatgtggagtacgtcgacgaaaccacctgggcggtggagaccgtcgagtgccgcctgccgggcgatatcggtcgcaaggtcgagaagctgacagcagagggcatcactagcaggacgcgcgcttggcgcctcggaatgcggcagcggatggcgcacaagcaccgccgctgggcgtatcgctgggcgaccgagcttgatgcgcttaattcgggcttcatgtcgttctgtcatgtcgcagacgacgtgccaggctacggccagagcgcgctgatgctgagctacgacaacggaatcatcgagtcgtcagagccgttcgactggtccgctggcggcgcgcatgtggttggtattcgccggccagatggcacgctttcaggtccatacgccgcgacgcgcatcgatgactataggctgtcgatcactggcttggacttcgagccagacacctcgtggagcatcgagccgccgcatcttctgtttggtccggtcaaccgctggagctatccggcgctgatcacgtcaatcagcccgagcggcacagatggggcgtcagtagaggcagtcaactacgcgcccgaagtctacacctacgacaacgccagcgcccccaactga

SEQ ID NO: 343580 - DNA, 2166 bp, Pseudomonas aeruginosa
atgactacgtatgccaccggcaacccgcttggctccaaagacccgcgcgacttgtacgacaactccgaaaacttagacgcagcgatgaacgaccgggtgaataccacgtggaatgatcgtttcggcgtctccagaaaaacctggtttggagtcgaacagcaggtcaacgacttcctcgccaactccggcttcgagctgccgccgctggtgtacgtcgatggctcaacgctgaccgtagatcgcccgacccaactcatcgagcgcgacgggaatctctacagcgtgaaactgccggcgtcgttccccgttcagcttaccgggaactggtctgccgacgaacctctgttgacagttcgctctgaccaatccttgcgtcagcagctggctggggcggatggcgcagatatggtcggtcttattcgtgaaggtactacgccgcaatactctacaacggtttacgactggtaccagacgacgatgatcaatgccgtgactgactacggcatggttcctgatttcgatccacagcctggaaccgtcaatggtacaaataacctagtggccatccaacgattgatggacgatcttgctcttatgcctggtcgaaaggtcgttgtcttcccagccgggaactactacttcaattgggatggaacctcaaacgtcggcggagtcggcgtcttgtggggaagggttggcgcagggctatcgaacgtcacattcttcgggtatggcgccacattttatggcggctctgctggtagattccatggagtattcaatgctaactatggagttctaattaaaggcttaagtgcgatctgctatgccggtggaactattagtactagccgtcagaatgacgcttgtttcagctgtaactacaactgtcacggcgttactttcgaagatgtttacatggcaaactgcctgggtgactgtgtttatcttggtggcagtctagagaatggagtcttaactggacttctctgccgagacatatctttcaaaaacagcactttaaaagaaagatatggaaatggaacaaggtcatactacactggcggcactcgctcaaggctagcaatcgctgtaattgattgcatcggtctaacaatagaaaactgcaccatcataggtggaattgactttgagcccaatgctgacggccagaatcttagaaatattaacgtaaaaaataacgtattccaccaaggaaactactctgcctacacaggctcaaacccttttatggaggaagctatcaatagcggtagtcaagtaatccgaggagacatccgattccaatctattgcaggcggcgggattatttcacaaaacataaatatcactggaaacagtttctactatggattcctgagacagacagccaccgcaatatctgatgtcgtctggagtaataaccatatgtatcgtggaatttttgctctggcacatgactcaggctcgaacagcaatataggtgctcgtatcaacggccttaccattgaccatgcactggctggtctggatgatgacatattcgaactaaaaggatccggcacgactcccccaagtatcccagccgttgctattcttttacaggggaatattgcctacgcgagaatcagcgggatcactgccggaaagtcttccggccagttctcttatttattttatgctgaccctaatcatgccgcaggagataatggacgctgtacgatttctgactgctacatccctggtgccccgatatctaactttagtttcgccagttcaaccgaagttctcggcacgacctcaatgccaaattccggcattggttcttccaatttcgcaaggataaccgcagacagtatttcaaacactatcggaacagttcagctttctaatagcggcaccataagctggcagactaatgggaagcgcaacattgatgtaactgccactacgacggggctttccctgacaggaatttcaaactctccagcagttggctccgaggtaagaattaggaacgctggctcaaactctttcactctggcatctggtgcgtctttctatttgaaaggtggtgcaaacgctcttcttgatgacaacaggaagatggttacatttgaacaggtatcagccggagtatgggttgagtcctataggaatttctaa

SEQ ID NO: 343581 - DNA, 1275 bp, Pseudomonas aeruginosa
atgataaagaggataaaaaatatatcgtcagccaacatcaaagaccgctatgttatagcgctatcatttgcagctgcattcttattgatgtgggcgagaaggccagaccttctcataaatccacaattttgggcggaggatggatactactggtactcaggtgcttacaacggaaatatattaagcttcttagcaaccccggtaaatggatattttcaaacaatatcgaaaataacagcagcgttttctcttattcttcctatagaacacgcaccattgctattcaacattatagctctctcaattagagcggcatgtgtctcattccttctatcatcaagaatggggttcgcgagcatacagggtcgaatagcagtagccctattcgctatactgatgccagaaataacagaaatacactcgaatatcacaaacacgcactggtatttggctctctacttgttgatgttgttaatagcagaaagtccaaaaacaatctactggaaggcacacgatataactgttgcagttatagcatccacaagcgggcctttttgtgtattcatgattccagtaatagtaataaagcttgtagaaaatggttctatcaaaataccagaaataaaaataaacaaaatagatgcaacatcaacgacagttattctttgctctgccatacaggcagcttcaatattgttaaccgccacagacacaagaacaagagcgccattaggtgcatcaatagaaaaccttgcaaacattctatcaagcagaatattttttggatcttttgcaagcgccaaagaatcatcctggctatgggaatatccattcttcaaatatttgatatgctttgcaggcatgacagcaatcatatatgcttttatgaaagcagactggagaataaagtcaataataatattccctacaataatgctcgcatttgcacttgcaaaacctcaaatggcaaacactgttgatcagtggcctaaattcatgctgcacggcgagagataccttgtaatacccaatatttgcttatttgcaatatattgttattgcatagcatgcctaagtggaaaatttaaaaaagcagtaaaaatctcagcagcagcaatgtatatagtagttgcagtggtaaacttcaaaatacaagaaatgccagacctaaaatggaaagatgaagtaaaaaaacttgagaccgcgatgcctggagaaaaagtaaagttgatgataaatccaataggctggtcaatgacaattaataaaaaataa

SEQ ID NO: 343582 - DNA, 927 bp, Pseudomonas aeruginosa
gtgaagctatctctagtagttccagtcttcaacgaagaagacgccataccgatattctacaatgaagtcaggaaatgcaaagaacttgcagaccatagaatagagatcatttttataaatgatggaagcacagactcaacagaagacataataaatgctctatctgtatctgaccaactggtgttaccaatatcttttactcgaaactttggcaaagaggctgctttatttgctggactcgatcacgctacaggggacgcggtaatccctatagatgttgaccttcaagaccctattgaaattattcctgagctagttagtaagtggcaagaaggaaatgatgtagtccttgcaaagcgtaccgacaggtcaacggacgggcacctgaaacgcaagacggcagaatggttctatcgcctgcacaacaaaatcagccaccctaaaatagaagagaacgttggtgatttcaggctgatgtctcgggctgtcgttgacaacatacgccagatgccagagaaaaaccttttcatgaaaggggttctttcatgggctggaggtaaaacggcagtagtcgagtacaccagggccgaaagggttgcaggctctacgaagttcaacggatggaagttatggaatcttgctcttgagggggttaccagcttctcgactgttccgctgcgcatttggacttatatagggctatcagttgctacattcgcctttttctatggggcagtcatgatattagagactctaatatatgggaatccagtcagagggtatccatcacttctagtctcaatgctttttcttgggggaattcaactgatcggcatcggcgtattaggtgagtacatagggcgaatatacatagaaacaaaaaacaggcctagatatatagcaaaacaaagggatactaaaaaatga

SEQ ID NO: 343583 - DNA, 435 bp, Pseudomonas aeruginosa
atgcgtacatcccaacgaggcatagacctcatcaaatcgttcgagggcctgcgcctgtccgcctatcaggactcggtgggtgtctggaccatcggctatggcactacgcggggcgtgacccgctacatgacgatcaccgttgagcaggccgagcggatgttggccaatgacattcagcgcttcgagcctgaactggacaagctggtgaaagtgccgctgaaccagaatcagtgggatgccctgatgagcttcgtctacaacctgggatcggccaatcttgcgtcgtccacgctgctcaagctactgaacaagggtgactaccggggggcggcggaccagttcccgcgctgggtgaatgcgggtggtaagcgcttggaggggctggtaaagcgccgagcggcggaacgtgtcctgttcctggagccgctgccgtga

SEQ ID NO: 343584 - DNA, 702 bp, Pseudomonas aeruginosa
atgctccaccaggtagccggagaccaccgacatccagaggatggtcaccgggttgccgaggatcaggaaggtattcgcccgcgagcgctcggcgcgggtgaaccagtggcagaggtagaccagcatcgccggcatcaccgccgcctcgaccacgccgaggaggaagcggatgccgatcagcaggtagacgttggcgaccatcccggtcagggtggccagcccgccccagaggatcaggctgacgaagatcagcttcttgacgctgcgcttttccgcgtagatcgcccccggcacctggaagaagaagtaaccgaggaagaacagcgcgcccagcagcgaggacagcccgggggtgatccgcaggtcgtcggccatcccggaggcggcggcgaagccgtagttggcacggtccaggtaggccaggctgtaggtgacgaaaacgatcggcatgatgtaccaccagcggctgctggcgaggcgaggcatggtcatggtcggtatctcctgagcttgtcttgttcttgtcgcaacaggtgccgcgtgggcggcgggttcaggcgctcttgcggcgctcgcggtcgagcagttggctgcgtttcggcagcccctccatgtcgccgcggacctgtaccgcgcggctgccgatccagttgccgcgcgccaccgcgtcgggcagcggcaggccttccagcagcgcgctga

SEQ ID NO: 343585 - DNA, 1119 bp, Pseudomonas aeruginosa
atgattcagccacatgctttgtctggaccggtccccgatgctgtctgccgtacggcgctacaagtcgatgctctccagcgccctggcgcgttgtttcccgcgtaccaccgcctacctgcaggccgagcgcgaggctcgcgaagccttgttgcagccggccaaggcccgctccaggaagaacgccgcgaaggctccggccaaggccgccggcaagcctgcgaagggcgccgttcgggggaccccacgcaagcccgctgccgcctcgcagggcgcgccgcagggaatctatccggctgccgcactgaaggtcgacgaatcccaggagcgcaccatgcgcgagcaggtggcgcaggccgtgacgctcggtgtggtcagcccgccgtccgaggaacagtgggcgatgatcctctgccgccagccgctggcgcggatctttgccggtgccggctcgggcaagtcgaccaccctggtcctgcgggtggtgttcatgctctgccacctgggcgtcgagccgcagcggctgacagtgatttccttcaccaacgcctcctgtacgcagttgcgcgaacaattgctgcggctgctcgcgcactggcagtacccgttcgacgcggcccaggcgcggcagtgcgtgcgcactttccattcggcgctcggcagcctggcccgcgaggtgctcggcaatccgcgctggttcgaacaactggacgaccgcgaccccgccgccgagccggacaacccccttgccgccggacgcctgcgtccggcccagcagcgcctgctgaagcaggcctaccagcagtgctacgcggaaagcccggcgttccgcgccaagatccacaagctgctggaactgccgccgccggcggagccggaagaggggcgcgcggcggcagccgaaggcgccgctggagccgttcaagctggccggcgagttccaggcgctgccgctgtacgaagccttccatgcccaggccgggttcgccgagagcctgggcctgcgcgtcgaacgcctggacagcggcaagctggaatgcgggttgcgcgagaagatcttcgtcgaagccatggcactgttctgggcgaggttccaggcgctgttgcgcgaggagggcctga

SEQ ID NO: 343586 - DNA, 192 bp, Pseudomonas aeruginosa
atgagcactaccgcccaaactgtgcagcagccacgcacttcttcggtcgttcgagatgcactcagccggcaaaatcagcagatatctcctgctagaaccgccgagccgaaaagccagtacgagcgaatggttcgcaagctgaatgtcaagcctagcgcccacgagatgttgatggcgtacacgcaggtctga

SEQ ID NO: 343587 - DNA, 972 bp, Pseudomonas aeruginosa
atggctgatgtacgaccgacgaagttgcagaacgacggcaacggctatggctcgcttcgagagttcggggacggcgacacggtgccggttgcgcttggcggaacaggagcagcaaccgctgccggcgcgcgcttgagcctgttcgacgccaggctgcagaacttcagccttctgctcggtggcgctgaccagctcccgttccagactgggccgaatacctgggcgcagacaccgctgacgagcgtagggcgcggaatgctcggagcgtctacgcaggcgaatgctttgagctacattggcggagtaccgaaaagcctgtcgtccaaccgagccgtttcggatcctaacaccgtagctgacgaatgcgggttctacggtattggctcgtcgccctggtcgaatctgccgccgggtatcgatacgctgaaccccatcggctcgatgctttatcaccacccgtacgacgcatcgactgcggttcagctattcgtcccgcgtacctcaaacatactgtatttccgtcggaagacggccggtacgtggcagccttgggtccgcgtgctgtccgatgcgcagttgcttggaacagtagctcagtctggaggctcgccgatcggatcggttcttgagcgcggcagcaacgcgaatggggaatacattaggctggcagacggtacgcagatttgttggacgaacactctcacattcaccgctggggtctcatcagtcggtgcgaactggtcgtatccggcgagctttagttcctcgtaccccatcgctggggctgtctccgcttctggtgctggtggagactatgactctggcgtgtcggcgagaaaccagggagcggcctacttcaatccatccgcgggtacggctggggtggggttcttctgcatatcgtcggcatcattcacgtcaggcgctcagactaggaataacagggtcgtcgccatcgggaggtggttctga

SEQ ID NO: 343588 - DNA, 282 bp, Pseudomonas aeruginosa
atggctgtgctccagacccacaaggtcgtcgcgcagttgcctgcggtgctggagccgaacgcgatctacttcgtccggcgcagcaccggatacgaccagttcgtgaccaacggcgcgggcgtcgtggtggcatacccgatgaacgtccgcatccccgcggctgttcctgggtatctcgccgatggttccatgcttcggctcacgatgaaccctgacggccaactgccggcctataccgccggcggcgcaactctcaacctacaggtgcttttcaatggctga

SEQ ID NO: 343589 - DNA, 1290 bp, Pseudomonas aeruginosa
atgaatccaaaaaatatattttggaatctgctgggattagggcttcctttaattattgccgctctgacagtgccacatctcattgccactgtaggagttgaaaggtttggctttcttgctctgtcatgggggcttattggctatgccggaatacttgatctggggataggtcgagctgttactcagaaactctcctctattcgtggctctgatgaggagatgaattcatacacaataatgagtacagctattcggatcaccgccattgttggtgggctgggcttttccctgattatcatatttggcctcctggggggcggagaatttttttcccataaagatgtcagttcgcttgagctagaattctctgttttactattggcttttgccttacctttgcaagctataagtgctacctatagaggggtgaatgaggcgtatctcaacttcaaagggatcaacctcttacgtatctttcttggggcgactaattttggtggtccttttctagtttctttctatgcaaaggatcttcattatcttgtaactacccttgtcctgtctcgggctttggctttctttatattccggcgtttagctcatggagtactcaaagaaacactggtggagagaagttgcaaatatgatcggcgtcaggctgttgagttgttccgatttggtggttgggtcactgtaagtagtataataaatccttttcttgttcagtccgataggttttttattggtgttttattgtctgctgcagcggtaacctcttatgtaattccatatgaaatcactattcagtcgatgatccttgtgggtgctgtttccaccgttgcctttccgtctatatcaaatttaattcgcacttcctttgctgaagctctggagtgttttaataaatggctcttgcgtgtgctgttgataatgggaggagggatgctttgcctggcttttcttttgccctttattttgaagttgtgggtgggggattatataggggacgactctatcagtgtaggaaggatcctttgtcttggagtgtttttcaatgcgttgggtgctatgttctattctttcttgcatgccaacgccaaggtgaaagaaactgcaattttgcactccatagagctaccaatatttatcctcattttgattattctgattccacggcatgggatcgtgggggcggctgttgcgtggtcgctgagaacattggcggataccatagtgcttgctgttttgagctatttttcaggctggagagtgaaatttgctaactgctag

SEQ ID NO: 343590 - DNA, 1026 bp, Pseudomonas aeruginosa
atgaacgcttacgctaaggctttaagtaggctagagactactactagtagttggctggtcactggggttgccggttttactggatcgaatcttctggagttacttctgaaatttaatcagaaggttgtggggttggatgatttttctaccgggcatatgtataaccttgatgaagtgagggggcttgttggcgaggagagatggaggaacttcaagcttatacagggggatatcagagacattggtgattgcaggcgtgcagtcgagggcgtcgattatgttcttcatcaggccgccttgggttccgttcctcgctcaattgcagatccgattactacaaactcggtaaatatctcaggatttctgaatatcctcgtggcgtccaaagaggcgggggttaagagccttacctatgcagctagtagttcaacctatggtgaccacccaggattgcctaaggtagaggaagttatagggaaaccactgtcgccctatgcagtaaccaagtacgtcaatgagctttatgctgatgtcttttcgcgctgctatggcttcaacttgattggtttgagatattttaatgtttttggaaaacggcaggatcctaatggggcctatgctgcagtgattccaaaatggatttcagctatgataaagggtgagcccgtatatattaatggggatggtgaaactagtcgggatttttgcttcattaataatgtgataaaagcgaatctgctggctgctttttgtgaaaccgaagaggcaaaaaatcaggtttataatgttgcttatggtggtcgcacaacattgggtcagctttttgactcgctaaaagttgagctttcccggaacggtattaactatgagcaaggacctatttatagggagtttcgtgcgggggatgtacgtcactctcaagcggaaatcaaaaaggctcaagcctatctaggctataatcccgaatatgatatccaggctggtattgctgaggctatgccttggtatatatcttttgtaaagtag

SEQ ID NO: 343591 - DNA, 1266 bp, Pseudomonas aeruginosa
atggatattaaggccgctgttgtcgggttggggtatgttgggctacctctggctgtggagtttggaaagaagcgatccgtcacaggtttcgatataaatcatagtcgtattcgagatctgcagaaagggtatgattctactcttgaggtcgaaaaggaagagctggaaagtgctgtacatctgaaatttacttccactctgagtgagcttcaagagtgtaatttctttattgttactgtgcctacacccattgatgaacataaacagcctgatttgacgcctctggtgaaggcatctgagagtatcgccaaggttctgaaaaagaatgacatcgtggtgtatgagtccacggtctatcctggtgcgactgaggaagtgtgcgtgcccgttctggaaagggaatccgggctaagatttaattctgatttttttgtaggctatagtcctgaacgtataaacccgggggacaaagagcatcgtgtctcgacaatcaagaaagtaacttcagggtctacccctgaagtagcagagatagtcgattctctttatagggaaataattacggctgggactcataaggctgagagcataaaagtagcagaagctgccaaggttattgaaaatactcaacgtgatctaaatattgcgcttataaatgagctggcaattattttcaataaacttgagattgataccgagtccgtgctgcaggcggcaggaacgaagtggaatttcctcccctttaggccgggtcttgttggtgggcactgtattggtgtagatccttattaccttacccataaggctcaaagcataggttatcatccggaaatcatactggcagggcgacgtctcaatgatggcatgggtgcgtatgtagtttctcagctggtcaaagccatgctaagaaagcgtattcatgtagacggcgctcgtgttttggtcatggggttgaccttcaaagagaactgtcccgatttacgaaatacaaaggtcgtggatatagttcgggagttggccgaatacaatatcgccgtggatgtatatgatccttgggtaagtgttgaagaggctcagcatgagtatgggcttactcctatttccgcgcccgtcgagggcaactatgatgcggttgtcctagcggtagctcataacgagttcaaggagcttggtgcggataagatcagggcattcgggaaacttgaaagtgtaatatatgatttgaagtttatcttggataagtcagattctgacttgcgcttgtaa

SEQ ID NO: 343592 - DNA, 1050 bp, Pseudomonas aeruginosa
gtgacagaagaaacctttttccagcgcgtggccaaaaatgaagagttcgatctgatagggcttttacgaggcttgtgggctgaaaagtggctgatagcttgtataacgatattgactacatccttggtcgggacatatgcctttttaagtaagccggtttatgaggcacgtatagcggtactccctccatcatggagcagtattgcaggatttaatttggggcgagccgagaatggattaaccacattctccgttaatgatgtttattccgtttttttgcgaaatcttttagctgaagagactcggagaaatttttttcgcgaagtttatctgccttccttgagtgaaaacgagcgctctggttcgaaagatcgtctttattcgaatctttctgaagaaatggaaatacagagacctagtaaggatgagcgtgagcgctacaccgtgatctttgaaaagcacgatcccggtcaggcggctgactgggggcgtagatatataaagctggctgccgaaggctccatgaaggaaatgcaagacgccgtgcagcgagagtttgaggtaaaaagtcggaatattcagcaacagatagatattttgcgcgatgcggcgaaggcgcgtcgtgaagaccgcatcaatcgtttgaaagaagcttatcaaatagccgagtcgctgaagttggaaaatccccctttgattggcgggcagatggatcagcagctttcttctatcatggagggagcattgatgtatatgagaggtaccaaggccttgcgggcagaaatcagggctttggaagagcgaacgtcggacgatccattcattcctgctttgcgaaatttgcaagaaaagcaagctatgtattctactttgaaattggacgtaaataaggtcgcggtattcaggcaggatggagtagccgaagtgccggatgatccagttcgcccgaagaagggaatacttctagtgctgggtgcgctctctggactcgtttggggagtgatgattgctttcatcgttatggccgttagaaggtctcgcgcaaaatag

SEQ ID NO: 343593 - DNA, 444 bp, Pseudomonas aeruginosa
atgactgcggcaacttgcggatgggtcacaataagcatgcgggagctggatcgcctcaaggtcatcgaggcaatcatcgagggtcggttgaaacctgccgctgcggcgcagcgtctgcgcctgacgacacgtcaggtgcaccggctggttctgcgttatcgcgaggacggcccagccggcctaacatctcgtcgacgtggtcagccgagtaaccggcagctgtcgccaggtctggagaatcgcgccattagcttgattcgacggaactatagcgactttggtccaactctggcccaggaaaaactggtcgagtgccacggccttaagctggccaaagaaacggtacgacggatcatggttgatgccggcatgtgggtaccgcgcaagcaacggccgcccaaggcctatcagccacgcaaccggccgcctgttgcggcgaactga

SEQ ID NO: 343594 - DNA, 261 bp, Pseudomonas aeruginosa; identical to SEQ ID NO: 324728

SEQ ID NO: 343595 - DNA, 357 bp, Pseudomonas aeruginosa; identical to SEQ ID NO: 332093

SEQ ID NO: 343596 - DNA, 1434 bp, Pseudomonas aeruginosa
atgaggattaagaaatgtatatcagccctgaagatatcgctttttatggcgtgcttattgccatcgttattctttgctcagggcgctagggctgaatattattattggtacatgagttattttgataagaaagtttcgtcgccctcggcgggttgcgatctttatttcactggtatatctcgcgatccgggtcgggtttttgttatggagccttcgtcaaatccaagcgaggcgggcaaggttttctattgtgtggttcgttctggtgattgggttctttttaatacgactgttgttttgaaaggcgataggtgtcccgaagggcagtctctcgatttaaaagatggcttgtgtaagcctccgcctcccgagtgcgaatctggagtgccgaacttgttcaggagttctaactatccaattatcgtaattaatggaaaaaacacggttcctagttctccgccgtctggctgtttgaatgggtgcgcttatgaggctgatagttctcggccaacatcttgttatcgcactccaggctccacaactgaggggttctgcaactacacgctcaagagcaacggtcagaactgctctgcagattccggcaacctgggcggcaccggtccttcgctcagtgaaccgaatcagccgccagtgaccgacccgccttcggacccgaatgacccgggctgtccgaagggctacagctggtcaggcaccacgtgcgtgaagacgccggccgatcccacagacccgaccgacccgaaagaccctggtggtgatggcggtggaactggtggtggcgatggtggcgggactggtggcggtacaggcggtggcggtgatggcggaacgggcggcggcgatggcggcaccggcgggggagacggaaacggtggaactggcggcggtgatggcgatggcggcggcacgggtggcggtggtgatggcgggggagacgggcagtgcgatccggccaaggacccgaacaaatgcggcagtggctcctcgatctccggcgacggtgactgcaaggtggcgattcagtgcaacggcgacgcaatccagtgcgccattgttcgccaggaaaagctcgcacgctgcgcggatgaagagttccgtacggtcgatgacaagaagattcaggacctgaagaacacgctggccggtgagttctccgggcctgagtacgaacccatcaaggccaccggcgagaacacccatgacctgtcgaagctgctcgacactagcgggcgcttctccaaggcctgcccggttattcctgacgtctcgttcccctggttcggcagtactcagacggtgtcgctcagtagcgtgtcgtccgatctgtgcacgtatctccagtggttcgggtatctgcttgtcgcgttcgccatgcgcgccgcggctgaaatcattgcgcgagggttgaactga

SEQ ID NO: 343597 - DNA, 1104 bp, Pseudomonas aeruginosa
atgaaacggtttatccagggtgaacaccgaggtcaaagcaccttactccccgaaagcctcgacgattacgtcagcgataccaacccagtgcgcgtggtcgacgttttcgtcgacgaactcgacctagccacgctaggttttgatggcgtcattccagccgaaaccggaagaccggcttaccaccctgcgatcctgctgaagatctatatctatggctatctaaaccgcattcaatcgagccggcgtcttgagcgagaagctcagcgcaatgtcgaactcatgtggttaaccgggcgattgatgcccgacttcaagaccatcgccaacttccgaaaagacaacagcaaagccattcgcggcgtttgccgccagttcgttttgctctgccagcagttgggcctttttagcgaaaacctggttgccatcgacggcagtaaattcaaggcggtgaacaaccgagaccggaatttcaccagcgccaaactgaagcggcgcatggaagaaatcgagacgagcataagccgttatttggctgcgctcgatgtggctgatcgacagattcctagcgcctccgcgccagacactgccagcctggaagataaaatcgccaagctcaaagcgcagatgaaagagcttcagggggtcgaagctcagctcaacgaatcgccagacaaacaggtttcgctgaccgacccggatgcccgctcaatgatgacgcgcggcagcggtatcgtcggctacaacgtgcagacggctgtcgatacgcagcatcacctgatagttgctcacgaggtcaccaatagaggctccgaccgtgaccagctcagttcaatggcgaagcacgctcgtgaagccatcggcgcagaaacgttgtcggtagtcgccgaccgaggctacttcaaaagcgaagaaatcttggcctgccatgacgcaaacatcaccgcctatgtaccaaagccgatgacttcaagcgccaaggcagaaggacggttcaacaaagatgccttcgtttatgacgcgacgaaaaacgaatacacctgcccggctggagaggcactgatctggcgtttctccagcgttgaaaaaggcatgaattcctattag

SEQ ID NO: 343598 - DNA, 966 bp, Pseudomonas aeruginosa
ttgagcatcttcgcttcgtttcaggatttgccggttgcaagttcggctgtcaacttctcggctttaccgttaccgggatctcgtcgtgactttcttgctaaggcaagcgatggggggccagtatttctgttgcaggattcaagcccggcaagctattcgcctgctatcgaattaaaacatatatctgtgcagttccatagtacctgtagagtaactacagttagtggtgcgctaaacgaccagtttgcagtaatttcatgcgatgctactgctcctgagcttcatgaggtcttcatctgctgtttggctgctatcgtagagcaattgccgattgatgctggtacttctgatttacagcgttgcgtacagatgcttttagatctttttcggacatttggtcgaccaagcaatcgagaggtagctggcctgtgggctgagttatttgtgatcgcccagagtaaaaatccggcaaaggtcatacaagcttggcgctctagccaatttgagcgcttcgacttctcttggcgggctggatgccttgaagtgaaagccgcggtcagtgagcagcgccagcatgagtttgctcttgagcaactgcagccgcccttagagggggctggatatgttgcctcggtcctgcttcaagccttgactggtggagttggcatcatcgacttggccaataagattgaggcttgtattgtcggcgaaccagcattgcggcagaaattgtggggaaatattgccgctgcgcttgggagcgacttctcggagcggttagaccgaagatttgatctgtcctatgctgagcgcggtctcgctttatatacgatggatgacgttcctaaacccatgcatccaagcgacttgcgtatcacagcgatacgatttcgtgcggatctttctactgtccgttcgtcccttactcgcaactcaaaggaggagcttaacacgctcttcatatag

SEQ ID NO: 343599 - DNA, 2271 bp, Pseudomonas aeruginosa
atgacagcctcaatcaaagtacttaaaactatcaggccaccgcttcgttgggttcctgtgcaaggagagttcacacgttggttcctcgagggtaagtctcaggatcccaatggcccaagttatgaggatcttacagagggtgcggggtcggtgctgcaggaggcgcagcgtatcctcgggcgctgcctgcctccgcatgaggtgggtactcctgagactggcttggtagttggatatgtgcagagcggaaagacgctgtcctttgagactgtcatcgcactggcgcgcgacaacggctacggggctgtcatcgtccttgctggtacgaagaacaatcttctcgaccagtctgaggagagactaaaaaaggactttggtatcgatgagggtggcgagcattggtatcttttacaaaatccaacctctgttcataaaacgcagattgaaaccagggtcaatgcctggcggaaaagaccaaccaagaagtctctcctcattacggtgctcaagcatggggggtggcttgagaaactcgctacgatcctgaagaaggttaatttagatggagtgcctacccttatcatcgatgatgagagtgatcaggcgagtttgaataccaaggctgcacggatcaaggcaggtttggcagcagttactgatgtcagtaccacctacaaatctattttgaaactgagggatgtattaccacatcactcgtacttgcaatatactgctacaccgcaggcaatgttgcttttggcgcagacggactttcttaatcctaattttgccgaattggtaactccgggagatgcatatacaggtggtatcgccttcttccaaggcaacccagggcttattgtggatattcctgcggcgcaggtgcctacgccgtcgcgtgccttgaccagtccaccaaaaactctgcttgaggcatttcgatcatttttgctagtagctgcacatcactcattgactcgccagagagggccgaagccaaaagatcgaaatcggtcgatgatggttcatcctgctgtcgcgactacctcacacaaacagtacaaggcatggctcgataaggggtttaaaactctcaaggcgatggtcgaaaagctgcatgctagcaataatctgtctgcagcggaggctctcttcaaagcagagtatgactcgctggttgcgacctttccaggcattaggccactatctgaactgatagaggaacttgttgaagaggtattcgttgaactcaatatagttgagattaatggcacaaaggatgctgaagagaaagtcaactggaagtcatcaccttactgggtgcttgttggtggtgcgaaacttgaccgaggctatacggttgaggggttgtgtacaacctacatgccgcgacctttgggaacctcagctgcggcggatacattacaacagagagcccgtttctttggttacaaatcgtcttatttagggctttgtcgtatttacgtccaggctagcgttaaagcggctttcactgagtatattgagcacgaggagttcgtgcgtggagccctagcaggcaaccgaggcaaaccgctttctcactggcgccgtgactttgttctcacggagttgctgaagcccactcgagctaatgtcgttggtctaggcacgcgtcgaattccagtcaatggctggctcgtaccaaaggctatgcaaaatgatgatagcgcagctgcagaaaaccgaaatctcctgagtaacttgatagccaagtggactaagacttatggcgcgcccgtcaatgcagccacagtgttagcaggggtgacaagttctccacacgacgtgattgaagctgtccccctgaaggcggtgctttcagattttcttttggaagtgcgggtgcgcgatgctcgtgattccgaagagcattgtgccatgctaattgcgctagccttgatgctcgcaactgacgacactctcaaagttgacgtctttttgatgaaccgactccagactggtgttggctatcgcgctcgcgttgctggtcgcggcctgccagcaagtcatcggtatgccccaatcaatcaatattttagccaaagtgctgggacggtgaatgatcgtcttcactgttttaaagaccgtatcagcctacagttacgcaggtttgatctgggtacagatcagcgaggacaggctaccgctgatgtgagggacgtgacatggttcgctgtaaatgtcccgcctgcattgcgaaaagctcttcttgttgaggagcggagttga

SEQ ID NO: 343600 - DNA, 1632 bp, Pseudomonas aeruginosa
atgggggcaggggctacgcaggatcctcaatccactgggccaattgagattcggcccgaagtcactatgctttcggtgctgcggcatctaaattataaggcttggtttgctattgctgagttcatcgataactctttgcagagttatctcgccaatcgtgaggcgttagagactttgcacggggcggatttccgccttgaagtggatgttcgtattgatacggcagtctcaggtctcatcgttattactgataatgctgctggtatctccactgtcgattttccgcgagccttccgggccgcacaggtgcctacagatcgtacgggcttgtctgagttcggtatgggtatgaaaagtgctgcctgttggtttgctgagaagtggagtgtccgaaccaaggccattggtgagcagttcgagcgaacaattcactttgatatcaatcgtatcgttgataacaagattgaaagtttaaataccgaaagtagaaatgtcggtaatccaacggcacactatacggttgtcaccctgaaggacttgcatcacatgcctcaggggcgcacaatcggaaaaattaaaaatcatttggcgagcatctatcggatgtttcttcgggatggccgaatgatactgcggtttaatgatgaaccactaagtcatgagacggctcccatcctaaaagcagtgaggtacactgctcctggcaagccggaacaggatgccggatctaggccggtcgaatggcgcaaggagatctgcctggactttggtaaggggcagcgcgtgactggttttgctgcgttgcgtgaggtcggttctaccccatttgctggtttcgcactgttccggcgtgatcgtcttatcgagggtagttatgacgagacttaccgacccagtctcatcttcaagcagaccaatagctacccgtaccaacggttgtttggcgaactacacgttgaaggctttgaggttagccacacgaaagatggtttccgatgggaggagtacgaagatgtcttccttgctattctaaaagagtgtttagaggcggcaccgttagatctattggctcaggcggagaactatcgcgcgttaccttctaagaaaagcatcgaatcacgagccactgcagctaccgccgcggtcgctgagtatattaagaaagatgtgaccccatggctcgtggaggccgatagcaaccctgcggttgctccgcctctacctcagacactgacacccagtgttttgcaggcatctgaaagaactgtatgcgttaatgatggaagttgggactgggtcatcaccatacgtacctctgttgatcccgcgcgagaagactgggtgtcgttggccaagcaagatccaattcctggcgatctcgatgatacccgtcgcttggttgttgagttagcactggcgcatccgttctccagcgagtttctcggggctaacaacgagaatatcgaattatttctgcgagttactacagcagtttgtatctcgttagttcttgcagaggatcatacggcggaggcccctgaggccgtgctgtatcatttcaaccatctgatgcgtggcgctttaagtcatgcggtattagaaagagatgacagcctcaatcaaagtacttaa

SEQ ID NO: 343601 - DNA, 1359 bp, Pseudomonas aeruginosa
atgacgcagatgcatgcattcaaatttgttgatctctttgccggattgggtggttttcatctggcgttagctcgtatgggggggcagtgtgtgtttgctgctgagtggaaggagcatttgcgggatctttatgagacgaaccacggtttgaaacctgctggcgacattactcttgtccagccgaaggatgttcccgaccatgatgtcttaactgctgggttcccttgccagcccttttcaaaggcaggagaacagcttggctttgagtgtaccgagcagggcaatttgttcttcaatgttgctgcgattctgaaagagaagaagccgacctattttatcctcgaaaatgtaccgaacctgttaaaacacgatggggggcgcacttgggaggaaattcagaagatcttgggggctggtgaagaggggctaggttacaatatacgagctgagcgtctttctccacaccactttgggattccgcagattcgtgagcgtgtgtacatcgtagggtcgctgttgtcgctcgatgattttgtgtggcctgagaaaagtaatgctgagaccaatatcagtacagtgctagatgataacccgtctggagccaagcagttgtcgcctcaagtggcagagtgtttggaggtttggaatgagttcttaagttcctgtccggagggggttgatttaccctcatttcctttgtggtcgatggagtggggggctacttatccatacgagaaaactaccccgcatgctctgaaagtacgttttggcaaggatggcttgaaagggtttaagggtagtcatggcatacaggtgggatatcttaagtctcttgaggagcgctggagcgcattacctagccatgctcgcactactgatatgaacttcccgaagtggaagcagaatttcattcggcagaatcgtcaattttacgagaataataaggcgtggattgctccctggttgcccaagattttgaagtttccctctagcctacagaagcttgagtggaatattaaaggaggggagcgcaacatctggaactatgtcatccagttccgagcttctggtgtgagagtgaaacgccgtacaacggctccgagtctgattgcgatgacggatacgcaggttcctatcatcggttgggaaaagcggtatatgacgccaagtgagtgtgcacggttgcagagtcttgatggtctcaaggagcttccaaagatcccggttcgcgcgtttgcagcgttgggcaatgctgtaaactcaaatgtcgtggaaatggttgctcgtgcgctcttagccgttcagcggatgcctaaggtcagcgataatcaacgtcattctgatgtggaagcggtctga

SEQ ID NO: 343602 - DNA, 2664 bp, Pseudomonas aeruginosa
atgagttccagcgatgccttggaaattgccaaagacgcactagattcgttccatcaaatcgaacaaattgcttccaagcaactcgcaactggaagtcgtgaagcatcggaagccttggcggtcgtcaataccttcactggctcggcggctgtcgagcagatcgcatccatctctgacgaggtcaccaaatcacttgtaagcctcgtgcgagaaccagcagtttcacggatagtggtcgagaacgacaaaggtcaagttgagacctactacatttgccgcacgactggagggtttgtccttaatcacggcaagctagcggggtaccgttctccgttcggtcgcttggctgctcacgacgctggtgaggacgttgatctagagatcgcgggtaaaaaagtcagcttccgtgtcttggacaagctcgaactgaaacctcagaaaagcgctgaactctgggactccatcgacagcatctggcggcaggaaagcttagccccacaaacgatctcttctcttcgaaaggttatccagcctgatgacagcaacgcgttcttcgcaatgctcggcggcaagtccgaaaccgagaaaatccgcgaaggtgtgcgtcacgaaatccgaaaggctatggcgcttcgagaccaggcgatcctcgacaaatttcaggacgaaattttccgtctttcaatagaccaccaactaatcatccttggcccacccgggacaggcaagacaaccaccttgatcaagcgtcttggccaaaagttggactgggaggcgcttagccaggacgaacgtctcctgctcggccctcaatctaaacgctcacggtggatgatgttcaccccttcagacctcttaaaacactacgtcaaagaggccttcagccgtgaaaatgtgctggcttccgacgagcatattaagacctggagcaaacgccgacatgagctcgcaagggcgacatttggcatcctcaaaacgggcaatggtggcacatgcattcttaaggaggatcgccaattcgtcccgatggacatcaacgatgatccgcgccagtggttcgccgatatcaagtcagtgcaccaaggccggcttcttgcctcgctgaaagaaggcgcgaacctactcaaggattcggctccgaacctgcaagacccagtcgtgcacaagctgctcaccacggtcgaggaactgaggccagaaggactgctgagtgcctacgcagactggaacaatctcgaggctcggatcgatcctctcctcaaggccagccgctcaaccacggataagctgatccagcagcaaggcaaccttctttacaaccgaaacaatacagtcttcgcagagatggccaccttccttgatagtctcggtcaaactgatgacgaggacgaagacggtgccgaatttgatgatgatagtgcggaggaaggtacagctaccccgtcgcacactgcagagcttaaagcgtttcaggcctaccagcagttccttcagagctacgcgcgcactcgctatcgcaacagcaatctaggtaagacaagccgggcagctcaaattcgggattggctggatgatcgggttccctcagatgaatggctcaaaacgcttgggcgagagatgtgcttccagaacgcgctgcggcgctttaggaatgcatggaaacgttacgtacttgatgtccctgcaagctacagagcatttcgccgcgacagcttgacgctttctcggtataactatcaacggccagagcacgcctcccacatcgatgagacagagctcgacgcaattcttctgctcatgcttcgatctgctcgcgagctcattcgccaggatttcgtgaagcggcatatcaacgaacctcgtttcaccgagttggccaggatctcgagtcagttcctgcagcaagtcttagtcgacgaagccacggatttctcgctcctccagcttgcatgtatggagagtttgactgaccctgccattgagtcgttcttcgcctgcggagacttcaatcaacgaatcacagggaatggtctcaagcacttagatcaactcgagtggatttcccctcgcctcacgcctcagcgaatcaacacggtgtatcggcagagtcgccttctgaacagctttgccgtcaggctactcgagcatatggatggagacatcgaagcggtaggcagcctgccggggcacttctctcacgaaggtgttcagccggttctaggggaaaatctccaggatgaagacgttgtcacctgggttgctgagaggatcttcgagatcgaagatcagatccgctcccaaaatgaacctgtgcctacgattgccatcctcgtcgcttccgaggcgcacgtgaaacccgtcgccgaagcgcttaccaaaaaactggagagcaggagcctactcgctgctccctgtgttgatggccagtcattgggtaaccaatccgatattcgggtgttcgatgtccagcacatcaaagggctcgagttcgaagcagtgttcttcatcgggctggatgaactcgttgaagcgaaacctacgctgttcgaacggttcctgtatgtgggggcaacccgggcagcgacttacctcggcatggtctgtcatcagaaactcccacacagcctggaaaatcttaggccatacttggctagaagatggtga

SEQ ID NO: 343603 - DNA, 252 bp, Pseudomonas aeruginosa
atgaaagtgcaggacaaggaaaccggcgagatcagcttccgcgagccgttactgggcaaggacgagggcaaccgggcggataccgcctctcagttgaagccggtacacgagggcggcgtaatcaccggcggtaatgccagccagttgtcggatggcgtctcggccttcgtgctgaccaaggctcgccttgccgagcagcgcggccttgaactatgcagcgatcacggatccagcccaccgtcaatacattga

SEQ ID NO: 343604 - DNA, 567 bp, Pseudomonas aeruginosa
atgcatttcgattccgttaccggctgggtccgtggcgtccgccactgcccttcaccgaatttcaacctgcgtccgcaaggggacgcggtgtcgctgctggtcatccacaatatcagcctgccgccgggacagttcggcaccggcaaggtccaggcgttcttccagaatcgcctggacccgaacgaacatccctatttcgaggagatccgccacctgacggtttccgcgcatttcctcatcgaacgcgacggcgccatcacccagttcgtctcctgccacgaccgcgcctggcatgccggggtttcctgcttcgacggtcgcgaggcgtgcaacgacttctcccttggcatcgaactggaggggaccgacacggaaccgtacacggacgcgcagtacactgccctggccgggctgacgcggctgttgcgcgcggccttcccggcgatcaccccggaacgcatccagggccactgcgatatcgccccggagcgcaagaccgatcccggcgaggctttcgactggtcgcgctaccgcgccggattgaccgattccaaggaggaaacatga

SEQ ID NO: 343605 - DNA, 225 bp, Pseudomonas aeruginosa
atggcaaggcgctacgaactccccgatgccgcttgggagttgatcaaggatttggtttccccggagcagaagatgggacgcccgcgcagtgataatcggctggtactcaacggcatcttctggattctgtgctctggagccgcttggcgcgacctgccggaacgcttctgcctgtggtcgacggtgtatcagcgattccgtgactggcgcgacgacggtacctga

SEQ ID NO: 343606 - DNA, 1326 bp, Pseudomonas aeruginosa
atgagcaacacaagcggcggagtgaagggcaaggacatccagattgccaaggaggtagctgtctcgcaggacttcgaaacgccagaaaccattttcaggcggagctcggtcaggctcgccaacatccgcaaggccggtgagtccaagcgtaccgccaacgacagccaactggtttggtttgacagtgctcagttggccagcaatcgccccgacgatggcatcttcgtccgtgttatcaactcactctacactggtatcgtcctctacatggataacctcgccgaactgctccccgccgtgccggcacgcatgcacgtggtgctgcgcctacgcaacgccgcagagctcaaggccttccgtgagggcccgaaattcgaagccttcaagaagggcgccaccgcccgcaaccgctccgtcgccctgaatgacgccgaggccctggctgaattgggccaggacggcttgctcacctgcttcaccagctacgtggacgaccgcgacagcttgctcggcgccatcgaccaggggctgcgcttcaactacctgtggatcctcttccgcgaccccaccaacattcccctggagctggtgatcgcctcgctgcagcccacctccaccgtgctcatgaaggagatcaaggcgtcctccgacgtcgacgacgccatcgtttcctacggggtgatggaatacggcgccgaaggggtgatcttctccccccgcgaccacggcgtgatgagcgaattcctcgcccgcatgtcccaggcgcagagctacgccaacctcaacatccaggtcggtaccgtcatcgatagccgccccgtcggcatgggctatcgcgcctgcatcgacgccgccaccctgttcgagcccgacgaaggcatgctggtcggcagcacctcccagggcggcgtgctctgctgccccgaggtctacttcctgccctacatggagctacggcccttccgcgtcaacgccggtgccgtgcactcctacgtgttcaacaccgacaaccgcaccgattacatgagcgagctcaaggccggctcgccgatcatgatcgtcaactccaagggtcgggtccgtcgtgccgccgtcggccgcatgaagatcgagcagcgcccgctgcgcctgatcgaagtggagttctccggcaaggagcgggtcaacgtcctcatgcaggacgactggcatgtgcgcatcttctccgacgccgccaagcccctgaacatttccgagctcaagcccggcgacaaggtcctcggctacgtcaccgagcccgggcgccacgtcggcatcaagatcaacgaatcgatcatcgagaaatag

SEQ ID NO: 343607 - DNA, 798 bp, Pseudomonas aeruginosa
atgagctacatcagcagagttctccgagaacggcggctgctgttcccggcctcgcgccgcggcctgatcgtccccatcgaccacggcctgaccctcggaccgattgccggcatgacccagaccgccgacttcgagaagtggatcggcagcgaccacatcagcgccatcattgcccacaagggcctgatcgagcggctcatcctgcgggacatgctgcacccggccaccggcatcattcttcacctcaacggcatggccagcatcgcccccgagcccgacaccaagatccccgtcgccagcgtcgacgcagcgctggagctgggagcggacgcggtgtccctgcaggtcaacttcaccgaggacaacttccagcacaacgtcgcccagctcggcgccatgaccgacgccgcccacgccgccggcctgcccatcctcaccatgctctacgacaaggtgcgcgggctcaccgcccaggagcgtcagcggcgcctcagccacctggtgcgggtggtcgctgaactcggctccgacgccgtcaagctggccctgccggaaaccagcgtcgaatgcaccgaactggtggagacccactgccgcgacatccgcatcttcttcgccggcggcgagcgcaccgaggacgaacggctgctggccatgacccacgccatgctcgccagtggcgccgccgggctctgcgtcgggcgcaacgtcttccagcacccccgtcccctcgacctgctgcgccgcctggcggactgcatccggggcgaaacggaatacctcagccgcgccgtgtga

SEQ ID NO: 343608 - DNA, 2448 bp, Pseudomonas aeruginosa
atggaacacctcgacatgcgcgccgacggccgcaacgactacgtgctgtcccccctctggacggacctcttccccgagggtctgctcggccagctcagggccaaccccttcctcgtggcctgccgcaacggcgtggtcagcctcgatcagctgcgccacttcctcatccagcaccactactactcccagtacttcacccgctacctgtgcgccctcatgggcagcctggccgaccagggcgagttcaaggccctgtcccacaacctcaccgaagagctctccggtggcgacagcgtcgacatctcccacgccgagctgtaccgccgctccatggacctgatggccgccgccccgcgcagcctcccgctgctggacggcacccgccagctcatcgatgccatgttccgccactgccgcagcagcgatccgctggacggcctggccgcgctctgcctcggcgccgaagccatcgtcccgctgatctacggtccggtgctcgacgccctgcgcagccacaacgccccggccgaggccgagcacttcttcgtcctgcacatcgaagaggacgagcagcacgccatcgtcatgcgcgacatcatcgaccgcatgctcggcgagcggccctacctgcgcagccgcgtcatcgccatcggcgaagagatgatccacctgcgcatgaacatgctcgccgaactggtcgggcagggcggcggcaccggccaggcggcccagggcaccctcaccagccccgacgccctccaggccctgcgcgccgacgccagcctcggcagcgccaacttcctcgaccgctgcctggccctgagcaccaccggcgaccagccgttcctgttcctcgaccggccgctgcaactcctgcagggtgctccggtcagcgccctcggcctcaacgacctgcagcgccaccgcatggccctggccgactggtacctgcaacagggcgtcaagcccggcgacgtggtggccgtcagcgttgaggacgggctcatgcccatgctccactacctcgccctcaccagcctcggcgctgccatctccctgatgaacccggccatgcccgccgagttcggcctcgcctacatggccgagaacggcttcgagcgcctggtcaccgacagcgccaccctggccaccagcgccttcgtccgccaatggcgcaaccaggcgccccaggccgtgctcgacgtcagcctgtcgcgcctcgacccggacccgcagctgcccgcctggtggccgctggagcccgaggactcgaccttagtcatgctcagccacacctccggcaccaccggcctacccaaggccgtgcgcttcgagcaccggcagtttttcatgggcaagcgcgcccgcatcggccgcttcgccgaaggccccgacgagcgcctgctgaccgccctgccgcagtcccactcggcggccatcagccacctggagacggccatcctccacggcatccccacctacgtgctgggcacccaggacggccaggccctgcgcgaagccatccgctacttccagcccaccaccgtggtcgccttcccgcgcagctacgtcctgctggtggacggcggcatccaccccggcgaattccccggcgtgcgccgctggttcgccatgggcgacgcctcccaccagagccacgtgcgcgccatcctcgacggcgccccgcagtcgcgcttcatcgacgccttcggcagctccgagctgggcatggccctgttccgcagcgaatccacccgcgaatccctggccgaccagcgctccatcggccgcccggtggacatcgccgtggccaaggtcctcgccccccgcagcggcgaagaggtgaaacctggcgaagtcggcctgctggccgtgcgctcgcccaccgtcacctccggctactggaagcagccgcagaagaccgtcgaagcctggcgcggcggctacttcctcaccggagacgtcgcctactgtcgcgacggcgagttcttccagatcgaccgcgccgtggacgtcatcgaagccactggcggtgccctctacaccctgcagctggaagaggccgcgcagcaggtggatggcgtctgcgacgtcaccgtggtcggcgtcaaccccgctcacgccgagggcacccgcgtgctcgccatcgtcctgcccgaacggcaggcgctggaccaggccgccaccctggccgcccgcgtcctgtccgccctgcaccaggcggccgcgcgccggggcgtgaccctggcgaacggcgaactggccgtggccgtggccagcgacctcgcgttcctccccgtcggcgccaccggcaaggtcctcaagcgccgcctgcgtggtctggccgagaccctgctggccggccagcacgagcaggccctgctgcacctgcagcgccaggctggggaatccgaacgcccgctggcttccaccggaaccgagcgctga

SEQ ID NO: 343609 - DNA, 714 bp, Pseudomonas aeruginosa
atgacccaggccaccttccaacccgacgccctcgcctcggtgcgccagcggctcgccgacgcccaggccgaccagcaggacgaatacgaatgcatggggcgccgcttcgtcgtccgggacggcgtattcccgcccacccacttccagtccaccggcatcttcacccgccacctgccctatccccagggcgggcgcttcctagagatcggctgcggggccggcgtcaccgccgtcaccgccgccctcgaaggctgcgccgtggtggtggccagcgacatcagcgccgatgccgtcgccaacacccgcgccaacgccaaccggcacggcgtcgccgcgcgggtgtctatccgccagggcgacctgttcgacgtgctggaggaagacgagcgcttcgacgtcatcttctggaactccaacttcgtcttcgtcgaagccgaccatgtgttcgacgccgccatcatgctggccttctgcgacccggggtacgccgcgcaccggcgcttcctcgacgaagccccgcgccacctcgccctcggcggcatgctgctgatgggcttcagcagccagggcgacggccaggccctgaaggccctgctgcgcgagcacggctacgcctcacgggtgatcgcctcggtcagcggccagggcgacggcgcgccgcgctacgacatcctccagctcctgccgggtgcccaagcaccggccggggcctga

SEQ ID NO: 343610 - DNA, 1731 bp, Pseudomonas aeruginosa
atgcacgacacccacgccctcaaggccccggtggccatcgtcggtggcggcccggtggggatgatgctcgccctgttcctggaccgtcacggcgtgccggtggtgctgttcaacagcgagcgcaccacccgctggcaccccaagggcaacacccacaacgcccgcaccatggagcactaccggcggctcgggttgtccgacggcatccgccggctcggcctgcccgctgaccacccccgggacgtcgcctacttcacccgcgtcaacggctgggagctggcgcgcctggacatgccatccgagcgcgagcgcctgcaggcggcccgccaggcgcccgacaccgaccaggtgcccgagcccttgctgcgggccaaccagatgtacgtcgagcgcttcctgctagaacatctgcgcacccgccccagcatccagctgcgtttcggctggcgggtcgacgacttccagcaggacgccgacggcgtcagcctgcacgccgtcgacagcgctgggcaggccgccgacgagcactggcgcgccgactacatggtgggctgcgacggcggccacagcttcgtccgccgtcgcctgggcatcggctacatcggcccggacggcagcaccggcggcttcctcagcgggcgcatgttctccagccacatgcgcatccccgacttgcaccggcgcctgctgccggaccgcaaggcctggatgtacaacgtcgtcgccccggaggggcgcctgctgctgatcagcctggacggcgccgatgagttcctgctcatgacccaggcccgcagccacgacgagatgccccaggacgacgcggtgatccgcgccatccagcggggcatcggcgagcccgtcgaggtcagcgtgttggcccatgccgtctggcacggcggcctggccctggtggccgagcgcttcgccgaccgccgggtgctgctggccggcgacgccacccacctgttctcgcccaccggcggcttcggcatgaacaccggcatcgacggcgccgccaacctcgcgtggaagctcgcagccgtcgtgcagggctgggccggcgacgggctcctggccacctacgagctggagcgccgcccggtcaccctgcgcaacacccacgccgcccggcgcctcacccagcgcgtcggccaggtggacgtgcccgccgaggtcgaggacccggggcccgccggccagcaggcgcgggcgcgcctgggagaggcgctgcagcagttccgcgggcagttcgcctccctcggcgtcgagctgggcgcccgctacgacggctcgccgatcctctggccggacgacggcacgccccccgaggacgacccgctgctctaccgccccagcaccttgccgggcgggcgcctgccacacctgtggatcgccgacggcagcaccggccggtgctcggtgttcgaccgactgggcgtcggcttcaccctcttgcgcaatggcccgcaggcccccgaggccacgcgcctggtggaagcggcgcgggcccgtggcattcccctggaggtggtcgacctgccgtccactgccttcaccttctacgcagtgcaactgctgctggtccgacccgaccagcacatcggctggcgcggcgacgtcctgccggaggatgccggcgcgttgctggatcgcctcgtcgggcagggcgtggcgggcatccaatcccccggcccagtgctgggctgcgtattcagtgcagtgggctga

SEQ ID NO: 343611 - DNA, 729 bp, Pseudomonas aeruginosa
atgagtgcattggcaagtgaacgaatccgggatccggctcttgaggcgagcggactggaatccgagtacgcggacgacgcccaggagaacgcggcggccttcgccctgatcgaggacgaccccaacccgcaggtggtcaacggcgagcccgaaggggcctccatccgcttcgtgaagaccggcgagaccacccgtggccgctacctcatggccaaggtggagatccccccgggctccggcccgccgctgcatgtgcacacccgcaccgacgagtggttctacgcccccgacggcggcgtggtgatgttcatgggcacccgcacctacaccgacctggacaacccgccggacgtagccgggcgcgacaccatccgcatgattccgatgaagaagggcgccatggtgttcggccggcgcaaccacatccacggcttcgtcaacatcaccgacaagaccgtgatgatgtggctggtgtggacccccgacacccccgaggtgaccctcaaggactacttcgaatccatcgcccggccgatcctccccggcgtgcgtggtgcccgcaacaaccccatcgtccagctcaaggccgtcagcgaagcacgcgactacggaatgatgttcagcaccgatttctggcagtacgccgagacggtggaggagggcgagccgcccttcggcaagaacctggacggactgatccggctcttcgagtccggcaaacgggactga

SEQ ID NO: 343612 - DNA, 765 bp, Pseudomonas aeruginosa
atgaaaactctggcgaacaagaccgtgatcgtcactggtgccagctccggcattggctatgaaaccgccaagctcttcgcagcccaaggcgccaaggtggtggtcgtggcccgccgtgccgattgcctggaccgcttactgggcgaaatccacgccctgggtggcaaggccctgaccctggtgggcgacgtcaaggaagaagcctgcgcccgtgaggccgtggccctggccgtgggccagttcggtggcctggacatcgccttcaacaacgccggcagcatgggcgccctgggcagcgtgactgacatcagcctggagggctggcacgacacccttgacaccaacctcaccagcgccttcctcagcgcccgccaccagatccccgaactgctcaagcgtcccggcagctcgctgatcttcacctcctccttcgtcggccacagcgtcggcttccccggcatggccgcctatgccgccagcaaggccggcctggtgggcctgacccgcaccctggctgccgaatacggcgcccaggggctgcgggtcaacgtgctactgcccggcggcaccgacaccgagatgggtcgcgccgccgcctccacggcggagcagaaggccttcgtcgagagcatccacgccctcaagcgcatggcccgcccggaggagatcgcccaatcggcgctgtacctcgcttccgatgcctccagcttcgtcaccggcaccacgctgttcgtggaaggcggcgtgaccatcacccgcacctga

SEQ ID NO: 343613 - DNA, 1713 bp, Pseudomonas aeruginosa
atgaatacgcacaacgacatgcccggcgttgcgggcgagggtgaagcgacggccggtttcggcgcctccgggcggcgggacttcctcacccgcctgctggccctgggggccggtgccgccggcatggggctgctgcccgccgccgccctggccgccgctgactcaggccgccccagccaccgccgggactacgactacatcatcgtcggcgccgggtccgccggttgcctgctggccgaccggctctccgccaccggcgcctcggtgctgctgctggaggccggcagccaccgcatcgaccaacccaaggtgcgcgaagtcgcgctgtggcagcagaacctcggcagcgacaccgactgggcccgcaccagcaccccgcagccgcagctggaccagcgtgcccagagtctggcggccgggcgcgttgtcggcggctccggcagcatcaacgcgatgatctggttgcgcggcgacccccgcgacctgcagcgctggcagcagttggtcggcgccccctggacggtggaggcgctgcaacgggcctacctggacatggcgcagcccgtaggcagccccgccggccagggcgcaccgcgcatccgcctcgggcgcttcgccggggagcacccgctgaccgccgcctacctggcggccagcagcgccaccgggctcagcgtgcagaccctcaacgacgggctgccgctggaaggcgccggcatcaccgaggtcaacgccaccgccgacggctaccgggtgggtccggcccaggcgttcctgctaccggcgctggcccggtccaacctcagcgtgctgagcgaggcgctgatcaccaacctgatcctccggggctcgcgctgcgagggcgtgcgggtgctggtggagaaccgcctggtgtcgatccgcgcgcgccgcgaaacgatcctctgcgccggcacctgcgagtcgcccaagctgctcatgctctccggcatcggcccacagcaggccctgcgcgagcagggcatcccggtgcgactgcacctgccggccgtggggcagaacctgcaggaccacctgttgcttagcctgcagtaccgctcgcgcctggctattccgccgcaggtctccaacggcgtggcgaccatgagctactaccaccacggcagtggccagcaggcgccggacatccaggtggccggcatgcagtaccccttcggtccggtatccctgtccaacggtagttcttacaccgtcatcccttttctagccaagccacgcagccgaggacgcgtgcgcctagctagcactgatccgcgccagtctattctgatcgaccccaactacttaggtgaggctatcgaccgcgacatcatgttggcggccctggaccggggcttggttatcggctccggggtcactgactacttcggcgggctctacccaagcgacccgctggacaccccggcacagaagctcgccttcatcgcccgcaacgccgggcccggcctgcactacaccggcacctgcagcgccgggcgtgacccgcgcagcagcgtggtggacgggcgcttccgggtctggggcgtgtccggcctgcgggtggtggacgcctcggtcatccccgagatgccggcggtgaacatccacgcctcggtgctcaccgtggcgcagttggccgcgcgggtgctggtggccgagcagcgccttggccagcgcctcgctgaaaccgcctga

SEQ ID NO: 343614 - DNA, 747 bp, Pseudomonas aeruginosa
atgcagcattccctgctttccaagaacgccctggtcaccggggcctcccgtggcatcggcaaggccaccgccctggccctgggagccgccggcgcccatgtgctggtgcactgcaaccggggcgtggacgaggcccgcgccgtggctgccgagatccgcgaccggggcggccgcgccgacgtgctggtggcggacctggccagcgtcgacggggcgcgcatcctcgccgccgaggtgggtgagcgggcgcgccggctcgacgtgctggtggcctgcgccggcatcgcccagacggcccgtctggaggacacccgcgtggaggacttcgaccggatgttcgcggtcaacgtgcgggcaccgttcttcctcgtgcagcaactgctgccgctgatgggggaaggcagcagcgtggtgatggtgtcgtccctcggggcgcgctcggcggtgggcgagatcccggcctacgccgccaccaagggcgccctggacacgctggtgctgcacttcgcccaggccctcggcgggcgcggcattcgcgtcaacggcctggccccgggggtggtggacaccgagatgtccagcttcgtgcgcagcgacgaggggcgggacttcgtgctcggcatccaggccctgaagcgcgtcgcacagcccgaggacattgccgatgtcgcgctgttcctggcctccgatgcgtcgcgctggatcaccggcgacatcctcagcgtcgacggtggcaccaagctctga

SEQ ID NO: 343615 - DNA, 1200 bp, Pseudomonas aeruginosa
atgaacatgaaggccgaagtgcccgccgccggcctcgccgccgagggcggtccgtcgaggaacctcgaactcgaccgcctacgagccatcgccgtgctgctgaccttctacgtccacctgtaccaggtgttctacccctggaccttcaccatgcattaccccaggcccgagtcggtggcggacctgttcggcaatgcctggggcggggtcgacctgttcttcgtcatctccggctacatcatctcgcgcaccctgctggagcaactggacgggctgcgcagcggcctgcagcgggcggcctgcatcaaggcgttctacgtgcgccgggtgttccgcatcctgccggtggcctgggtggtgctggcgctggtgatggcctgcagcctgtttctcaaccagggccagtacttcgccccgccggtgtacaacgcccaggctgcgctgggcatcttcacctacacgttcaacttctggctgccggacaacaagatcgccggcggggtgccgctggcgccgtactggagcctgtcggtggaggagcagttctacccgctgttcctgatcctgctgaaaagcacccgcgcgcgggtgctggcgctggtggggacactgctgctggtgagcctggtgctgcggcccttcagcctgtccgatccgatgaaggtgttcttcttcacccagacccgttgcgacgggctgatctacggctgcctgctgtacctggtcagcacccagccctggtttaccgccctgcgcgtgcgggccggctgccatcgctacgccggtgcgctgctggccagcgtcaccgccatcggcttcggcaacgtgctggcagtgccggtagtctgcgcactgtccctgacgctggtgttcatggcagcgtgcgagggcggcctgctggtgttcccgcagccgctgcaggcgctgctggactacctgggcaagcgctcctacaccctgtacctggtgcacatcccgatgttcttcctgactctggagctgatgcaccgctacatccgcagcgaaggcattgccatcaccgacgcgctctggccgcagtacacggcgctgatgttggtgctggtgttcggcgccaccgagctgatccatcgtactgtggagcgaccgatgatcgccctgggcaagcgcaccgccgaagccgccacgccccaggccctggcacccaccccgacgccctga

SEQ ID NO: 343616 - DNA, 291 bp, Pseudomonas aeruginosa
atgacggctgaaacgggcgcccccaagacctggcgcctgatcggcgccgacggccgcccctgcctcagcccggtgcccggcaccctcggcgggcaccgtcgcaaccgcctctacggccgcctggattgccgcagcgccctgcaggccctggcccgtggcggctacgtggcacagcgggtgttcttcctcgacgaagccaccgccttgagcgccggctaccggccctgcgccatgtgcatgcccgagcgttaccgggcgtggaaagccggcgaactgtcacctcccccgtag

SEQ ID NO: 343617 - DNA, 657 bp, Pseudomonas aeruginosa
atgcccgaaacagcctgcgctctgaacttgcccgaggactgggccgccatcgcccaggccctcgacgaacacggccacgcggctctgcctggcctgctcgaccccgaggccgcgcggcggttgggggaacgcctggcccagggcccgcgggagcgcctggaaactctcggcctgggtcagggcgaaggcgtgcgcgccggcctgccccacggccaatgggacagcttccacgccccgctcgccgccatcgccaaccgctggtgccgggcgttcggccagcccgaacagcatgccgcccacggccaggtgcactgcgcccacctgacccgcctcggccctgatgacttcatgaccctgcacccgggcgaagacgacccggcgctgctgccggtgcggctgctggtcttgctctccgacccgcaggacttcagcggcggcgacctggtgctcaccgagcagcggccgcgcatgcagtcgcggccctgggtggtgcccctggcccgtggcgacggcgtgctgctgtgcaaccagcgccgccccgtgcgcaacaaccaggggcagctctacggcgcccagctgcgccacggcatcggccgggtgcgcagcggcgtgcgggtcggcctggaagtaaacttccagggccgtcatgacggctga

SEQ ID NO: 343618 - DNA, 1131 bp, Pseudomonas aeruginosa
atgaatgccatgaacaggacctttcccaccgccccgcgctacctcacggatgaccagcgctgggccgccgtcctggcacgcgacccgaccgccgacggccagttcgtctacgccgtgcgaaccacaggcgtgtactgccgccccagctcctccgcgcgcctgcccaatcgccgcaacgtcgagttcttcgacacccccgaggccgccgaagccgccggctaccgcgccagccgccgccaggccggcgaccgcaccgccgccgccgcccaccgcaccgccgtgatcgccgaggcctgccgcgccatcgaggccgccgactcgccgcccaacttgcaccagttggcggaatgcgccggcatgagcccttcgcacttccaccggctgttcaagatcgagaccgggctcacccccaaggcctacgcctcggcctaccgcgcccaacgcctgcgccgggaactgagcgaccagggcaccacggtgaccgacgccatctacggcgccggcttcaactccaacagccgcttctacgaaaccgccgaccagttgctgggcatgcgcgccagcgactaccgcgacggcggcacaggtgcctccatccacttcgccgtcggccagtgctccctcggctccatcctggttgcccaaagccagcggggcgtctgtgccatcctcctgggcgacgacccggacgccctcgtccgcgacctgcaggaccagttccccaaggcccagcttgtgggcggcgatgccgacttcgagcgcctagtggcccaggtggtgggcttcgtcgaagccccgtccctgggcctcgacctgccgttggacgtgcgcggcaccgccttccagcaacgggtctggcagaccctgcgggaaatcccgccgggggccaccgccagctacaccgagatcgccgaacgcatcggcgcacccaaggccgtacgggccgtggcccaggcctgcggcgccaaccacatcgccgtggccatcccctgccaccgcgtggtgcggcgcaacggcgatctctctggctaccgctggggcgtcgagcgcaagcgcgaactgctgcaacgtgaaagccagcccagcccccccacgagcacagcgccatgcccgaaacagcctgcgctctga

SEQ ID NO: 343619 - DNA, 636 bp, Pseudomonas aeruginosa
atggcgctgactctgcccccgccggccttcaccgatgccagccgcttcctcgccgcccaggacgccgactgggcgcggcacatcgacgccatcggcccctgccggcaccagccccacccccagcgcgaaccctacgaggccctggtccgcgccgtggcctaccagcagttgcatgcccgcgcgggcgacgccatcctcgcccggctgctggcgctgtaccccggcgggcgcttccccaccccgtgcgaactgctggccatcgaacccgagcggctgcgcgcttgcggcttctccgcacgcaagctacagaccctgcagggcatcgcccaggccaccgttgacggccaggtgcccggccgcgacgaagccctcaccctggatgacgacgccctgctggcgcgcctcacgcccctgcgcggcgtcgggcgctggacggtggagatgttcctcatctatacccttgagcgccgcgacatcctccccgccgacgactttggcgtgcgcgagggctaccgccgcctcaagggcctggacgaggcccccagcgccgcccgcatgcgccagctcggccaagcctggagcccctggcgcaccgtcgctgcctggtacctgtggagaatgccgcctacaccgtga

SEQ ID NO: 343620 - DNA, 552 bp, Pseudomonas aeruginosa
atgaacctattgctgagcgccttcgagtccccgttgggcagcctgctggtggtcaccgacgccgaacagcgcatccgcgccctcggcttcggcgactaccgcctggcgctgctgcgcaacctgcgccagcgcttcggtgactaccgcctgcaggacaccccgctgccgcgcaggatcgccgacgccctgcgcggctacttccagggcgacctaggtgccattgaccgcctggtgcttgagcccgacggcacgcccttccagcgcaaggtctgggacgccctgcggcagatcccgcccggcagcacccgcagctacggcgaagtcgcccaccagttggggctgaacgacccacgcgccgccatcgaagtgggtgccgccaacgccgccaaccccatcgccgtgctgatcccctgccaccgcgtggtggccagcaacggcgagctgcgcggctacgcctggggcctggagcgcaagcactggctgctggagcacgagcgcgccctgcggcacatcgacgccgcgccgcgtaccgccagcctgccggggttctga

SEQ ID NO: 343621 - DNA, 231 bp, Pseudomonas aeruginosa
gtgcccgacctcaccgacattcccgccgcagcgcccgcccacctcggcgaaccgccagcggcccacgacgcggcggaacaggtcaggtgtcaggtgcttgacgctttccaggccacggtggatgcccgccaggcctggtggcgcacccacgaaacagggcggaccgagctgcacctcgccagcggcgagatctacctcttacaacgccacggcgtggcccggctgcgctga

SEQ ID NO: 343622 - DNA, 648 bp, Pseudomonas aeruginosa
atgactcccgacctcttcgccacccacgccagcggccagcgcgaagccatggccgagcaggccgtgatcctgcgcggcttcgccatggatcaggccgacgaactgctgcgacagatcctccagttgcagacccaggcgccgttccgccacatgctcacccccggcggcttccgcatgtccgtcgcactgaccaactgcggcgccctgggctggaccaccgaccgccgcggctaccgctacagcgccaccgacccggacagcggcgccccctggccggccatgccggaatgcttccgccaactggcccgccaggcggccgaagccgccggcttcccgggtttcgacgccgacgcctgcctgctcaaccgctaccagcccggcgcccgcctgagcctgcaccaggaccgcaacgaacgcggcttcgacgcccccgtggtgtccgtctcccttggcatgagcgctaccttcctgttcggcgggcagcgccgcagcgacccggtccggcgcttccccctgcaccacggcgacgtggccgtgtggggtggccaagaccgcttgcgttttcacggcgtggccccgctcaaggggccgccgcatccgagcctgggcgagcagcgcctgaacttcaccttccgccgcgccggctga

SEQ ID NO: 343623 - DNA, 753 bp, Pseudomonas aeruginosa
atgagtgccgtgctctcgtgcccggcggcgccggacctcacccccaccgccttcctcgaccggctctatgccctggactggccgcagctagaagcgcagctggaccgccacggccacgcctgcatcgagcaactactggacgccgacgcctgcgcacacctggccgcgctctacccggacgcacgcaccttccgctcgcgcatcgtcatggcccggcacagcttcggccagggcgagtacaagtacttcgcctaccccctgccagccccactcacgaccctgcgccaccgactgttcccgccgctggcgcggatcgccaaccgctggcaggcccgcctcggcctggagacgcgctaccccgaggccctggacgccttcctcatgcgctgccaccaggccggacagacacgtcccaccccgctgctgctgcgctacggagcgagcgactacaaccgcctgcaccaggacctctacggcgagcacaacttcccgctgcagatcgccatcctgctctccgagcccgggcgcgacttcaccggtggcgagttcgtcctcaccgagcacctggccggcacccagcgggccgacgtggtgcccctgcgccagggcgacgcggtgatcttcccggtggacctgcgccccgtgcccggcaagcgcagcggcttccgccgcgccgccatgcgccatggtgtcagcctggtgcgcagcggccagcgccacacccttgggctgatcttccatgacgccacctga

SEQ ID NO: 343624 - DNA, 1014 bp, Pseudomonas aeruginosa
atggagctacgtcatcttcgctattttctcgccgtggccgaggaactgaacttcacccgcgccgccgcccgcctccacatcgagcaatccccgctgtcccgggccatcaaggaactggagtccgaactcggcatccagctgttcgagcgcaacccacggggcgtgcagctcacctgggccggcagcgtgttcctcgataatgtcaagcgcatcttcgccgtcctcgaacaggcccgcatggacatgcgcgacgtcgccctcggctttcgcggcaccctgcgcatcgccgtgtccgacggcatcgccccgaaccacctggctgacctactcgcccgctgccggcaggaggagcctgaactgagcattcgcctgttcgaggtcagctacgcccagcaggtgaaagggctgctggaacaccactacgacctcggcttcgcccgcatcgacgccgccgacagcggcctgcaggcccagcccgtctggtgcgacccgctggtcgccgccctaccgacccgccacccgttgctctcgcaccggcgcatcccattgcaggaactggtccgccacccgctcatcctcagccacagcggagtccatgaagggcagttccagcagatcagccggctgctccgggcccacctcagcgaagacgaagccgcccgcctcaatatcgccgagcagtatatctcccgcgagaccatgcaggccctggtcgccgccggctatggcgtcgccctggtgagcggcaccgagcgcagcgacctggccggcagcgagatcgtcacccgcgccctgtcgctgcccgactccgaactcaccacctacctgctgcgcccgacaggcgaacccagcgcccacctctcgcgcttcctcgaacgggtcgcgcagacctgcaggcgcaccgaagagctcagtccccagggcctgttcgacagcctgcggcccctggcaccgctcccccgcctgcgccccgtgggcctgaaccaggcccacgacagccggtccgtatcatga

SEQ ID NO: 343625 - DNA, 3471 bp, Pseudomonas aeruginosa
atgcaggatgcggactcgttgaagcccggcttcatgattattcacggcaatcgcttggacgatttgcgtgagctagcggtgagctggatgcagcgctaccccttggccccgctggaaaacgaagtcgtgctggtacacagcaacggcattgctcaatggttgaagctggcgctggccgaagatcctaataacggtggctgcggtattgccgcagcgttagatgtgcaacttcctgcgcgtttcctgtggcaggcctaccggtctgtattgggggccgagacgacaccagagtcctccccactggacaaggcggcactgagttggcgactcatgcgcttgctgcctcaattgctcagtaaaaccaatttcagcagtttgcggcgattccttcaggaggatgacgatcagcgcaaactctaccaactctccgagcggctggcggacctgtttgatcagtatcaggtctatcgtgccgattggctggaggattgggcggccgggcgtgatcagctaaagcacatcaaaggcggtgtgaaatcgttggatcccgataacctgtggcaagcggagctgtggcgggaagtattggcagatgttggcgagggcgctcttgagcagagccgcgccggtgttcacaagcgctttgtcgcactcctgcgtgaagcagggcaggccccgagagggttacctcgacgtgtggtggtgttcggtatttcgtctatgccagcacaggttctggaagccctggccatactctcgcgctacagccaggtgttgctgtgtgtgcacaacccttgtcgccaccattggggcgatatcgtcgccgacaaagacttgctgggtcatgcctatcgccgccacccaaacagaagcacttctatagtggcgagccagcatggccagccactgctcgcggcttggggtaagcaaggtcgcgactacatcaatttgctcgaccactatgatgagccgacgagttatcaatacctgttcgagggcctgaacggcgggcgtatcgacctgttcaatgacgagccaccttcaagcctccttggtcaattgcaaagcgacattcttgaattgcgtcctttggctgaaactcgcgaagtatggggccctgtcgatgttgcacaggatcgttcggtacgctttcacgtggtccacagtgcgcagcgtgaagtggaagtgttgcacgatcagttgctcgctcgcttcagtgccaatcctgagctaagaccgcgtgatgtgattgtgatggtgccggacatcaatgcgtatgcaccgcatatcgaggccgtgttcggtcaggtgccgcgtcatgaccctcgttatctgccctttaccctggccgaccaggggcagcgtggccgccagccattgctgatcgccctcgaacacttgcttaaactgccccatagccgcttcgccgtcagcgatattctcgacctgctggatgtgccggcgctgcgggcgcgcttcggcatcaaggaagcggatgtgccgatcctgcagcgctggatcgacggtgccggtgtgcgctggggcctcgatgcgcagcagcgcgaaagcctggatatgcctgcgggcctggagcaaaacacttggcgctttggtatgcgccgcatgttattgggctacgcggccggccaagggcctgaactgaatggaatcgagccctatgacgaggtttctggtctggaagccacactggcgggacctctgttgaccttgctcgatcatctggaaattgcccgtgaggagctgcagcagccggtcacgccagtactctgggtcgagcgcctgcaatcgctgttgaaggtgttcttccacccggtgggggatgccgaagagttgctggtcaaccaattgctcaagctgctcgatgactggctccgcacttgcgagtccgcgcagttcgccgagcccttgccattgagcgtgatgcatgagacctggctttccggcatagaagagggcggcttgtcgcagcggtttctcgccggtgcagtgaacttctgcacgttgatgccgatgcgtgcgatcccgtttaaagtggtgtgcctgctgggcatgaacgatggtgactacccgcgtcaacagtctcctgtcgactttgacctgatgcgcaacgattaccgccccggtgaccgctcccgccgtgaagacgaccgctaccttttgctggaggcgctgttgtcggcccgagagcagctttacgtcagctgggttggccgcaacatccgcgacaatagcgagcgtgtaccctcggtgctgatcggtcagctgcgtgaccatctggccagtggctggcgatcggcgccgcctgggtcgctgctgcatgccttgacccaggaacatccgctacagcctttcagcgcggcctactttgccgaccagcccgggcctgatggactgtttacctattctcatgagtggcgtgaggtgcatgagtcgcgggcggaggaactctcggtcgacgtattgcctaaactcacgcaagacacgccattgaccctgcgccaactggctgggtttgtacgcgaccccgtgggggcattcttccagcagcggctcaaggtcaatttcgacaatgacgaattgaccagccgtgacgacgaaacctttcagctcgacggccttgagaactggcaacaccaggaccgactcagtcaggcgctcaaacgttgggtagaagaggactaccgacctgaggacgcggtggccgagcttgatctgcatgtgcagcgtttacagcgtgaaggaaagttgccgctgggcggcttcggcacgttgagcgcatcggcgttggccgagccactgccggacatgctggagcgttatcacgcgcagttgcaggcgtggccggaaatcgaggagggccagaccgccgcaacgatcgccgcgcacgaaccgacccctggattgagtgactggctgggtggtattcgccgcaattcccaaggtgagcgagcctacttgcagctggacagcaagaagctatgcaacgacgacagttggcgctggcacaacctggttcgcccctgggtgcgccatctggcattgcaactgagtgaatcgggctgcaccacgattctggtcagcttgaacggggacgtagtgttccggccaatgccggcgcaacaggcgcaggaacagttgcagttgctgctcgacgcctgggtggcgggcatgcgtgagccgctgccggtcgcctgcaaaagcgcattcgcctggctcgaggaagcggggaaaggcgggaaagacaacgacgcgacttccgagaaagcccgcgagacgttcgaggggggctacatgcgcactggagaggcggacagctctttcgccttgcgccgtgcgtacgcggacttcgaccaactgtgcgcctccggtcatttcgcctcatgggccacgcgcctgtatggaggactgttcaatcatctttcttcgagccgcgcagggagcgaccaatga

SEQ ID NO: 343626 - DNA, 3675 bp, Pseudomonas aeruginosa
atgaaaccgctaaatctcaaccccctcgactttcccttgcatggcagccgattgatcgaggcgagtgccggtactggcaaaaccttcactatcgccttgttgtacgtgcgtcttgtgcttggtcatggaggtgaagccgccttcaaggacctgctgacaccaccgcagattctggtcgtaaccttcactgatgccgcgacccaggaactgcgcgaccgtattcgtgcgcggttgaccgaagcggcgcggtgctttttggaacctgagcgcgaacacgacaagctgctgcagcaactgcgagccgagtatccgccgcaggaatggcccgattgcgcgcgccggctgcaactggcgggtgagtggatggatgaagcggcggtctcgaccatccatggttggtgctatcggatgttgcgtgagcatgccttcgacagtggcagcctgttcacccagacactggaaaccgatcagagcgaattgctggccgaggttgtcagggattattggcgtcggcacttctatgaattaccggtggagcaggcccgagccatcggtgattgtttcaaaagcccacaggacctgggggatgcactcggttcgttgctgacgcgccgggacgcgacctatcaatacaaaaaccagccccttgaagcacctggctcgttgcaggcgttactcaaggagcctggcgaatggtacgcaacggtcggcgacctggagcgtaacgctcgcaagctttggcttgagcatcagaaagagctcgaggaggtgttgtgcagcattcgttctcacatgaatggcaatacctacagaaaaatcgatcaggatgacgtcttcaacggtctcctgaacaagttggcacattggtccagagggcaacctgcgccgcataacgtgcacgccttcggccaggccggcataaaactcaagggcaaggccgtggtgcccaagcatcaggcgttcgaggcgatcgacctgtgggtcgaacagcgcgacgccaaagtggatatccgcgcccaactgctgctgcacgccttgcatgaagtgcgcgagcgcttcgatgaagaaaagcgccgccgtgccgaaatcggtttcgacgacctactcaatcgtcttgaccaggccttgcaaggcccgtcgggccttcgtctggctgagaccattcgcaagcagtacccggtcgccttgatcgatgaattccaggacaccgatccggttcaataccggatcttcgaaaccatttaccgcattcctgacaacctgaatgactgcggcctgtttatgatcggtgacccgaaacaggcgatctattcctttcgtggtgcggacatctacacctatctccaggcacgcgaggccacagctggccgtcattacacactggggaccaactatcgttccaccaaggcgatggtcgacgcggccaaccactgcttccggttcgctgaagcccagcctcgcggcgccttccggtttgccacagaaggccagggcaacccggtgccgttcaacatcgtccaggccaatgggcgcgacgatgtgttgcagatcaagggtgcggatcaacctgccttgacgttctggcagctggaaaccgagggtgtggtcaataacgccacctacttgcgtaaagccgctgacgcctcggcatcggcgattcaggcctggcttgatcccactgcaaccgagtattccggtttgctgaaaggcaatggtgaattcgtcgccttgcggcccgccgatatcgccattttggtgcgcaatcgcaaggaggctgaagccatacgcaaagccctggcgcatcggcaactggccagcgtctatctctccgacagggactcagtcttcgaaagcgaagaggccaaagaccttctgtatattctgcgagcgtgcgctcaacccaccagcgatcggctggtgcgtgcggcaatggcgacccgcagcgtcgggctgacatggcagatcctggagcaattgaaccaggacgagttgttctgggagcaacaggttttgttgttccgcgattttcgggtgttgtggcaacaacaaggcgtgctgccgatgctgcgaaagctgcttgccacgttcaaggtgccggcccgtttgcttctggaagatcagggtgagcggcgcttgaccaacctgttgcatctggctgaatggttgcaacgcagcgccgccgaactcgatggcgagcatgcgttgatccgccactttgccgagcaggtcgacggccagagcgaagaggaaattctgcgtctggaaagcgattcggacctgatcaaggtcgtcaccgtgcacaaatccaagggcctggaataccccttggtgctgctgccgtttgcctgtagcgccagggcgatcgatggccgaagcactacaccgcccatgttccacgacgacaaagggctggtggtcgagctgatcaagggcgatctggccaaaccggctcaggcgcttgctaacgatgagcgcatgggcgaagagatgcgcttgctctacgtcgccctgacccgagcccgttatgccacctggatctgtgttgctccccagggcttcaaggctggcggtgcatcgacggacctgcacaaggctggtctgggctacatgctagcgggggagaagccgatcgcagcggctcaattgcctgacgtagttgcagcgttggcccgcggctgcataaacattgcagtgtgcgcagccccggtgccgtccgatgctgtgcatacggcgccaccgccaccgccggtgggaccggcattgcgccccctgcacaaactcgcggcgaactggtggatcgccagttactcggccttggccattgccgatggtaatgtcctgatgggagcgcagccgggtatcaaccttgagccggcgaccgcgctggaagccaacttgcaagaagaggacgaagctgaagccttgcctgcaggggccgggattcacgggttccctcgtggcgcaggaccgggcacctttctccacggactgttcgaatgggccggccgcgaaggtttcgccaaggccgctggagatccgatcaccctgcataacaacgttgcccgacgctgcaacctgcgcgattgggaaacctggatcgagccactttccgtctggctaggcagctatctgaatgcaccgctgcggttcaacggtacccaatgcaagctctcgactctgagcacctatcaggtcgagatggagttctggttttccagccgatcggtgaacgtccagcgcctcgatgcactggtgcgtgaatacaccttgggtggtgcaccgcgcccagtactggctgccaacgagttgaacggcatgttcaaaggcttcatcgacctgacgtttgaacatcagggtcgctactacgtggcggactacaaatccaactggctgggcagcaacgatcaggcctacgacgccgaggcgatggccgagaccatgctggacaagcgttacgacctgcagctgtgtctgtacctgctggccttgcatcgccagcttaagctgcgccttgccgggtatgactacgaacagcacatgggcggggcggtatacctgttcgtccgtggacaccaggcgcccacccaaggtgtgcatttcgaacgaccgccacggcagttgattgaacaactggaccaactcttcatgggccaacacgcggaggtcagcgcatga

SEQ ID NO: 343627 - DNA, 2094 bp, Pseudomonas aeruginosa
atgagccagacccttaagcagctgagcaacagccagcgcaaagttgatcacccgccgttgttcattggcgatgccgacagcagcgagctgctgcatcaactcgacaattgggtgaaccgaggctggttgcgcgcactggatcgctcattcgccaccttcatacttgaacaggatccccaggcccaggccagtgtgttgctggccgccgcgatgaccagtcatcaactgggtcgcgggcattcctgcctggatctggtcgctaccctgcaagcgcctgactttgtgttgtcgttacctcctgaaggggaggagggcggccaattaccgtcgcaatggttgctgggcctggatgtcgcgcaatggcgccgggcgttgtgcttgagcacgatggtggaggatcgggacgagccgcagcgattcccggagcggccgctggtgttgaccggacagcgtctgtacctgcgtcgttactggaactatgagcgcagcattgcccaggcgctgagcgcccgtttgagcgtggacgcggtaacaccggaaaaactgtctagtcggctcgatgccttgttccctgacaccttcgaagttaacggtgaacgccgtagcgactggcaaaaaattgcctgtgcgctggcggcacgaggtaacttcagcgtcatcaccggcggccccggcaccggcaagaccacctcggtcgtgcgtttgctggggctgttgcaaacaccggccgtggaggaagggaagccgctgcgaattcgtctcgccgcccccaccggcaaggcagcagcacgcttgtccgaatccattggcaaggccgtccgtgagctgccggtcagcgccccggtgcaggaggcgatcccgacggatgtttccacattgcaccgtctgttgggcagtcgaccggattcgcgcaacttcattcaccaccgggataagccactggagctggatgtattggtggtcgatgaagcgtcgatgattgacctggaaatgatggcttgcttgctcgatgccttacctcggcaggcgcgcttgattctcttgggtgacaaggatcagttggcatcggtggatgcaggctccgtgttgggcgacctttgtcgcaacgctgaagccggcgactatagcgagcaaacagtggcctggctggaagaccacagtggcgagtcggtcagcgctccggggttgcaaacggcagtcggtgccggcgatccgctggcccagcaaaccgtcatgctgcgctactcccgacgcttcgacgcccagcagggcattgggcgtctggccaaactggtcaatgagaaaaatgccgccgaagcacgaagcctgcttgatcagcaattgcctcagctgttcaacctcaagctgcgaagcgaacatgatgccgcactcactgagttgattatcaatggcaaaggcgatgctcctggttatcgccattaccttgagcagctacgagaccagcgtcctgcgaaagacactccctgggatagttctctttgggccggttgggctggcagagtattgggcgcgtttgatgagttccgtctgctctgtgcgctgcgtcgcgggccttggggggtcgagggactgaatcaacgagtggccgccgaactgcgccgctgtgagttgttgtcgggggaccagggttggtacgaagggcgacctgtactggtcacccgcaatgattacagcctgagcttgatgaatggtgacatcggcattgctctctgggtaccgggtccctctgcagagcgggttctacgtgtggccttcccgcgaaacgatggcagcggcggcgtacgtttcgtgatgccgagtcggctggtggaggttgagaccgttttcgccatgaccgtgcacaagtcccaggggtcggagttcaaccatacggctctggtattgcccgatgcgctgaaccccgtgctgaccaaggagctgttgtacaccgccaccacccgtgccaaacaatggttcagcctggtcgaagcgagtccgggcgtatttgaaggggcggtgagtcgcaatgtgcagcgaaccagtgggctggcgctgcaagtgcaagatgagctggcaaaacttcaacgcacctga

SEQ ID NO: 343628 - DNA, 165 bp, Pseudomonas aeruginosa
atgaaaacctacaaagcctttatgcaacgtgtagttgccaccgccggcccccaagccaacttcaccatcacggttcaagcggtgacctctgccatggcaaaggtcaccgctgaagcccagtacccaggctacaaatgcctgaacgcacccactcaggtgcgttga

SEQ ID NO: 343629 - DNA, 675 bp, Pseudomonas aeruginosa
ttgaataatctggaagccctgaagctggtggaaaccacgttcaccgagatactgaacgccgagaaagtgtccgacctgcaaaagatactgacgtccgattccctgctggaaaaatggcagatggaccgcaacaagtacccagaattgcagttgaagttgacggaccacgacatcagttccctcatgactaaggttggcaacgatcttcgattgcatgcggacctcagcgccaaactggaaactcctctggaaaagctgctctacgccctggtttggaaaaacggcgacctgcaaaaggtggcgcacatcatcaaaggtgcatccgatgtcagaccaacatcgctgactaacggcccaggccaggtattcagacagttcggccggcacctggctgatcgctcggaatccattgtcgatcagcacgtgcttcgtgccttcgaactctatgagcagattaacgacccagacttttccaagatcaagtccatccgcaagaagatcaactgggacaaggatgtcgcctgcatcgaacgctacaaacgctggctctgcgagcacttcaaagagcgtcagcatgccgaacctggattcgtggtgaacatcgacatggcgctcttcgcgctcggtcgagcggtaaagatcaccagcaaacgcggcaacggtgaagcagcgtaa

SEQ ID NO: 343630 - DNA, 876 bp, Pseudomonas aeruginosa
atgaaacgcaagcaaaccatcgagcaggtccgctgggacctcgcccttcgctaccaactgatcgaaaccgtcgcgtggtgggaaggccggctgaccacggtgcacttgacgcagagcttcggcatcagccgtcagcaagcatccaaggacatcaatacctatatcaccgagcatgcgcctaaaaaccttacatatgatcgacagatcaagggttacgtgccgagcaaacagttcaagccactgttcatcgatgacagcgccagcgcctacctacacctgctttaccagaacaatgctcgagcgccacacgttgaggggctggcgttagcctacgcccacaccaaagtactggaggtgcctgaccgctcgatcaaggccgagatactgcgcccactgctcaaggctagccgggagcatctacgcctggacatcgactacgtttcgctcaacagtcccgaacctgaagggcgaaccattgcaccacatacgttggtttacacaggcatgcgctggcatgtgcgcgcctactgcgaaaaaaaccgcgagtaccgggactttgtactgagccgactgcgtggggttcctgaactgatggacggcgagaccgagaatggcctctcgggcgacgaccagtggaatagcgaagtcaacgtcatcatcaaacctgacgagcgtctcacggtgatgcaaaaagcgataatccaggaagatttcgggatggtcgatgggcgactgcagattccctgtcgccaggcgttggtcaagtatgtgttgcagcgctatcagattgatccaaagaacatggacccgaaaccagaggcgcaacagatcgtggtggagaatctgaaggagttgaaaccctggctgtatgactga

SEQ ID NO: 343631 - DNA, 261 bp, Pseudomonas aeruginosa
atggatggttgggattggatagcgtcggtagcgatgctgatgctgttgatgatcctgctgatgcttttggtgcagtatctgcagactaacaaagcctggagattgctcgagcattggcatgcgaccacgaaggagcgccagcagcggctgagctggcacgccgaagagaatcgcgagttgaaatcggcgcttcgggcggagaaggctcatgtggagcagttgcagcgcaaggtggagattctgcaggctttgctgccttag

SEQ ID NO: 343632 - DNA, 1677 bp, Pseudomonas aeruginosa
atgactctgccttggctgctctacatgaaattcgtgaaggagcaggaaaccgaggtcacggaaatcgctgaccccgttacgggccaggaacgcttgaatcctttacctgctgagcgccgacgtcgcggcatgctcgccattggtggtggtatcgcgaccatcagggccatcattgagttcgccaaagagggatgcaagcgggaagacttggtagagcacatgcgctcgatcaacccaagccacgcgacttcgagtatccgaacacaactcaattcactgattgcggaatggggtgttctgcgggcccaaggcgacgaaatccatctgacaccgcgaggtgagggactgctggattctggcgagcctgatgaagtttcggactggttgctgacccgcgttctcgggtttgatcacatgctctatgcattgcgcagcggcccaatatccgtcagcgcattgaatgacgcgttgagaaaggtaaaccccgggtggaccagcgatcgagcattgaccagtctgaccttttggctgcgtgccctgcaattggttgaaacccgtgcagacaaactgctgtacctgaccgagttcggtgaaacctgggcagcgcaaatccactgggagccccaatcactgactccagacgccggaatcgtttcaaccagcgtggcggcatccagtgaacaatctgtgccgttcgagcgaccgtcgctggaaaccatccagcgtagttttcccgcggatatcgtctttccgatcagcctggttgctcggcttgacgccggactctggagccatccgcgccgtcacttcgccctactcaccggtctcagcggcgccggaaagactgtactggctcggggatatgcgcttgctttgcacgaggggcagaccaatccggctgagggcttgcttacagtccccgtccagccaggctggcatgatccctcctgcctgctgggttacgtcaatccattgagtaacgagagctacgtacgcacggcatttgtcgatttcctgatcagggccagtgccgactccgagcgtccgtacacggtcgtgctcgacgaaatgaacctgtcgcacccggagcaatatttggctccattgctttcagccatggagacaggtggccacattgacctccatgctcagggcaatgacatcagcggcgtgcctccgaccatcgcgtacccgagtaacctggtgatcattggcaccgtgaatatggatgaaacgacacatggcctgagcgacaaggtgctcgaccgggcggcagtgatcgaattctgggacatcgatgttgaagcgttccccggctggaagaccagtgctttacctgaggcgcaaattaccaaggtccgtgacacgctcaaggggctggtcaaggccctgcgcccggcacgtctgcatttcggctggcggactgtccacgatgttattggctacatcgagcaggccaagcgcggcggtgtgattgacttcgatgcggcactggatcaagccatctacgccaaagtcctgcccaagctgcgcggggaagacacacctcggattcaggcggccttcgcagacagccgtaccttgttgcgggatatgaaactggcggattcggcaactaaagtcggcgagttgcaggatgatttgcgcgctctgggttccgcccggttctggcgctga

SEQ ID NO: 343633 - DNA, 726 bp, Pseudomonas aeruginosa
atggcgattatccgatgcattaataaacaaggcagcactttcacggtcagccccgaagcgttggtttcggggttcacggagagcggcacttattatttcgagattgtccccgagtcgcgtctgttcgttgatgatgagccgttggagcgcgtgcgccatgaggcatttgatgcgtggcgatgggagccgggtttctatgcgggcaaagtcatcgctgagttggttgataccagcggcaaagtcgtagcgagctaccactttgatgtggctcccgatcaaaacaagctcggcgagatttcgtttgccgcgatgctcgacgagcttctcgccttcgatacacgtttgctgctgggcaacgaatacgcccagttggaggtgggtcatgaaggtcgaaccagcaatccgcacctgcaatatgcccggctgaaacgttatggtccggcgttgttgtcggcgtttaccgaagtcttgcgcaagccgctgacacagttgcaccgggagcgcaccttacggccaacgcaccaattgcgccgtattgatcgccagaccctgcgacgtgccttgcaggacccggcggcgacggcgttgctccgtaatcccgaacaggccagtgccggctctgaggggctgtactttgatgtgcccactgtgtttgaagacctggataatccggccaatcaggcgttagccgttgtccttggtaaagccctgcgatgttggcgctga

SEQ ID NO: 343634 - DNA, 474 bp, Pseudomonas aeruginosa; identical to SEQ ID NO: 338206

SEQ ID NO: 343635 - DNA, 474 bp, Pseudomonas aeruginosa
gtgaagaaacaactggaagtacgcctgacagcgcgcacggtggagtgcttccacgccaatcagcgggtggccagccatcttcgctcaccgcacaagggccggcacagcacacaggccgagcacatgcccaagagccatcgcgagcacgccgagtggacgccacaacggctgatccgctgggctgagcagaccgggccgaacacggccggcgtgatcagccacatcctcgaacggcgcatccacccaacccaaggctaccgggcctgcctgggcatcctgcgcctgggcaagacccatggcgaagtgcgcttggagttggcctgccgtcgcgccctcagcctcggtgcgtgcagctacaagagcctcgaatcgatcctgcgccagggtttggaaagcctgccgttggctcaagccaacctgcccctgctgccggacgaccacgccaatctgcgcggccccggctactaccactga

SEQ ID NO: 343636 - DNA, 966 bp, Pseudomonas aeruginosa
gtgtccctgcgcaccctgcaacgctggaccgaggagaacgtcgtgcgcgctgatgcccgccccacagccaagcgaccggtgccgcgcaatgcactgagcccggctgagcgcgaagccatcctggccgtctgcaacagcccggaatacgcgcatctgccgcccagccagatcgtgccgaggctggcggatgccgggcgttacctggcctcggagtcgacgttctaccgcgtcctgcacgcagccgatcagcagcatcgccgcggtcgcagccagccaccgcgcacggtgaaagcgccgaccagccatgtagcgaccgccgccaatcaggtctggtcatgggacatcacctatctcccggcggcggtacgcgggaagtatttctacctgtacctgatcgaggacatctacagccgcaaggcggtgggctgggaggtccacgaacaggaaagcggcgagctgggtgccatgctgctgcaacgcagcgtgctcagcgagcagtgcctgctcaagccgccggtactgcactcggacaacggtgcaccgatgaaatcggcgaccatgctgcaaaagatgtacgacctgggcgtcacgccgtcgcacaaccgcccgcgggtgagcgacgacaacccctactcggaatcgctgttccgcacgctgaaatactgcccgcagtggccgaaacaaggcttcgccgacctggaagcggcacgttgctgggtgagagatttcatccgctggtacaaccacgagcaccggcacagccgcatcggtttcgtgacaccggcagagcgccatcggggtgaagatcaccgcgcgctggcccatcgccatgcgctgtaccaagaagcccgccagcgcatgccggagcgctggtcaggcaccacacgcaactggacgccggtcggagcggtgacactcaaccccgagcgggagcaggaacaacagccgcagaaaaaggcggcctga

SEQ ID NO: 343637 - DNA, 216 bp, Pseudomonas aeruginosa
gtgcagacctggcggcaggcgtgcatcagcggccagcagtcggcacaggcgcagcgacaggccgagcgcgagcaagccaaggcagacaagaaacgcatccgtgagctggagcgcgagctgcgccgcaaggacaaggcgttggccgaggcggcagcgattctggtgctgcgaaaaaagctgaacgcctactggggcaacgacagcgaggacaactga

SEQ ID NO: 343638 - DNA, 246 bp, Pseudomonas aeruginosa
atgccgcgttactctgctgaacgaaaagctgccctgctgaagaagctgctgccaccgatcaacctgtccgtggctgaggtcgcccgccaggaaggcgtctccgagatgaccctgtatgcttggcgcaaacaggccaaggctgaaggagcccccgtgccaggagacaagaaactgcccgatgactggtcggccgaggccaagttcgccgtcgtgctggaaaccgctgcgctgtcgaaatcgaactga

SEQ ID NO: 343639 - DNA, 1041 bp, Pseudomonas aeruginosa
atgatgagtctgtggttgttgttgccggcggttgccggcctttccctcttgctgaccgcggggctgcgtcgttatgcgattgctcgcagtctgatggacgtacccaatgcccgaagttcccaccaggttccgacaccacgaggcggcggtgtcgctatcgtgctttccttcctgctggcagtcctgttggcggccttcctgggcatgatggatataagtctggccatcggcatcctcggcgcaggcgtggggaccgcattgctgggttttctggatgaccatggtcatatcgctgcccgttggcgtctgctcgggcatttcgccggcgcctgctggctgctgtactggttgggaggcctgccggcgctggtctttttcggttttatgatcgacctagggtgggtcggacatataggtgcggtgttctacctggtctggatgctcaatctctacaatttcatggatggtatcgatgggattgccagcgtcgaggctgtgtgcgtgtgcattggcgctgttctgcttgtcgtcgtcagtggcgtcggttccgatgatgcatcccaaggcatctggttgtcggcactactggcgtccgcggtgacgggattcctcttctggaacttccccccggcgcggatcttcatgggagacgccggtagcggttttttgggaatcatccttgcgggcctttccctgcaggctgcctgggtctcgccgcaactcttctggggatggctgatcctgctgggggttttcgtcgtcgatgccactctgaccctgctgcgccgattgctgcggggagataaggtatatgaggcacatcgcagtcatgcatatcagtacgcctctcgttattacggacgtcacctgcctgttaccctggcggttgggtgtatcaatcttgtctggttgctgccattggcgctatttgtcgcgtcggggcgaattgacggcatgcttgcgttgttgatcggctatctgcctttggtggccctggcccttcggttcaaggccggaaccctggaaccacgcgttgcctga

SEQ ID NO: 343640 - DNA, 963 bp, Pseudomonas aeruginosa
ttgagtcgacacaatgtattggtgacgggcgctaccggattcgtcggggctgcgttggtcgagagtctttgctcttcggaaaagtacagggtctgggccggttaccgtcgagagagtagtccctggcccgagggggttacccccttgttcttgggggagctgggtagttccgtggcctgggagacggaatcggttatcgacacggtggtccattgtgccgcgcgtgtgcatgtcatgagcgagacggtttccgatccgctcgccgagtttcgcaaggccaatgtcctgggtaccctcgatttggcccgtcaggccacatccctgggagttcgccgttttatctatctcagctcgatcaaagtcaatggcgaggggggcgagcccgggcagccctacgtcgccgatagcctgcctaatccagtcgatccctatggtgtttccaagctggaggcggagcaggcgctcctgggcctggcggcggagaccggcctcgaggttgtgatcattcgtcctgtcctggtgtatggccctggggtcaaggccaacgtgcagaccatgatgcgctggctgaagagaggggttccgctccccttgggggcgatacacaatcggcgcagtctggtggcgctggataacttgaccgatttgatcgctacctgtatcgatcacccggcagcggttaaccaggtctttctggtaagcgacggggaggatctttccactaccgacctgcttcggagaatggggaacgcgttacgtacgcccgcgcgcctggtgcctgttcccgccagttggatcggcctggtcgccaagacgctgaacaagcaggcgtttgctcagcgcctgtgcggttcgctgcaggtcgatatagaaaaaaaccgtcggatgcttggctggacgccgcctgtaggcgtggacgaggctttggaaaaaaccgcccgctatttcctggatcaccaatga

SEQ ID NO: 343641 - DNA, 1131 bp, Pseudomonas aeruginosa
atgaagccggttttgctaatggtgataaacgatccggcgttctttatatctcatcgtctacctattgcgacaggagctaggagttccggtttcgatgtgcatattgcgaccaggcccggacaggctgtatcaaggctcatagcggaaggttttcggcatcatgaactgcctttgtccagaagtggaaaaaatcctttttcggagttttatctcttgctgtctatatggcgtctgctatggaagctacgccccgatattttgcacctggtcacgataaaaccggtcttatatggcggtatcgctgcccgtctggctccggtgaagggagttgtagcggccgtttctggacttggtttcgtctttatggccaagggctcgaaggccagtgtgtttcgctcagggatcgcttggctttatcggcgggccttgggcaagaaaaggttgcgcgtcatctttcagaatcccgatgatcgggatgcgctgattggcttgggggcgatcacttttgaaaagtccgtcctgattcgcggctctggagttgacctgtcgctgtgccatccggtaccggaaagtcctggtgcgccggtggtcactctggcagctcgcttgctcagagataaaggtgtagtggagttcgtcgaagcggcaaatatcctcaggcagcgtggtgtgtcagcgcatttccagttggtcggggatttggatccggggaatcccagcagtatcgaagagttcgacctggagcggtggcgtagcgaaggtacggtcgagtgtcttggttatcgtcaggatattgcgtctgtcttcgctcattcgcatatagttgtcttgccttcgtatcgcgaaggacttcccaaggtcctggttgaggctgctgcctgcggtcgcgtagtcgtgacgacagatgtgccgggttgccgggacgccatcgaagcggatagaaccggcctgctggtgccagttcgtgacgcagtggcgctagctgacgccattcagcgtcttgtcgaatctccggagctgcggaagaagatgggggctgctgggcggacattggcagagcgtgattttgcgatcgaaagtatcgttcaacaacacctcgatatctatcgggcactagggagcggagcttga

SEQ ID NO: 343642 - DNA, 972 bp, Pseudomonas aeruginosa
gtggatgttagaagtttttttgatgatggctacctgtctggcctctattcctcggggcgtcgttctttttgtaatgttttaaaatcatacatctcacgtttttttgtacttttcactgtctatagatacgatttaatctggattgaaaaagagatttttccgtattttccttctgtggctgagaggtttttaagattttttggaaagccttatgtggttgactatgatgatgccatttttcataactatgatctttctaggaattggttggtcagaaaatttctcgggaaaaaaattgatagcgtcatgcgccactcctcatgtgtgatcgcaggtaatgactacttagctgagcgagcccgggttgctggttcatctcgagtggaaattattcctacagtgatcgacctcaagcgttacgaggtcagagatgagtcttgttttaagaaaacagtcataggctggattggttctccttcgactcagaagtatctactcgatattgcccccgagctagtgaagctctgtgtcgaatatcaggcatccatgctccttgtaggggctacacccgagatatcatcctacttctcaggcgtctatgtggatgtcaaggcgtggaaggaagaagatgaggtgggatatattcggcagatgacaattggtataatgccgttgcccgatggcccttgggaaaaaggaaagtgcggatataagctaattcaatatatggcatgtggcgttcccgtcgttgcctcgccagttggtgttaatattgaaatcgtcgaaaataatgaatcaggacttctggctgaggggagtagaggatggcgtgaatccttgcagaagcttctgcagtcttccgaactcaggcgggagtgcgggcggaacggacgttcctcggtagaaaaaatatattcccttcaagttcagtcccgccgtcttcatcagacatttattgaagttttgagttag

SEQ ID NO: 343643 - DNA, 936 bp, Pseudomonas aeruginosa
gtgaaaagtccaattattgatgttgtcgttgttaactggaatgcgggccttcagttgcgttcctgtgttgactccatttttaaaaactctttcggactcataagaaaagtcattgtgatcgataatggctctaccgataactcttgtgcccttcttggtgagcgggagaatcttgaggtcgtgttgacaggagagaatctcggtttcgctacagcctgcaatctcggagcttccaaaggagaggctgaatatatacttttcctgaatccagatgcggaactctatgaagagacgataggttctgttgttcgcttcatgaacagatccgaaaactctaaggtaggagtttgtggagtgcagttaatcgatgaacaaggacaggttagtcgtagctgtgctcgatttccctcttccgcaagaatgttgatgcatactatgggcgttgatcgagtctttcctgctctcggatatgcaatgactgattgggatcacttgtcatccaggcctgtagatcatgttatcggagccttctactttgtaaggcggcatgttttcaagctggtcggtggctttgatgagcgcttcttcgtctatctagaggaccttgatctgtcttaccgtatatcctgttctggatggagtagtttttacctttccactgctcaggcattccatgccggtggaggcgcctcaaggcagatcaaggcgcggcggcttttctattccctgagaagccgacttatctatatttttaagaaccttccggtcgtttctgcgtttttgattctgttgtccagcttgttttttgagcctgtcattagatctatgttttccatggttaaactttcccttcctgctcttcgggaaacctggtcggcttatttaatgctttaccgctggttgccgaagtggattttctttaacgctacgcgatag

SEQ ID NO: 343644 - DNA, 1158 bp, Pseudomonas aeruginosa
gtggtcagccgcactccggaagccaaggggctcgggatcaagatgggcgagccgtggtttcagattcgccggcgctttgaggcagccgggggcgtggcgtttagctccaactatgcgctgtacggcgacatcagcgagcgcgtgatgaccgtcattgagggcttggtgccgcaactggaggtctatagcatcgacgaggccttcgcggagctcacgggcatccaaaccgatctggtgcgcatgggccgagagatccgtgctcaagtgctcgccgccacgggcattcccaccggggtcggcatcgcacccaccaaaacactggcgaagctcgccaatttcgcggcaaaacgctggcagaagcagaccggaggcgtggtggatatcactgacccacaacgccgggacaagctgctgagggctgtggccgtaaatgaggtctggggtgtggggcgacggctcacagagcgcctaggcgagatgggcatacgcacggcctggcagctggccgaggcggacacctggaccctgcggaaaaaattcagtgtggtgctggaaaaaaccgcacgcgagcttcgcgggacgccctgtctggagctggacagcgtggcaccgcccaagcaggagatctgctgcagccgcatgtttgggcaacggctgcacgacttggcacccatccgcgaggcggtcgccagctatgccgctcgggcctgcgagaaattgcgtgctcagggctcggtttgcaagcgagtacgggtcagcatccgcaccggtatgttcaatccggacgagcctaaattcaccaagggcatgctgtgcgagctgccctaccccaccgacgacactcgactgatcacccaggccgcgcttgccggcctcgacaagctgtatcgcccaggtttcgctttctcaaaagcggaagtgctgctgatggatctgtgcgggcgcggtgaattcaccgacgacctgttcgcctccagtcagccagctaattcggagaaggtgatggccgtgcttgattcgatcaacgccaaatggggacggggaacgttgcgacctggtgtggtaccagcagcccccgcctggagcatgcgtcgcgagctgatgagccagagtttcacgacgcgagtagatcaattgtggcgagtatccgcgcggtag

SEQ ID NO: 343645 - DNA, 462 bp, Pseudomonas aeruginosa
atgaacctgtttacgcacattgccaatctcatcacctctgtcgtccggccagaaaaagcggcattcaccacggtcatctatcccagccagggaaaagcggtcgtggtgcatgacggccttggtattcgccaggaacgttggtggtatcaggtcgattcgctggaagatggggacacgagtacgtcgttcgacagcatcctgcaggatcacactaactgggctgattcatttgacccggtaggccagacccaagccgaggatactttctcagctttctcatcgacccacttcgaacccatggaaaccttctggctcaatcccgccaacggaatgcccatgctcgacagctgtttcgatgtcatgggtaacgcattcggcacggacacgatgactgacagcctgtcgtttgatcacggcataagcagcttcggagacagtttttcgtccttcggtttcgactaa

SEQ ID NO: 343646 - DNA, 408 bp, Pseudomonas aeruginosa
atgtcgccacttgcactggttgttagcttcatcctcacattcgccatcggaatttcttggctggccctgaccctcgacgcacgcattgggcgcagcaggctcgtccggcagattccattgccactggacgtcccagcttctggctatcgtcacaatccacaatcccgactccgaccagtattggcggtaacaggctgcatgctgctacttctttccggaatgagtgccgccatcctcggcagactggccaccatgcaaccggcagaagcggcagcggtgttcttcgcttatccgctgctgaaaagcctctgggggcaaatcgtgggcgtggggccaatcgtctgcgtcgtcatggccgtacccggaacctactgcatctgtttcgggctcaggagcgacaaacggtga

SEQ ID NO: 343647 - DNA, 561 bp, Pseudomonas aeruginosa; identical to SEQ ID NO: 324397

SEQ ID NO: 343648 - DNA, 462 bp, Pseudomonas aeruginosa
atgcgagcactggaaaacaagatacccccgccggttgtgaccgctctgtttgggctgttgatgtggctggccgcccgctatgtgccgggcctcgacctggcgcattcagtgcgggtactggtggcgctgctagtggtggccgttggcgtttgcttcagcgtggccggcgtactgtcgtttcggcaggcgcagaccaccgtcaatccgctgaagcctgaaaccgcatcggcactggtgcgctcgggtatctatcaatactcacgcaacccgatgtacgtcggctttgccctgttgctgctggcctgggcctgctacttggcctcaccaattgccttgtttggggtactggggtttgtgctgtatatgaatcgcttccagatcaggcccgaggagcgtgctctgataactctgttcggcagcgagtattcggcttatcaaacccaggttcgccgctggctttaa

SEQ ID NO: 343649 - DNA, 453 bp, Pseudomonas aeruginosa
atgaaaattggagagctggccaagcttgccgattgccaggttgaaacggttcgctattacgagcgtgaggggctgttgccggctccggctcgcagtgagggcaactaccgcctttacagcagtgagcaccttgagcggcttacgttcatccgtaactgccgaacactggacatgaccctggacgagatcagaagtttgttggcgctgatggatcggccagagggaaactgtgaaggtgtgaatagcttagtggatgagcacattgcgcatgtgcaagcgcgcgtgaccagcctgctggccctgcaacaacagctggttgagttacgacaccgttgcgcctctgagcggggcgtagacgagtgtggaattctccagcgcctgaacaccactggcggagtcagtgcgcttccggatgacgggcacacccatgttgggaaaagccaccgtcattga

SEQ ID NO: 343650 - DNA, 2436 bp, Pseudomonas aeruginosa
atggctggctgctgcggtgacgaatacaaacctgaagcggtttcaaaggatgtctgctgtgacgccaacgaagcaagcaactgctctgccacagtggctacagcggtaaataccgtaaccggctccaggctcagtagcttccgcattgcgcaaatggactgccctaccgagcggacgctgattcaggacaaactgagcaagctcgcaggcatcgataagctcgacttcaacctgatcaatcggattcttggggtatggcacagcttgccgtcgaccgcgcctatcgaagcggcgatctcgtccctgggcatgcaagcagagccgctatctgctgaagggcaagcccgcatcaaaatcgaacagatggactgcccaacggaagaaaagttaatccgcgacaagctgacctcactacccggtatcagtgcgctggagttcaacctgcttcaacgtgtactgacgctcagccactcagcagaagccctgccagtagcactggcagctattcgcgagcttggtttcacgccagtggttgagggttccgcagcagcaaacgaagaagcgcaaggcaccccgcgcaagaaggcctggtggcccttggcgctatcgggggtggccgccgtatcggcggaagtgatccactttgccgagcttgcgccagattgggctgtggctggcatggcgctgctcgccattctgctttgcggcctgacgacctataaaaagggctggatcgcgctgaagaaccgcaacctgaacatcaatgcgctgatgagtatcgcggtgaccggtgcggtgctgattgggcaatggccagaagcggccatggtcatgttcctcttttctgtcgccgagttgatcgaagcgaagtcgctggatcgggctcgcaatgccatccgtggcctgatggatctgacgccagagcgcgccacggtgcagcagattgatggcacatggctggaagttgacgttaaaaccatcgccgtaggcgcattggttagggttcgaccgggcgagcgaatcggcctcgatggcgaggttactgccggcaactccaccatcaaccaagcgccgatcacaggggaaagcttgcctgtagagaaaaccattggcgatccggtttttgctggaaccatcaatgaagccggctccttggaataccgcgtcctggccgccgctgccaacaccacgctggcacgtatcattcacgcggtcgaggaggcgcagggttcacgcgcgccgacccagcgctttgtcgatcaattcgccaaggtatacacccctgtcgtattcctattcgccctggctgtcgccatcgtgccgccactcttcatggccgagccctggtacgactggatctaccgtgccctggtactgctggtggttgcctgcccttgcgccttggtcatctcgacacctgtcaccattgtcagtggtttagctgcggctgcacgcaaaggcatcctgatcaaaggcggcgtttatctggaaactggcggcaagcttggcttcctggccctcgacaagaccggaaccattacccatggcaaacccgtgcaaaccgactacatgccgctggttgaacaggactcagaactcaatcgcacccatgctgccagcctcgccagtcgctctgaccacccggtttcgcaagcgatagccaagcatgccactgagaatggcctgacgttcgctaccgttgagggattcgaagccctgccgggtcgaggtgtacggggcaccattgatggcatggatttccacctgggtaaccaccgtctggtggaagagcttggcctctgctcacccgagctggaggcgacgctggaacgtctcgaacgccaaggcaaaacagtggtggtgttgtgcaatccgcagcgtgccattgccctgttcgcggttgccgataccgtcaaagactccagccgccaggcaatcgaggagcttcatgcgctgggtgtgaagaccacgatgctgaccggcgataacccgcacaccgcagaagccatcgcacagcaagtgggcatcgacgaagcacgcggtaatctcctgccagtcgacaaattgcaggccgttgaagcattgcaggcgcgtggctacgttgttgggatggtcggcgatggcatcaacgatgcgccggcgctggcgaagtccgaaatcgggttcgccatggccgctgccggcacggacacggctatcgaaactgcggatgtagccttgatggatgatgacctgcgcaagatcccggcctttatccgcctgtcccaacagaccgccgtcatcctcaagcagaacatcgtgctggcgttagggatcaaggctctgtttctcgccattactctaacgggacaggcgacgatgtggatggcagtctttgcagacatgggtgtcagtctgctggtggtgttcaacggcctgcgcctgcttaaaaagtag

SEQ ID NO: 343651 - DNA, 363 bp, Pseudomonas aeruginosa
atgaaagcagcattgcaacttgcaattgaacaagcctttcaacaggccgagcacgccatgcagcagaggcgtaataccgaggcctttcaatggctggagcgtgcgcacatcctgactcaacgccagcccttgccgcacgccagatcacactggctgatgctcacgctcggttggcagattggcgattatcgcgaggtggccgggcaaataccgcgcattttcgcggccttgttgttctccagaatctgggtgcccctcggcaatacaggccgctccagagtcagtgctttcaagcccatgccggttcctgaagaactccagaccttgcttgcgagtgacgagcaaaacctatccagccggtga

SEQ ID NO: 343652 - DNA, 459 bp, Pseudomonas aeruginosa
atgcaagtcgatctcgccacccaactgccgtgcccacttgcagaggtgatcgcccaggtgcgcacaccacgcctgctgcgtcaggttgcttcacccttattgagtttcagcccgctggctccggctgagtttcctgatacctggagcgagggcacctactgggtcaagctgaagttattcggcgtacttcccattggccgtcaggcgattgtgattacctacccgcagatggaaaacgctcagaccttcatgcttagagacaacggctatagcccgctgatcaccaagtgggatcacgtcattacggctcaagaagtgagtggcggaacgctttaccgagatcgcgtgactatcgaggccggcatcctcaccccgttcgtgtggctttttgcgcgtcagttttacgcccaccgtcagcgccgctgggcagctttggcggcaaatggctttagctactga

SEQ ID NO: 343653 - DNA, 507 bp, Pseudomonas aeruginosa
atgaaagcaccaaaactcgccgccttcgctttggcggctgcgctttttccggccttaacctttgcgcagcaggactccagcgccaccagccaggctcaacagcagccaatgagcgttgagcaatttgatcaagagatggcgaaggcacaagaaaacctgaagaaaatgcaggagcaaatgagccaaattcagaaagctagcgaccctgcacagcgtcagaaactgatgcaagagcaccaaaccatgatgcagcaaggaatgcacatgatgaacggaatgcgtggtggcggaatgatggggtgctgcggagggggcatgaagggcggtcacatgatgggtgggggtcacatgatgggctgggatcaaatgggcagccactactcccagatgacgcctgagcagatgaagcagcatcaatacatgatggacaggtacatgggtatgcagcagatgatgatggatcagatgatgcagcatcagcagcatatgggcatgccacagcgctga

SEQ ID NO: 343654 - DNA, 225 bp, Pseudomonas aeruginosa
atgatcaacgccggcagcgacatgaccgcgccggtcgcgttctggatgactgagcccatgatgttctggaaaccctgtgtggcaccgttgagctggttctccagggtggtgctcaggttcatgtttccgcacatcaggtcgttgttccagccgaagccgacgccgatcgagtccatctggccggcgctgcccatgctcaccgcactgccgccgccaatgctgtag

SEQ ID NO: 343655 - DNA, 222 bp, Pseudomonas aeruginosa
atggcgccgctggtgaagcccttggacagggcgtgcatcatcgcccaccagagcggcatctgcgcactcttgccggccaggctgctgaaggagctcgaccagccggtgtccgccggtgccggcaaattgtattggcactgctgggcgcgggcctggtcgaactcgatggtgtcgaagctcacgttgacgaccgggatccccgccagggcgaccacgatgtag

SEQ ID NO: 343656 - DNA, 702 bp, Pseudomonas aeruginosa
atggacaagcaaaaaatcctcgccaaggtcgagaagctgatggccctggcgaatgccaagggggccacgccgaacgaggcggaaaccgcattgcgccaggccgcgatcctgaagcgccagttcgacctcagcgatgcggagatctcggcccacacggtggagaccgcgtgcgttcccactcgaaccagacgctctcctgccccatggctgcatgaactggccgggatctgcgccagttccttcggctgcgactacctggcggcatacgcgatgccagcgggctggacgttcaagttcatgggccgaggaatcggccctgagctggccgctcacgcctactctacgctccaccaccaactggtggcggcgcgttcggctcatgtcgcccaacagaagcgctgcaagctgtcgaccaagcgccgtcgcagcaagctcttcgtcgaaggctggcttctcgcagtgcgttcgctggtacgtgactttgtcggcaggccggacgagtcgactcaagcagccatcaaggcctacctcgaactacaccatccggagctgaaactcctggagccggcagcgccgacgaagcccctggcctatgaccaggcttcgctgcacgcaggctgggagcacggcaaaaacactcgcctgcaccgcggcgtcagccggcgagttcagggcgcgctcgagcagggaggttcccgatga

SEQ ID NO: 343657 - DNA, 225 bp, Pseudomonas aeruginosa
atgaagaacaagattgaggatctgcgaaatcacctctttgccaccatcgaagggctgcttgacgaagacaagcccctggatatcgaacgcgcgaaagcggtggctcatgtgggttcggtgatcatcgagtccgccaaggtggaagtgaaagcgctggagatcttcggctccccggacggaagcggaagcaggtttctgcagatcggccaggaggactcgaagtga

SEQ ID NO: 343658 - DNA, 414 bp, Pseudomonas aeruginosa
atgaccaccatcgcgcaggccgggccacggagccctctggacgttcgctatctcaccgcccagggcgtctccacgctgcagaactacggcctggccgcgctgtacacggtgctgacatttgtcgtgcgcctggtgatcctggtcatgacgatcccgttgttcctgatggccgcgttcaccggcctggtggacggcctggtgcgccgggacctgcgcaagttcggcgccggccgggagtccagctacctctaccacaaggcgcgcggcagcatcattccgctagcggtcgtcccttggacgctctacctggcaatccccatcagcatcaaccccttgctcatcctgctgccctgcgccgcgctgctcggcgtagcggtatgcatcacagcatccaccttcaagaaatacctctag

SEQ ID NO: 343659 - DNA, 273 bp, Pseudomonas aeruginosa
atggcaacgcgaaacgtcgtccttcccgatccgctggagcaggatatcaacgagctggtggagaccggccgctatcagaatcgcagcgaagtcatccgggcaggattgcgcctgctgctgcaacaggaagcccagaatagcgccaagctcgaagctctccgcaacgcgacatccagtgggctgatgcaattggagcgcggtgaatacgacgagatcaccagcgacgacctgacccaatacctcgacgagctcggccaccaggcgagccactga

SEQ ID NO: 343660 - DNA, 360 bp, Pseudomonas aeruginosa
atggccaagtaccgaatatcccatgatgctcaggcggacatcatcgacatcttgcgcttcacccaaaaccgattcggcgatgccgcgcgccgacgttaccaggcgctcataggggcggcgctggaagcagttgcgacagacccacaacaggtaggcagcatcagccgtgaagaattgggagctggcctgcgcagcatccacctcgtttactgccgctcgatgcccaacgtcggtaaggttgttcggcccaggcacttcgtcttctaccgggttgcgacagaccaggtgctcgaggtggttcgcgtgcttcacgactcgatggagcttgagcgtcacctggctcgcaaccgattacgttga

SEQ ID NO: 343661 - DNA, 504 bp, Pseudomonas aeruginosa
ttgctcgactcggtgaaccagcaggtcgagcatgcgaaggaaaagcgtgatcgcgacgagaaacaggccaagaagcggcgtgagctgcgcgggcgcctggccaagcaactggtcgcctcgaactacccgcttccgggaaatacgctcgaagagcggctggaaatcctgcagatcgcgttgatctacaaccgggccaaggtgttcgatcccctgtactccacgcaccagctccactcaaaactcaaacgctggctggagcgtcccaagcagctcatcgggtggcgcagtgaagccgagtatttcgctagtcatgtggggagcctgcgatgtgacttcattagccacctgaccaacgaaatcgcctacgacgatggcagtgaagtcgaggagcgcctgcgcgccatcaagcagaagaccgcacagatcgctctgaccagcgaggagcaggaaacccttcggctctggaaagacgctctgcaatcggctccggagggcctcatatga

SEQ ID NO: 343662 - DNA, 258 bp, Pseudomonas aeruginosa
atgaaggcgtcccagacctatcagtgcatcgtcaagttcgatggtgccggcttctggaccaataccattaagaagcagcgtgcgacctgcagctggagcgacaaggtggcagcctcccgccttgccgaacggctgtttggcgaggacaacgcctacatcacccgtatgccggcgcaggcaggcgaccacgaaaagcgcatcgagagccgctgggagctgtcctgtagcaatcccaaggaggtagcgtgcgatggctga

SEQ ID NO: 343663 - DNA, 219 bp, Pseudomonas aeruginosa
atggagcgcttgctcgagagcatttacatcaatgcccggccggcaatggagttgaggcttagcctcaccagctccggccgcaagagaattgtgaagatggtggatggggaggaggtcgaggttctgccaggtgaagtgcagggcatcctggaggcccaaaagagggatgttggaatcctcgccgatttcttagccaagagtctcttggcgcgacgctag

SEQ ID NO: 343664 - DNA, 729 bp, Pseudomonas aeruginosa
atgttctgcatgggtgccgacggcgagatgttcaatcgcgaaggcacgccctggcctgaagccgacctcaccgtggtggatttcgcgacttacgcgcgcgaaggctacgccgcccagctcgggatcgcctacatctcgctgctgaacaccgtgaacaacatcgccgaacgcgaccagttcaagggccggccaatcgtcaagatcaccgatgaggggcacatcatcaccaagcacccgctgctgctgccctacgccatgaagatcaccaagatgtggcggaaactgggcgcctggttctggctcgccacccagaacatcgacgacatcccagcctccggggcgccgatgctgaacatgatcgagtggtggttgtgcctgaacatgcccccagacgaggtagagaagatctccaggttccgcgagctgtcgccggcgcagaagtcgatgatgctctcggcccgcaaggaaagcggcaagttcaccgagggcgtgctcctggccaagggcaaggagtacctcttccgcgtggttcccccgagtctctacctggccctggccatgaccgaaaacgaagaaaagaaccagcgctacaacatcatgcaagccaccggctgcgacgagctcgaggcggccttgcaggtcgcagcggatctcgacaaggcgcgcggcctgccacccttccccattgttttcccagaccaaccggcagtggagtgccaggacgaatga

SEQ ID NO: 343665 - DNA, 582 bp, Pseudomonas aeruginosa
atggcaacgtctgtaattcgcgccctccagctggccgctctgctggtcctggccaacatcgctcaggccgccgtggatccaccgccggcgtacaagcagatcgccctgcccaaaggggttccggccgaggtgctctactcggtcgcgctgactgagagcaaggtcctgctgcgcggcgaatacgttccctggccctggacattgaacgtcgccgggaaatcgtactactacgcgacccgcaccgccgcctgcaccgcgctactcgcggcgatcaacctctacggggccaagagcgtcgattccggcctcggccaggtcaacatcggctggaacggacatcgtttctccagcccctgcgagtccctggatccgtacaagaacctggacgccacctccgacatcctggtcgagcagcgggacgccttgtatgcctctgcccccgggaaaccggtggactggatccaggtcgccggccgctaccaccgccccgccggcggcgaacctgccgcaaagtaccgtaggacagtatcccgccacctcagccaagtcctcggcgtcaacctgctggtgaccaatccatga

SEQ ID NO: 343666 - DNA, 408 bp, Pseudomonas aeruginosa
atgctcactgcccgcgagttcaaccgcggcaccatgcaaatgctcgatggactgcgtccctacgagcgcctcggcatgcggatccccaatgtacagatcgtcatcaactgcctggaccagaccaatgactcccgggcgattcacgagaatgtgcgtgccatcttcgatgagcatcaggacatttctgtgctcgaaacgactgtcccggatgccgtcgtgtttcgcaacgcagcatcgcgcgggctaccagcgcaccgcctcgaaacgcggcaaccctcgaatcgcacatcagcacccgcgctggaaatcatccgtaacctggccatcgaggtctttcccgagtggactgaccgcttcctcgcgctgacgccggaggcggtagcagcactggtcaagggagggcgctga

SEQ ID NO: 343667 - DNA, 186 bp, Pseudomonas aeruginosa
atgaacgcttcccagcacctggtcacccgcgagtgcatgaattgcggtcagcaccaccctctccacctggtgcgccaaatcctccccgcagagaacaccccggaaggtgaagctgaggtcttggtctgcccctgctgcgggagctacgacttccatcagttggaggctgtccgtgatgaacactga

SEQ ID NO: 343668 - DNA, 243 bp, Pseudomonas aeruginosa
atggcgcaagtcctggctgccgtaccggtcgccggactcgatgccgtgctggtagccgttgagctggtactggagagcggcagcctgagcgccgaacacatcctcaatgtcgtggcacggctgacagcatccgaaccaccacccagcgtcgaaacccacttgtcgctcaaggaagccccggtcgctaacacggcgcgctacgaccgcctgcgtggccaggccgagggggtcggtcatgcgtga

SEQ ID NO: 343669 - DNA, 786 bp, Pseudomonas aeruginosa
atggccttcgccgtcgagctggaggaatgggtcggcgcccactggcaccgcttcatcacccgccatgccagcggcgagttcgaggcggcgcgggtgaccctggagagcatgcggcgtccgctcggcatgctcttccgggcgctcggcggcgcaccgggggtagccctcgaggcgaccccggcgcgccgcctgctgctacgccgcacctggttgcagcgggtcgccgggacctgcgagcaggccccggtgtcctggttcaacggcgacagcctgcgcctgccggaatccctcgcggtctatccgcaggccgagctgaaccgtgaactgtatcgctggctggcgctactggcggccagcgccgggccgctgcggcactgggcccaggacaaccagcgctgggcgcggcagttgctcgatgcctatccggcgctgcgcccgcgctacgcccggctggtcgccgcgcatctgcgccagcgcccgtcgctggacgattgcccggcggcagacgccgaactggaaatcgccctgcgccgcgcgcttgccgagccgggcagcgtcgagcgcttcccgcgagtcgagcgggcgccctggccggtgccgctgtggctgtatcccggcgagcgctggacgccttccgccagcgcggaggacggcgaggaagcggccgccggcgccggcaagcgccaggtcgcccgcagcggagcgcgcaagcgcgccgagcgcgtcgaggagcgcgagagcgagcgcaacctgctgctgttccgcctggaaagcctgctcagttag

SEQ ID NO: 343670 - DNA, 396 bp, Pseudomonas aeruginosa
atgccttattacgatggccgttggcatctatacagcgaaggccagcgtcgagcctttggcgaggcccagcgcgaggcacagagcaaggcgtggcatgcgaaatggatcagcaagtaccggctgaaaaccgaacgcctatggacggataaagcgattaccgagttcttgggcaagcctcgcgatgccggtccgctcaaggcctggacccgcaaggaagtcttaaaggccgagcagggccttggtttcaaggcgtggatgaaggagcggcgagcctggctgatcgctcgtggcaagctgccgccagatccaccgaagaagtcgcgcaagaaggcctatccgctgccagagaacgttattccgttcagccgaattcgcaaagcgagcaaatccggttga

SEQ ID NO: 343671 - DNA, 408 bp, Pseudomonas aeruginosa
atgagacgtagtgaagccccccagctggtcctgacctgtgatttagggacgctatggacaggggaggactggatcgagccctgggaagagggcgcggacggtcgggtgaaagtctaccgcgcccccttggatgcctatcgagacgcgctggccctgaaggtctcggaaaaggcgtacctggatcaatccggcgcgcgggaaatcgttctgtgccgactcgttgcggagtttgacgacccggtgcgactcttcagcactgcgcttacgagcaatcgaccggcacttcggcggcgctggcaagaggccttcaaccaccctctccccgagtcggagctttttcccatatccggccagtccccgacgcaacccgacgcatacgactcgtacgaatcgcctctcctgccctga

SEQ ID NO: 343672 - DNA, 393 bp, Pseudomonas aeruginosa
atgccttgctcgaccgtggctgaattcgtcaggcgtctggatgtcgatgcgcttgttggtcagctgagcgaccaaggcgacatcgatggccacctgcgcccgattgtgcaagccgtgcagcaggctctgccaaccactccggatggggcatcgtcggcgcagtggatctccgcccaggaccgcctgccaactcgggatgacgccgattacgcaggattcattcgcgcggcgctacgccacagccgtgcctggtgcttcgtgaccgtcgaggagttcctgaggcgatacagcctgggcgagtccgaagggctctacactcactggctggcaactccgccgttgccgatcggacgtgagatccaagactcggtcgccctggctcagatgacctga

SEQ ID NO: 343673 - DNA, 138 bp, Pseudomonas aeruginosa
atgtccaaaacccaaaaaatccaccgtttcgcccgccgttatgcgccgtacctcacagcgatcggttttacgatcatgtctccggtctacctcgatcacctgatcacgtattaccggttcctggctcaggtcatctga

SEQ ID NO: 343674 - DNA, 432 bp, Pseudomonas aeruginosa
atgagccctttaagcgaacctttggcgttcacccccgcgtattggccggagcgtgtagccgtcctgaaagcagcactgaaaagcgcaagctccgatatcgatcgtgtcttactggagatagccctggagggcgccgaggacgtgctgcggattgaggtcgagctggccgatcaaccccttgtcggttggacatacaacgacaacgaggtaagtgacctggttgctgctcgttccgcggctcaggccctggccatactgcgagccggtttccctgatcagacgtattatctcgaatatgttgagcaggtggacgaaaattgcttcggcaatcgttcatggtgtttcgaagagagccctgacgaggagttgccctggtcagagttcatccagcgcatcaccctccctcgccatctggccgggacatttttctag

SEQ ID NO: 343675 - DNA, 204 bp, Pseudomonas aeruginosa
atgaactcaaaccctcttcaaggcacaaagatgccccaatatgacggtgttgaaccttccgagattgagcttcagcgcatccagaaatacatcgatgatggtcgcttcgacgaactgagcaatgaacagcaaaagtgggtgactcgccgactgatgccctcactggcccgctacggcgtttatccgccacccacttccaaatag

SEQ ID NO: 343676 - DNA, 240 bp, Pseudomonas aeruginosa
atggacccgatcacaatcaatctcgccatcctggcggcgtcgtacatcctgtccagcgtcctggcgccgaaaccgcagaagcccaagccggcagcattcgatgccgctgacttcccgctatgcgaggaaggggaagaccaagcggtggtgttcggccagtgctggtcgaagtcgtggatggtgctcaccgtggacaatcgtcgcctgaaggccatcaagaccaaggcgagcaagaaatga

SEQ ID NO: 343677 - DNA, 345 bp, Pseudomonas aeruginosa
atgtccaccgtcttcgacgtcgtcgggtcgatgcgcaccgcgttgatgcgtgagctgggcctggtcagcaagcaaccgggctcgcacgcctatagacaggccatggttgagcggccggatatcccgaatcggctgaaccgcgagttcgcggtccagcgtcccaatcaggtgtggtgtggcgacatcatgtacatctgggcgcaaggccgctggcattacctggcggcggtgctggatctgcaggcacggcgggtgatcggctgggcgttctcggccaagccggatgccgagctggtgatcaacgccctggacatggcctacgaacagcgcggcaagccacaatag

SEQ ID NO: 343678 - DNA, 231 bp, Pseudomonas aeruginosa; identical to SEQ ID NO: 330976

SEQ ID NO: 343679 - DNA, 561 bp, Pseudomonas aeruginosa; identical to SEQ ID NO: 333033

SEQ ID NO: 343680 - DNA, 819 bp, Pseudomonas aeruginosa
atgagcggcaacaacgaactgaaccaactgcaacaacagcgccaggatctcattgaggagcgggagcgtctggaggcagacctacctcgcctggaaaacgcccttgagcaagctcccacgggctggcacctgggcaacatggtaggcagcgaagagtcgcaagcggctagcgacgccctatccagcgtcagagctcgcattaactcgattgacttcaaccttcgagagatcgataagagcattgcgtacctcgacagcctggctggcgctgatgaccgaatcgccctggcgatagagcaagagaagactgctgcggtacgcatcgcaagcatcaccgaaagcctggagcgggtgcgcggccatctggagcagatgcggagcaacaccgagcagtcgctccagcaggccaaggacgtcgaggtagcagcagcccaggaaatggccagggccacggcgagcggtgacaagaaggccgccaaggccgcacaggcgaagatagacgcggctagcactgcggctaaggcggcacgagcctcggcagaggccaatgccccactggttgcagctctagaggaggaagccgcgggtctggccgagcaactggccgaggcgcaccaagcagaacaagcggcacaggaggagcacagggacgcgacatgtattcgcctgggtgctgaatgggaccgcgcggctgccgccttggccaagatcggtacccaactcgtggcgcaaggcatgcgagatcaactgagaggcctgaagctgccgacgtttgcacccggcagcctgacgatcaccgttacggatctgtctgcttga

SEQ ID NO: 343681 - DNA, 1041 bp, Pseudomonas aeruginosa
atgccggatggaattaaaacgatccttgagaaccactccaaggttgtcgaggagggcttcgtgcgagagggaagccttcgctacaactcttatgcagttactaccctacggggaggagttgggaaatcgactttaacctttaaccttgcgtacgaaatttcacgcaagcatccacttttaatttctgatctatgcgcccaacggaacttaactgagaacttgatgcgaggggtcgatgcagacgtaaccattcttgatgcattgcagccagctttacttggtgccgcatttggtgacactcctgaggacatctcttatcgagcaagcgcatactgcgactctttcaagggcggaaagaattcatacttcattcccggtaacgcggagctctttgcgttcccgtccacactatatcaacaactccaaatagcgaacgcccagagcaacaagctagcaattagaaatcttcttgaaatcctgaagaagctgcttactaatgaggcaaaagacaagaaagccaccaaaataataatggacaccagccccttctacgcaggaggcacccacttagcttggtgtgcagccgatgccgttattattcctgttcgagtagacgagcactcaatcgactcgctcaatctaacattagatatgctttccaacccaaataaagactttgtaatttggaatcagcgagccggcggattagcctctccgaaagtggcagccattgtaatcacaatggctggagccaaaagccaaaagcggaacactccagatagcgcctccagaatgtatatagaacgagccctatccatagcagaaaaatatccgaagctatttgatcatcaggatctgggcgatgccattgtcattaccgacgatttcatgtcaaccggacgtatcagcggggcaaaaagcataccgattgacagacttaaagttggcagtttccacaacgtggaagggaaaagacttcaagtaaacgcatctgccgaacgctacaaaaaagagctgaagtatttagtcagcgtaatataa

SEQ ID NO: 343682 - DNA, 498 bp, Pseudomonas aeruginosa
atgaagattcgtacggagcaccagaacctcggcgccgcattgatgcagattgctgaggatgacaacttcaccgccatcaacccactgcggctgaagggtgacaagatcaacaacgcattcctaattaataccgatacctgcgtgttcctaaaatatggccaggagccaaagcagaccggcgaatatcagttcacttacaccagggagcaccttgaaagtgtctacggcgctacggagcactacaagaaggtatttgttggcttggtgtgcgttgaggatcaggaggtttgctgccttgacttgggccagttgaacgccatgatcggagcccgtcgggcgtcacatggtgccgatgaggatgcataccaagtgctggttaccgtcccggatggcaagagtcttcgtgcgtacaccaacgcatccggcagaaagggcgtaattgctggaaaagaacatatcgtggcacggaatcgattcccaagctgcctattcgtgtaa

SEQ ID NO: 343683 - DNA, 132 bp, Pseudomonas aeruginosa
atgacttccctcaagaagccctccccgctcgacttcaaaacccattacggcctggccctggacgacgccgacgacgccgacgacgcgatcatcgtcgacctgttcaccggcggcggcggtgccagcagatga

SEQ ID NO: 343684 - DNA, 210 bp, Pseudomonas aeruginosa
atggcgcttttgggcgggctggttattccctatacgtacaacaagcttcacgtgcccgggacttggggcgaagatgaggggctgcaggtgcttggggagttcaaaatgagcttcaagagcggggaatgcgtagccttcgccatcactgtcgccgggactgttgtttggggctatggcgacctgctgtggaacgcaatcgctgcctcctga

SEQ ID NO: 343685 - DNA, 210 bp, Pseudomonas aeruginosa
atggccaacttccaccccaagggcgggcgctgctgcgcctgcgagcgacgcctggacgactgttcgagcatcgacttcagcaccataccggtccatcgccgtgacggccccaacgtgatcgtcatctgcaccgagtttcgacagttcaaccacgacaggtccttacgagtaaaccccaggaggagtcatggctgcccccctgtcgactaa

SEQ ID NO: 343686 - DNA, 768 bp, Pseudomonas aeruginosa
atgaagccgcaaaaaagcccgattccaaagtgggtggatttccactgccatctcgacctttatcctgatcatgagcgcctcatattggagtgtgatcaggcagaggtcgctaccttggccgtgaccacgacaccgaaagcatggcggcgcaatcgtgagcttgcggcatcctctcggcatatccgggtggcattggggttacaccctcaactggtggcagagcgtgaatcggagctaccgctcctggagcgcctccttgaggagagtcgatacgttggagaggtggggcttgatgccgggccccagttctatcgaagctttgaggcccaggagcgggtgttcaaaagagtgctcgaagcttgctcggagcagggcgggaaaattctgaccgtccacagtgttcgaagtgtgggcaaggtgttgacccatatcgaaagcctgcttccgcgcgaccgcggaacagtggtgcttcactggttcaccggctccgccagtgaggctagaaaggctgtggagcttggttgctatttttcgatcaattcgcagatgctgacctcagctaaacatcgcaatctagttgcctcactgcctcctgatcgaatcctcacagagaccgatggcccgttcgtgcagagcgagggaagaccagccaggcctgctacagatattccgaaaactgtacaaactttggcactgcttcgagatcaatcaccagagcaagcagctgcgcagatcatcagtaatttgcgtgatttagtgtcccgttag

SEQ ID NO: 343687 - DNA, 1377 bp, Pseudomonas aeruginosa
atgaggcaccacagcattatctgtcggcttggcgaaacggatgaccaggatctagcgctgctggaaccaggtagtgtcatcaccaacatccagttcctcgacaggtatgggcgactgcagtacgggattggccaagccattgagcaattggctgatttggggctgagcccaggagagactgccgtcgacctggcactgctggcagcgacccttaccgcagcggacaccagaatctcacgagacactgaatcagagaactcctggacgagagagatcgacctctacgtccccgtcgcagatccggcactatggatagcaacttccgacatgctggcctcgacattgaaatttctcacaggtgatcgctggcgccttatcttccgcgagcggcccttggatatcgatgagctgtctcccactccggaaagcttgagaacagatgagtccgatagcgtctgcctgttctctggggggatggacagtttcattggggcgatcgatctactcagtggcggcggcaagccattgcttgtgagccattactgggacaccaacagcaccagcacctatcagaacgactgccgggcagcgctgcaggaacggttttccgagatatcgatcaaccacgtccaggcccgtgtggggttcccacacgacctcgtggagggtggaggtagtgaagatacacttcgagcgcgctcattcctgttcttcgcgctggcggctatggctgcggaagcgatcggcgattcggtcaccatccatgtgcctgaaaatggcctgatctctctgaatgtccccttagacccacgccgcctgggtgcatgtagcacgcgcacgacgcatccatactacatggcgcgggtgaatgagctctttgggcgtttgggcctgagcacgaggttgttcaacatgtttggccacctcacaaagggtcaaatggcagagcagtgctctgaccgtgtgttcctagcgaatcatgtgcatttgacgatgtcatgctcctcgcctgggaaggccagataccatcctgatccctcgaatcgatcacccaagcactgtgggttctgcgttccctgtatcatcaggcgagcagcgattctccgtggatgtggccccgatcagacccgatatgtcatcccagatctgcatgcgcaagcgctggacaccaacaagtctgacggcgaacatgtccgttccttccagctcgccatcgctcgtctcaagcgtgcgcctcaccgagccaagttcgcaattcatgagccggggccgttgatcgatcaccctgaccgtttaggggacttcgaacaggtctatcgaaatgggctgctggaggtcgacgactatctcaagggtgtcacagctatacctctatga

SEQ ID NO: 343688 - DNA, 864 bp, Pseudomonas aeruginosa
atgggtacctccaaaggatatggaggcccgagctccggcttggtgccctcctggattgatgatgtagcacaaccagctgctccggccgcccaaccaaacggaacaggccaatctaatccatctcagtccggctctacgcctcctcagcaaggctctgctccgtcacggccagtaaacaatgacggcactggctcacttcggggggctcgcagcagcttcacccggttcgcccgcactggaagctccagcgatttggggaatgccctgtcttcatatgtgcgtaaaggcgtagggggatcgtcgagaggcgcgcgccgcatgggagcatcccgcgctgctgcggcaaagttgctcagtatcttcggagatgttcagcgcaacggggccgcggaaacactgcggcggttgcagcttaccgtagcgccagggcaaccggcctctcaggtgctgctctcgctacttgagttcatctgcccgcctggcggcgccatcgacgaaggtgttgctcgccaggctgcactgaacacgatcgccgaactggacgaggcgggcggtggtagcttcgaggacatgactcaagttgatcggcagaacttcttccttgacttcgtagcgaattcgattgaaagcatgatcatggcggacttgggcggccggggaatcaccatgccagatgatgtggatgcagttgagcgcatccaatctcagctgagctccttcatcactggctgtacacggggccaacttgccaatcggcttgagcaatggccggctcccacagatcaagaggtcaatcaggtcacctctgcgatttatgaggcagcgttcgatcttatcgcgactgcagcggaggggctggaatga

SEQ ID NO: 343689 - DNA, 1950 bp, Pseudomonas aeruginosa
atgttcctaaatgaccaggaaacggctactgacctgctgtattacgcccccattgccaaaacggtggagcgcctgcttcgcgagtcgcggggagcaccggtcaccatcggcgtgcacggtgactggggggccggtaaatccagtgtcctgaagatgactcagcaactcctcaatgctgataagcgcgtctgctgtatctggttcaacggttggacattcgaaggtttcgaggatgcaaagactgtcgtcatccagacgattgtcgatgaattacgccgcgctcgccctaactctacaaaggtcgctgatgctgcgaaaaaagtgttgcggcgcgttgattggttcaagctagccaagcatgccggagggctagggctcaccgcgttgaccggcattcctagtattgaccagctcaagggggcagtggagtccatttccaccttcgtgcagaacccaggtgaccatctgagcattgaaagcctcacgggccttgcggagaaggccggggggttcatcaaggatgctgaaacagagtcttcgcagcttcccgagcacatgcataagttccgggccgagttcgaagaactcttaacggccgcagacatagaccaactggtagttatcgttgatgaccttgatcgatgcctgcccaagacagccatcgccacgcttgaggccatccgtctcttcctcttcgtaaaccggacggcgttcgtggtcggtgccgatgaggcgatgattgaatacgcggtgcgcgagcactttccagacctgccgcagggtgcggggccggtgacctatgcgcgcaactaccttgaaaaactcattcaagtaccattccgcatcccggcgctggggctggcagagacccggagttacatcacgctgctgcagctggaaagcttcgtcaaaacggatgatgatcgattcaagaagctcttgaatgctgctcaacaggacatgctccgtccctggaagagcaccggtctcgaccgcaaagccgtagctggcgctttcggcagcccacttcccgactttgcccaggaagcattggataccagcgccttgctggcccggatcttgagcgagggtactcggggcaacccccggcagatcaaacgcttccttaactccatgatgctgcgctacgccatcgccgaggctcgcgggtttgctgaggatatccggcgtccaatacttgcgaaaatcatgctggcggagcgttttcacccagacttttacgaacagttggcccggatcgcgagcctggatgcggacggtacggtacctgccatcgccgagctggaaaagcgggccaagaagtccaagggatccgactcagagctgggtgaggggaaaggctctgggaagctcaaggcagtggccaactctagcgatgtgaacgattgggagaagagcgattggatcagcaattgggcggcgatcgatcccgcgctgaccggcattgatctgcgcccctacatcttcgtgactcgagacaaacgcagctccttaatggggcaagttgcagtgagccatcttgaggcgctcgtcgacaaactaatgggcccgccattgcagatccggcaagcggccacgaagaaggacatcgtggcattagctgaaattgatgccgagaatgtttttgatgcactccgcgatcggataatccaagcagatgactattcggatcaacccaaaggcgttgccggcttgatcgaactcgtcaaacagcgccccgcgctgcagaaacgcctaatagagttcgtccgatctctgcccacacccaggcttggcatgtgggctcccgccccatggcatgagtgccttaaggatacaaatgctatccaggggcttgaggggattttgaggggttggagtcagcagatagagaacgagacgcttcaaaaggcagccaagcgcgtacttgaattcagcgggaaatcataa

SEQ ID NO: 343690 - DNA, 411 bp, Pseudomonas aeruginosa
atggcatcagacaagaagaaagccaaaagggccaagcgagccaagctcaaagcaaaggaaatcagggtcgcacgacgtgtaatcaacgataacggctcagagacactggatgctcttgcacggaacatggtgagcttactgaggaagctgggcgaagcagaagagaccagcatggtagaaatgttgaagacactcatgatggagacgagtaagtcagaagtggcttatttggatgatgaaattgattatcagatcgtcgtgttgaaggtttacggcaagcgtactgaagggcgggccgaggattggatggaacagcccgacttcttgcaggcttatgctgaggccgcgcggggggttgggcgccctgaactcattgaagcttggcaggatgcctacgcgttgggggactga

SEQ ID NO: 343691 - DNA, 1284 bp, Pseudomonas aeruginosa
atgagtaaagatctatttgagcagtttcgaaaaaatctagcagtaaagaacgctgatgaaatatccaagagctatcgtaagatcacggaaaagctcaacgaaaagtattacaataatgtctcggacactcaaaactgccggcaagtagggtcttacgggcggcatacggcggtccatggtgtcagtgatttggacatggtctttgtgctaccatggtcggtttacgatcgcttccagcgatatgaaagcaatgggcaatcttcattactgggtgagatccgagctgcactcaaggagcgctttccccaccggacggtgaaagctcagcagcaggtcgtctcggtagacttctccgactacgttgttgaggttctccctgcattcgaacagggtgatggcagctacacttaccccgacgccaacgacggagggaattggagaacctgtaatccggtagccgagattgaggagattaacaatcttaacaaagacaagaaccacaatctaaaacgcctctgcaaaatggtgcgcgcgtggaaaaacgaccatggcgtgccgatgaagggaatgctaatcgatacgctgtgctaccagttcctaaaaaatacatcggactacgacatgaagtcctatgctgcctacggggagatgactcgagatttctttgcctacttagtacaagttgacggagataaggagcagtggagggccccgggtagcggctccatagtcactaagtcgggaaacttccaccccaaagcaaaaaaagcactgagccgtttgcaagatgccttggacgatgcagcggttgcacatgagcggtggagtactgtatttggcgaacatttccctgagtatatagaacaagagaagaagcaagcgatcgccgaaaacagagtcaaaaatacagaagagttcatcagcgagaaattcagcctcgatattcagtacaccctacgcattgactgcaccatcaaaaacgaagaggatcgcttgcgcaacctcatgtctcgggtcatctcctaccgaatccctagacagagagagcttaccttctggatagcagagatcaatgtaccgccgccatacaaaatctactggaaggtcaagaatgttggcccccaggcaatcgagcggaacatgatcagaggcaatatccgcatcgacagtggtcacaaccaaatcactgagcattcaaactttgaaggcgaccactacgttgaatgctatgcggtcaaagagaacgtttgcgtggcccgcggcaggattgtggtgcccatctaa

SEQ ID NO: 343692 - DNA, 621 bp, Pseudomonas aeruginosa
atggatcagcaggtagcacttagtttgatcgctgagaaagcgtatgacgttgggtattccgctaagcttcatttctccacctacgacatcgttgagaaagcaccaggttggatcgggatgatctctttggtaatcggtgttctgtctctctacattgaggctcttgccgccaaacacgtgtcggcagtcatcacggtgatcgggatctgcagtctgtacatagcttactactcagatacgaaagaacagtacttccaagcaggtaacgtgctgaccgaacttcttgataaactgaggatcctgttagttcaatgcaaatcctcaggggagttcactccagagaatgaagcagagatggaccaaatcaccaaggatttcagagcagcctgccagagaaagcatatccttttctccagttggttagcgcacaagaagttcttctgggatcaacagattgactggattgctgagcaccggaaattctcattttttagagacaagattcctttctctgcttatacgacgcttgtgacgattctgcttaccatcgctgtagtgtcatggtgcgacactcacccagatctcctttcagtgctagcagggaaatgcctacatgagtaa

SEQ ID NO: 343693 - DNA, 1557 bp, Pseudomonas aeruginosa
atgcgagataggcagaacaattttaaagcgagtatccgccaaaagcttagagatagggctggaaatatttgctctaacccttcctgttacgcacctactagtggtgcaaaagctggtgaggatggtgcgcttgatatgggggttggagcgcacatctgcgcagcctcccctttaggccctcgctacaatgctgatatgacgccaaaacagcgctcggcttacgaaaatggtatttggctttgtactccttgctcaataaagattgacaaggactttcacgcatacccagaggaactactccgagagtggaagcgcaacgctgaaaaacgtagcaactcaagaattggtattcctgccattccggattccgctcctcaggatttgctagtgacagccctacatggagcgcctcttaagtccggcattgctcaagcaataagcaatgttcacagcgcagtagaaacagtattaagcagtctcgacaatcgattccaaatacagtcctcacacaatcttggccagactacataccgtattgctgcccgcgaacaccagaacattgatcttacagtagaattcaaaaatccacagcgatacgcaaaagactatcaacgccttattgaagagggaaaatctttaacaatcgacaccagcgacataaatttaaaaggctcccccctattcgaaaaaattactgctgaaagcagtaagttacagattggcagcttgtcgaagccctgcacagtaagagtttccaccgttcacgaagagactggacatcttgagacattcaatgacatagaagggaacttctcttatggtaccaaaggaggcacattcacaggtctaaccatggggaagatgttaaaatttgaatttgacattaacttcaaagaactcgacaaattcaatataaaaatcacccctctcaccgacctctggagtaatacccccatcgacagccttccttatttttcaaaaataaagaacctactactcaacataaactctggacacaccctaaatataaccgctgagtaccaaggcgagcagctattttcaggaaaaagccacgcactttcattcaagggacaattcgacaacataaaaatgctctttctatatctagatgcagctagagaaatatctaaaaaaattagctcaacaatacttttcaaagacaaccagcacattcccagcgaagacattgaaaaactaataaaaattgcatccatgatgaatcacaaatacttcaaagaagcaagaaatctttcaaaaccaatacgttttaaactaaaaaaagaaaaagactcaaaaaagcaaatagaaatgcttgaaaaagaagaagaccttcagctacgtatcacccaagaagaaggggacacaatatcaattctaggacaaaaaataaaacttccgcgccaaatcatagagttaaattgcgcccgagttaaaataaccaacaaaaaagaaaacccgaaaaattctatgcttgagtgcgaaatagtaccaaggaaaaatttttctctaaaaatattctacagcaccgaagtatag

SEQ ID NO: 343694 - DNA, 261 bp, Pseudomonas aeruginosa
atgagggtggtgctgatgctggtgatggtcgtgctagtgggatgcgccggctggcaagaagacgagtcgcgcatggtgcgggtggaggtgcctgtggtggtgccgtgtagagtggcggttgtagatgtgcccgcttgggctacaaaagggctaaaggcagatgatgatctacagataaaagttcgagccttgttggccgaaattcgtcagcatcgagggtatgaagccaagatgcttgctgccatcctcgcatgccaataa

SEQ ID NO: 343695 - DNA, 369 bp, Pseudomonas aeruginosa
gtgatctcgacccgtgttgtctcgatcgtgctgggctgcatgctgctgatcggcgtgggagccgccggtggtgtctggctcagcgcgcgtcattaccggccactggtcgataccgcgcgcgcggatctgaccgcctgccgttccgctcgtgggagcttggaggccgcagtagcggagcagggtaggcaggtcgccgcgctgcgactggccggcgaacagcgcgcccgggatgcagcccaggcggtggagcaagcgcggaggcgcgccgacggtgactatgctgcggcacagcgcctactgctagagcgcacggccggcgagcagtgtgtggccgccgaggcggtgatcgatcaggagttgggtctatga

SEQ ID NO: 343696 - DNA, 921 bp, Pseudomonas aeruginosa
atgtacagggggaagcacagttttgaaaactttgctaactgctctgtagaagatttatatgagtcggtgacggtgaacgggcgggtcgtatataaagccgataaagaactgcgtgcgtatcacaggtttttaaataagtttttgttcgaaaggcttccggttgttgatgatgttgtgttttcttatcggaagggggtcaatgctgttgatgctgtcgagaaacatgcaggaagtaagttttactttcaaactgacttaaaggatttttttagcagtctgaataggtctgatgttagacgaaccctggactgggctgtagatgtctgtgttgtttcagatttagatgtttggattgagcgaattctcgagttggttactattggtgattcgttgccaatgggattctcgacctccccagctattagtaatgcatgcctgtattccctggatctgattttaactgcgcattgtctggataatggcgttatatatactcgttacgcagatgaccttattttttcctcgtccagcgagcaggcgcttgcccccctgttcggtgtcgtgtgtcgcaccctgcaatctgagttttttggacggttgggcataaatacagggaagacaaagtatacaaggaagggcgggaaaattaagttgttagggcttaatgttcttccgaatggaagagttactgtggatatgcggtataaaaaagatatagaggtccgtcttttttattacgtaaaagatagggctagatttttgaagatcatgggcgaggcggatgatgaaaaagctatcaagaaattttctgggttaataaattacgtaaatacggttgatcctgcttatcttgataagctgcgtaagaaatatggctcaacaattgttgatatgtttattcataaatcgccgaagctctaa

SEQ ID NO: 343697 - DNA, 1326 bp, Pseudomonas aeruginosa
atgaatcttcaaatagagataaataatattcaacatattggttatgccagccttgattttgacttaaatgcgagtggaattacttgtatagtcgggaagaatggggtaggcaagactactctgattaaggctatcttaaatttgaagtctgccgacacattttccaggactgcttcgcctggaatttttaaggctgatagttcaatgcgctgcacctatgggggcgatgcatatgaattttcttttgattccaatataaatgatctaaatagtcggtcgcctattcctgaagagttgaaggctgcaattgatgttgagttgcctatgccttttggtcagcggtttaataattttcaaaatatcatgagcgcagatatggatataagaactgcgctcatattgggtgagtatgaagttccggaagagttgattaggttcttgaatgatatttatcagtctaataagtttgacgggctggtagaggttgctgcaaagggtgggagttattattgtattcctttggatgatgatcgttatgttcgtgaggatcatctcagttctggggagttcttcttaattagtttgtataggaaaattaaaggtcgtagcaaatttattgtcattgatgagattgatatttcccttgatgctgctgcgcaggctcatctaattgattggctgcggcgcttttgtgcagcagagcaggtaaaggttgttttcactactcactcactagcactaatgaggactttgaaggacggcgaattgttctacatggaggatgttggagggagggttaatattattccatcgtcctataattatataaaaagtgttctttttggatttaaaggctgggatagatatatcttgacagaggatgctatgttgaagtctctgttggaatacattcttactaattattgttctggcctgttctttacttatcagattattcatgtcggtggtgggagtaatgtggttgatctgatgcgccaaaattccaccgaaggatttttctcgacgcccgaaaatgtaatttcggtgctagatggagaccaagcgggatttcggcatgcaagaaggagcaatgtgcattgcattccattcttgagtgttgagaaagcaatttttgcagagtacagggccgggagatttttgccgggggtggcaaatgatcctcgctttgatacgcccaagaatttttgctcggcaataggccgcgatcgacatgcaactgaagcggatataatcaagtatctttgtgatagttatccagcggaagtgcgtgctttcgcgcaaatccttagtaatttccttagttga

SEQ ID NO: 343698 - DNA, 267 bp, Pseudomonas aeruginosa
atgagcacgtctgccgatagagctcggctattgatcaagcagattggccccaagaaagtcagtctccacggaggcgactacgaacgttggaagagcgtcagcaaaggggccattcgggtaagcacggaggaaattgatgtactggtgaagatctatccccagtacgcactgtggcttgctagcggcaacaccgccccggaaatcgggcaaacaagccctgactacgacgatgccgctgccaaattagccaaacccagcgcgggatag

SEQ ID NO: 343699 - DNA, 216 bp, Pseudomonas aeruginosa
gtgagcaaggagaaatggaatctggacctgtgcggcatcgtcaccttcgcggagatgtgcagcgtgtcctacgacgaagcggcccagtgggcggaagacggcactgttccgagcatccagatggggtgcttccgcatgatcaaccttgcgcgcttccgtgatgacttggagcgcggcaaagccaccttcggtgcgggggactgcagcaatgaatag

SEQ ID NO: 343700 - DNA, 666 bp, Pseudomonas aeruginosa; identical to SEQ ID NO: 323670

SEQ ID NO: 343701 - DNA, 1119 bp, Pseudomonas aeruginosa
atggccgaaataacactctccaaaatcgaaattagcaactatcgctcatgcgtatcaacaaaattcgaacccaataaaaatctttctgttctaatcggaaggaatggctcaggaaaaacgaacatcctatccgcaatccaacttctcggtggtctactacacaccagagcctcactatactataaaaatacagaaaacagtgctttcctctctgatagcgaattaaaggcgactttccattacaatggaaacccgattgtctatgaagccaaaataagcattacgaataacgaccgaaatgaagacgaaatcataagctctagagaatcttggtatttacactcaattacgggtagacgaaaaaaaataggggttcccttaaatatccttcatgactacgcgtcatccaggcggaatatgtttgaacctctgaagaattttctagagtctaactatccgcacgctaactcctcagaggtttttcaaacccttttagaaattaaggattttgtaaaatcaattagttactacagcgcatccgtcttcaccaacccatctaattgccctatttcatttgaagtagaaagcgagatgggcgcacgtagaggcatatccatctcaggccacaaaaaatttctatacgacttatatacatcttacaaatcaaaaagctcaagttacgcacaattcattgacatcattggacggaatggtctaaatctcgtcgatgagattaagttccaagaaatagaaacatcttcagccacatataaagttgcaatcggcggacgacttatatcaaaagagaagaaaaacaacattatcattccaaatttccacatttctgaaaattcactttctccaagccaactatctgaaggtacattcagaatcctagcattaatattttacataataaccgacaaaagcaaaataatgctaattgaagaacctgaagtttgcatacatcatgggcttctctctagcatcatccaactcattcaaagcctgagttcagaaaaacaaatcatcgtatccacccactcagaccagttattagaccaactagaactcaacaatgttggcgctgatggaaaattgacccaccctgccgattga

SEQ ID NO: 343702 - DNA, 981 bp, Pseudomonas aeruginosa
atggcattggcaggtagacgcgatggtcgtaattttggttatggaaggcaactgagctacgcaggaccgcaagcgctgaaagacatgttcggcggcggccactacggcacggttaaggcgcacagtgatcggtggcgggcatttgtgaaatggtgccgctccgagcatggccccggtatcaatgatgcgcggcagattgatcgaaaggtgttggccgactatgcggcgcatctgcgcgacatggttaggcgcggtgaccttgctgtcagcaccgcacaaaaccggctatccagcgttaaccggacaatagcagcgcttcgcggtgatcaatacgtgaagttgccaagcccgagcaaggcaatgggtatacagcgcagcgggtttcgtcaattggccccacaaggccaggaccgcgaacaggttaagcaaatcgttgatgcgctttgccgccatgatctgcagcgggccgccgcgatcgttctgttggcgcgagccaccggcatgcgcttgcgtgaggccatcttggctgacctgccacggctgagccgtgaggctaacgaactaggcaggatcaacattcaggatggcaccaaaggcggtcgctccggagcctcggcgccgcgatggattacagtgggcgatcatgttcgcaaggcgcttgagtttgcacggcaggtatcgcctatgggtggccgcaatctgattgcgcgacacgaaagctacctgacatttctgcaagaaatcatccaccctgcgcgggtcatccttcatgcacacaatctcaagggcttccatgagctacgagcggcgtacgcatgtgagcgctacgaacagatcacccaacaccccgcgccaatcaacggcggccaatgttgtcaggtagataggaaccttgatcgtgaggcccgggggcaaatcagctatgagttggggcacggtcggatcgatgtggtcgcggcctacattggaggacgcatatga

SEQ ID NO: 343703 - DNA, 762 bp, Pseudomonas aeruginosa
atgcctaaccctcgcaaccttaattacgttcttggtagtattggtcaatcgctagaatggctctcgaagatatggaaggtgaaagtcccacctctccagtgtcttgtaatcaacaaaaatacaggcctcccaggagaaggtattggttggtttctcgtgaaaaaagaggatttttcagcacttccactccgccagaagcgcgtcattgttgaggcagagcttgcgcacgttttttccttttctcgatggaacgaggttctaaaagcgttatcacttgagccggtggcgtgcgatttttcacctatcttgaaagaggccagtcgggtctacggatctggagagagcgaggatcacaaggcgctcaaagagtacgtagcacgcaatccgcatgtcatcgggctcggctctaacatctcagtgggcgtgacagaatacaggttaccatccggtgacacagttgatgtctcgtttagtagcaaagcagtttggatagctgcggagatcaaatctgccatctcagcagagtctgatattgtaagggggctattccaatgcgttaaatatagagctgttatggatgcagtgctgcttgctgaagtgcaccctcaagtcgcgagagccatccttgtattgggagccaaattccctaaatcacttataccactgagaaatcttctcgccattgaagttattgacggcatcgtaccaccagcaaacaatcaagaatgcaatcctatccacttgaccaatactaaaaagtag

SEQ ID NO: 343704 - DNA, 993 bp, Pseudomonas aeruginosa
atgaagcagttgagcaacagtttgataatcttcgacctccttaaagaaaagttcgaaagggacttgttcttaattgagttttccgtatctctgacaagaaagtacagtagacgatgcaaggatcttgatcaattcaatgaagatcttaaacagtcactattcttaaagcaagtcattgacgtatgcgcgtttctagatgagtttaaagcattcagatcattagctaaagaaaacgaaagggtcaagagtgtgtgcagggcgaccaaaccagcactagaaagaattgaagaactaaaaggattaagagattatagaaatgcacttgctgctcataattttagagtagacagcaacaaagaggaagttattttgttgagcaattacactaagagcccagaccacccaaattctattgcagagctattttttcttagctcgctatgcatcacaattatagaagcggtgcgcacagagttcaacatcgagtcacaacaagcattaaactcatacagactaagcctagaagatgatagcgacaccccgttaagagggatcaaaacaatccgagaagtttatgatgaaattgaaaagtatcgaattaaactgaatttacaaccaaagtttatagagcatgagttcacggaaattaatatggcgctacgcaagctgaactggagtgtaatcccaaaaaatttccaactttcaaaagactataccaataaagcctggagtataattcttggcatatactttggaatgagaggctaccaagacatcaagtactatcaaggcaaaaaagggaattacacaagccattggctagagctttatggttacgctgtagctataaccgatgaattaggatgttttaaaccaaccggcatgcggagagtctataatacaatagataattgggagccctctacagaagaaagcagttcccagcagatgcaatttgtctatggcgaactaatgaaagtaattacgccgtaa

SEQ ID NO: 343705 - DNA, 1050 bp, Pseudomonas aeruginosa
atggtcaccttggattttattgctgcactacaagctagagacatttcgtttacaaatttcagaaatgcacttaaaaaccataaccttccagcatccaccggctgggacccaacggtagaaaagctaaagccaggacttactgggcaagataaagagaagtatgctgtagccattgagagcattcacaatgagctaactagctttggtgataaatgcctgaaggtgtttgaagttgactctgtctatctcaaagctctaattgagagcatgactaaagacttcgtctgcgactctgacttgtctgatcactacccctaccctatgcctagagacgaacttcaagagtataacgggggtgctacctgcgttgcatacatgcagatcggcaatcagcacgacttcattctttgctctaagatacgcgtcaccgaaagggaggaaatgccgggcaccgcgctgggtgatgaagcggtccaagactttggtgcgtttgatgagcttattggaattaggagacggcctgttcaacttttcgacgtcatctccattgatcctgtagctggctatatcgacattcggctagacgggctaaaaaaaatcagtgccgaagatctcaaactcagggtcacagccattgagcgaatcataaatgaattcgcaaaaaaaaccttgggagtcgatagaatcttagccaaccctgtaaatttctatcctgccattgagcggctctacgaggctccagacggtactattggcgagttggggcacgtcactgatgccgcaggcatatataaagaaaaaatgcgacgaaaggatctggacgtaagaaaagatccataccatcatggcgggacagaagccgttaagaacctcaatcccttctccatttccaaacgttggatttcggaacaaggttatggataccctgaagttgcaatcccagcacacttctccgttgcaagcagcgaagaccccgtaattgatatgatttacattttgggctgcacttgcattgaggactataatttcgtgatgatgaaagtcctttaa

SEQ ID NO: 343706 - DNA, 642 bp, Pseudomonas aeruginosa
gtgagcaagacatcaattggcgactacagcctcaacgacctgaaagttttggcaccacacattcccgggataggaaactttataaatcggctattagccgatagctacgaagactttgtcgaggcgttgcgcattgatattgatgaaatcgtctcaaaacttcaagaaaatcccgaactattgtccgaagacggggaagatcgactcacgtctgaaataaaacgaagcctcacacacatgggttacaaggctacgcatgacgaaaaaattggcggacattccgatttggcggtcagaggtcaaaaaaaccatttgtggatcggcgaagcaaaaatacatagttcgtatgactatctctatcagggttttcagcagctaacaacacgctactcaactggagatgttaaccaagaccaaggagggatgctgatatacattaggaaccgcgatgcgaatgcggttgttacaaactggcgacagcatttacgggaaaaatctctagacagctttgaagaaagcgactgtaaacatcgccctaactttgcctttattacaaagcacaaccactctagatcagggaccccgttcacggttcgacatattggagttatccttagtttcgatcctcaagaccgtcgctga

SEQ ID NO: 343707 - DNA, 435 bp, Pseudomonas aeruginosa
atgtaccactacgttgaatgcggattgcccaatgtgtggctccgcaacggcttcgtggtgaaggataccgcttatggtgaagccgttgccatcaaggacgtgaaggggctacacgatgtgataggaaaaatggttgctgaaaagccgaccccgcttagcggtgccgaatttaggttcttgaggaaagagcttggtctttctcaagaccgtttggcagctattgtggggatgactggacaagcagtggctctttgggagaagaacgacaaagtgcctctggtccatgatcgctaccttcgtggcctctaccttgaggcgaagacgggagaagctgatctgatggcttcaatcgacaagatcaatgagcttgatcacgagctttataagctcaacttggaatttgaaggccactggcacagcaaagagtgcgcctaa

SEQ ID NO: 343708 - DNA, 282 bp, Pseudomonas aeruginosa
atgcgagcctatgcccgcgaggacagacgggagtccgaggaggccaatgagatacgctacgttctcaaccactgggagcgtatatgcgttggcataaatcaaggaatttactgcgaaaaaatgctccgcgaagccaattacagcaccgtcatgaaattgtacgaacaggctgagccgtttataagagcaattagagagatagagaaaaagaaaacattctatcaagagcttgagaaacttcactcaaagtgggtcaagaagccgctagccgaaaaaaaatag

SEQ ID NO: 343709 - DNA, 537 bp, Pseudomonas aeruginosa
atgatgcatcgcgtctatcttgcgggtccgatgacgggccttcctgatttcaactaccccgcgttcaacgccgaggagaagcggatccgcgccctcggctatatcgtcgagaacccagcggtcaacatggtctaccgcggatcgccgtgggcggcattcatgcgcgacgggatcaagcggctgatggactgcgacatcctggccctgcttccagggtgggagcggtcccgcggcgcgaacatcgagcgcaacctcgctatcacactcggcatgcacgtcgtcgacgccgaggcgctccctgagcccgacttcgtctgcaagtgccgcgcaatccaattcacctgctgcggcattccgagcgacaacgaccccttcgtgtgccggcgcctggccggaatgccggcgtaccagtcccccgaggatcaactggcaaccgcacggcaggccctcgagcagatcgcagcgctcaccgacgtctctaccggaggcatcgggatggacgtgctcaagatcgccaagcaagccctttcccaatag

SEQ ID NO: 343710 - DNA, 291 bp, Pseudomonas aeruginosa
atgaaacagcatcgttaccgcataaccgtcgaacaccttgtcgatgcccacgatagcctgctgcccaacaggcaaccgctacagttcgaggtaggcaatcacgacaatatctttgcgatcgttgatcgtgtccgtgagcgtgtcgattttgaccccgcctccgcagcagccctcgcagtggggctcaagctgttcagcgaagtgatgctggaaaatagggagcatccgcttttccaggtgttcgctccgcatttccgtgacttcatgaccacgctgaagaaaggcacctga

SEQ ID NO: 343711 - DNA, 1959 bp, Pseudomonas aeruginosa
atgagccagcgcgacgatgaccactttcgcgtccggcctggtgctccgaaacagcgcggcgacgcctacatcaacaaggtgctgcggcaggccaacaagaccggcgcgaagctcggcaaggcggccggcaaggtcgggcagcgccccggttctcggctgggccgcggccacgtcgcggcgcgcttcgccggtcggggacttggggccaacgcccggcgcgtgacgatcaaggcgcggctggtgaatctggcgaaggccgggctgcgttcgaccgccgcgcatctgcgctacatcgagcgcgaaggcgtcgatcgccaaggcgggccgggccatgcctacgggccgacgaccgacgaggcggacaccaaggcgttcgaggagagcgggcgcgaggatcggcaccagttccgtttcatcgtctcgccggaggacgccgaacagctcgacgacctgcgcacctacacccggcacctgatggcgcgcatgcaggccgacttgggtacgcggctggaatgggtcgcggtcgatcactggaacaccgacaacccgcacacgcacgtcgtcttgcgcggcaaggacgacaccggcaaagacctcatcatttcccgcgactacatcgccgagggaatgcgccgcagagcatcggaactagcgacggaatggctcgggccgcgtaccgaactggagatgcagcgcgccatgcagcgcgaagtcgatcaagagcggtggacggggctggatcgcaccttgcaacgcgaggccgtggacggcctggtgcgaccggagacgttggccgaaccccggttgcagcgccagcggcaaatgttgatcggccgcctgcaacgcttgcagcgtatggggctggcgaccgaacagcagcccggcacctgggctgtccacgccgacgccgaaaccacgctgcgggcaatgggcgagcgcggcgacatcatccgcaccatgcaacgggccatgagcggccagcaacgcgagctggccgtgttccaagctggcgaggatggccgcgccatcatgggccgcgtcgccagcaaaggactggtcgatgagctgtacgacaaaggctatttgatcgtcgatggcacggacggcaaagcgcactacgtcgcgctgccgccgcggtcggaactggagcagtacccgaccggcgccgtggtggaagtcaaaggcgcggccgacgtgcgcgcggctgaccgcaatatcgccgcgctggccgtcgatggcgtgtaccgtaccgatcatcacctggccgtggcgctaggacaggcgacgtccgaccgcgacccgcgcgaggtcgtggccgcgcatgtgcgccggctcgaagccctgcgccgcgccggcatcgtggagcgcgaggccgaaggcgtctggcgcgtccccggcgacctggccgagtgtggccgccaatacgacgcgcagcggctcggcggcggcgtggcggtggaactgaaatctcacctgcccatcgagcggcaggcgcgtgtgatcggcgccacctggctcgaccagcagttgatcggcggcggcaaggggctgggcgacctgggctttggggccgaggtgaaggatgcgctacgccaacgcgcggacttcctggccgagcagggcttggccgagcagcgcggacagcgcgtcgtgcttgcgcgcaacctgctggcgacgctgcgcgggcgcgagctggcgaagatcggacaggacatcgccggcgaaaccggcctggagcatcggccagtggccgacgggcagcgcgtcgctggtatctaccggcgtagcgtcatgctcgccagcgggcgctacgccatgctcgatgacggcatgggtttctcgctggtgccgtggaagcccgtgatcgagcagcggctgggccagaagctcgccgccacagtacgcggtggcggcgcatcttgggaagttgggcggcagcacaccctttccgttggttag

SEQ ID NO: 343712 - DNA, 531 bp, Pseudomonas aeruginosa
atgagccacgaaatccgaatctacgttgccgaccttgccgcctataacgcgggctatctgcatggcgtctggattgacgccacacaggacatcgatgacatccaagaccagatcaccgccatgctggcggaatctccagttgatgacgcagaggaatacgccatccacgactatgaaggcttcgatggctaccatctcagcgaatacgcgggcattcattccgcccacgacatcgcctgtttcatcgcggactatccagacttcggcggggctctactcgccaatctccacgaccttgacgaggcccgctgcatggccgaagagcactatgtgggctgccatgcctcactggccgactacgcccaggaactcaccgaacaaacgaccaccatgccccagcacctggcctattacatcgactatcaatccatggcccgtgacatggagctgggcggcgacgtgttcaccctcgaaaccgcccccggcacggtgcatgtcttccttcgatccgtacatgattgtcggatatag

SEQ ID NO: 343713 - DNA, 1203 bp, Pseudomonas aeruginosa
atgaggggagctttcgtctctttaatttcaaccatacttgttagtggatgcgctaatttaaacagcatctatcgaacattcgatgttgctggtggagagggtgccatggtcgatattcgacaaagggcaatattggtagcaccagacgaaaatacaatagagagatacaatgccgagggaaaattagtcgagaaagaatacaaaaataatggggtttttgtgtgtgcagagcctagtccagatgcaatggcctcatttgcttacgaattggcggcaaaaggtggatatccaggtaaggccagtggggagttagcactagctatgcaagatggtgcggcatttacgggggttcgcactcaaagcatccaattactgcgggatttcggatatcggttgtgtgagagctacatgtctggggctataagtgcacctcaatatgatctcctcatgaggcggttccaaaaaaacacagtagctttgttggctattgagcagctcaccggaacaataaaatcgcctccaatagctttgactacaactggaagggctgaggctacaaagtcactttctgagcaacgaactgaaagagagaaagtcaacgatagagtttccgcgctcgaaacagagaaaaaggccctagaaaagaaagtcagtgatgctaagaaagcagatgctaaggctaatacatcagaaatggatcagctagtttctgaccttgccgaaaaaattgcagacttaaaaagtgatcgagatgtgatagataaggctatagctgaaacaaagggtgttcttgctgatggagaaacaagggtaagaatagaaacaactggcatggtaactcaaaggtcagaggcccatcttcaagaaatagcaaagactgtagaaggcattgtaaacaacatcgttcttgcggacgatgaaaagcaattgtgtatgtctgctcttttgctgccgacccctaatgaaggacagaaaaaattctcagactggtgccttaaggtaatggacactcaagctgaggcaaaggactatctaatgaaggacataaagcgcaagactgagcaggcgcaagcgatcttacagagcaatgctagcgcggataaaaaagaagaagcaagaaatgaaataaatgatctcaaggaagaagcaaaagaaatcggtagaggcactggaatatatagcgtagccaaagaaattatgtga

SEQ ID NO: 343714 - DNA, 480 bp, Pseudomonas aeruginosa
atgcccaagcctaaatggcgttcatacgaagaactggcccagcacatcattaaggaattggccgcagaatttggccttgatgatgttgagggcaaacaaacccttcccggggcgtccggaacaaactgggaaattgacgccaaagggatcagaagcggggactctggcgttatcctgatcgagtgcaggtgctatcccaaaagccgcatcaagcaagagcagatggccgcaatcgcgtaccggatcggcgatattggtgccgcaggcggaatcacggtcagtccgcttgaaccgcaggagggagccagaatcctcgcggaacatgagaacatcacacacacggttcttgaccccgagagcacaccagaaaactacttcgtcaaattcctgaacaaggcttttgcaaaagtcaccgagactatcgccatcggcgacttttacgaactggaaatctggaaagacggtaaacgtatcgattga

SEQ ID NO: 343715 - DNA, 249 bp, Pseudomonas aeruginosa
atggcaaccaaaatgtatgcagaggaacatctctaccctgtcggcaaggatggtaaagctgacaagtcacaaaacccaacgacattcgaggtttatgtcagtaactaccacggtgacgatcaaatttatctgaaattggtcgatgacagtggtgaagaaaaatatttccacttgaccaaggcacaagccagcgagctatcggaaggactggatggtgcaaatcattatatcggctatgacaatagttga

SEQ ID NO: 343716 - DNA, 318 bp, Pseudomonas aeruginosa
atgagcaaggaaccgattgagattgtgcgcggtagtggcaacgtgtaccgggatatgggctatgccgattccgatgcgcggcagcttaaagccattctgggcgcagagatcatcaaggtactggacaagcaaggtctgagcgtccggcaggcccaggaacagaccgggttcaacgccgccgatttttcccgtatccgcaaagccaaactcgaccgattcagcattgatcggctcatgggcgttctcaacgccctaggggcgcgtgtggatgtccgtgttcgtgtgaaaccagagacaccgccgagtatgcgcccatga

SEQ ID NO: 343717 - DNA, 246 bp, Pseudomonas aeruginosa
atggccgccgaaggcggcaaggcggacattgccaagccgatggtcggctttggtagtggtgtttttgaactcgccctgccctatcgcggcaatgcctaccgcgttatttacgcggtgcagattggcgaagatatatgggtgcttcatgcgttccagaagaaatcgacctccgggatcaagaccccgaaacatgaggttgatcttgccaggaagcgcttgaagcaactgaaggagatgttgcgatga

SEQ ID NO: 343718 - DNA, 882 bp, Pseudomonas aeruginosa
atgattctcagtcctaagtcactagaaaagttaaggtttctgataaatgaagagactgagtaccgatcaggtccccagcttgtgcgattctttaatgcgctcgggttcagtgacgcctatgggcaaggctttccttctcgctggatgtacactgatgagaggcttgcactaatcaacggttcgcctgaaattgataagtgcattaaaagcgttttgaacccggaaaattttattgataaactttctgagcttgaccagcacattgattcatttaataaatttctagtctttgataaatggaaggttgtccgccagggtgcagatataaccttcaagaaacttggtaaggtagaagttgaggaaccggtcagccagaagggcgtagagacagaggatcaatttcttaagcgagaattctccgacatatcaatcgtgaaaatcggcttggatggttatatctcggaggtgcttggtcagcggattaaagagatagaaaagtgtttttccgcaggagcttatctgtctgtcattctcattgcaggaagcaccttggagggcattttgctcggactggcaactcagtatccgaggcatttcaactctgcaaactcttcgcccaaggatggagccggaaaggtgcggcagtttcatgattggactctcagcgcgtttattgacgtagcatacgagctgaaactggttcagcatgatattcaacgatttagccatacattgcgtgattttcggaattacatacatccatttcagcagatgagttcagggtttaaccctcgtgaacatactgcaaaaatctgtttgcaggttttgaaggcggcaattcatgaaataagtgagaacatttcgaacctcaaggcatcgtga

SEQ ID NO: 343719 - DNA, 210 bp, Pseudomonas aeruginosa
atgctgttcatggtttactcaaaaggggcgctgttctacagatcggagcgccccaacctcattgaggcgttcaccagcggtacgcatctggtctacgaacatccagataatccaatggacaacctcatcagaagcattccgggcattcccccaagagaccgttcattggacttcctgctagaacgcaaatggggaaaaacctcccagtga

SEQ ID NO: 343720 - DNA, 702 bp, Pseudomonas aeruginosa
atggataagttgttgcatgcgattttgcgagaaattaagactggcgttacatcatttgattccagcagcgctggcggtgatattaaaaaattccaagacatagccaaagcagtggtttacgcccatgaccaagggtatgtttctagggttattcctcacatggagtctatgagcgggcagctacgttatgactgcatattagtgagcggcggactgacatatctgggcgagcaaaccctcattgagctctctggccagccgacaccaattgatgaggcgttctctgacattcttaaccgcattccaagctacaacatccgggagaaatgggataaagcccttcatcgccgtataacagaccccagcggcgcaattaccgccgccagaagcctgcttgaggccacgttgaaatggatcattgaacaacggggtggcaagccaaccgaaaacaacaaagaattgtttaatcgggcaattgatgcgcttgggattgagataaagggaaagccgattgagaaaaccactaatggtctcaacacaatcatctggggcataggtgagatgaggaataaccatggcgatgcgcacggagcggcatcaaacagtacgccgccgactgtcagtgaagcgggattttgcgtcaacctggccggagcggcggctttatttctgttggaggagtttgagaacggggaggcttag

SEQ ID NO: 343721 - DNA, 1314 bp, Pseudomonas aeruginosa
atgatcctcaaaggaagccaacgcgggggagccaaacagctcgcccgccacctgctcaataccgcagagaatgagcatgtccatgcgcatgacatccggggattcatagccgatgacctggaatcagcctttcaggaagcctacgcggtcagccgtggcacccgtgcccggcaattcctgttctcgctgagcatgaacccaccgctacaggaaaatgttcccacgcacatctttgagatggctatcgaggccgtggaacaaaagctggggctggacggccagccccgcgcggtagtcttccacgaaaaggaaggccgccgccatgcgcatgttgtctggtcacgtatcgacaccgaacagatgaaggccatcaacctcccgcactacaagctgaagctccgggatttatccaaacagctttatcttgaaaacggctggcagatgccacgggggttcatggacagccgggagcgcgacccgtcgaacttcaccctgaacgaatggcaacaggccaagcgtggcggtcatgaccccaaagctctgaaacggatgtttcaggaatgctgggctattgccgattctcgccagacgttcaccaaggctctgaaagagcgcggttatacgctggcccgtggtgaccgccgcgggcatgtggccgtggactttcgcggtgaggtttacgccatcgccaagtatgtcggtgtccgggccaaggaggtgaaagcccgccttggggatgccgccgacctgatgtcggtagatcaggccaaacaggcccatgcagagcggatgacggtcatgctccgcgagcatatccagatgcttgaagcctttcacaaacggcaagccagcacgctccagcaacgccgcaaagagactgtccagcgccagcgcgaacaacgggcggagctggagaaagcgcacaaggctcgccgggagcacgaggctcagcaacgcgcccggcgtttctccaccgggattcggggcatgtgggattggatgacgggcaagcacgcccgtatccgccgccagaatgagcaagaagccctgctcaactggcaacgggatcgggccgagcgggaacgcctgatcttcaagcaaattgaggatcggcggctactgcacgcggaaatccgccagatgaagcaggagcacacccagcaggttgccgagcttcaccgggacattgcggattaccttgaacgtcccgcctctcactccctggacttgaagaggcatttcgggcgcgggcatagcccggtaaacgataatggccgagagcgtccagaccggggaatggaattgggccgatag

SEQ ID NO: 343722 - DNA, 453 bp, Pseudomonas aeruginosa
atgaatcattttgatgatgtgtcggcccctacgatttccgggtttttcaaggatgcggtcgggcctgatccggccctgagcaagcgtaaaacaccgcctccgttctccctgcgcctgagctgggaggaacgggcgcaattggaagaggaagccagatgtatgcccctcggggcctatatccgggagcggttgtttaacggctcatccccgcctcctcggcggcggaaaaacaggcccgtgaaggatcagcaggctttggccaaggtactgggggagttgggccgttcccagctctccagcaacctgaatcaactggccaaggctacgcataccggggcattgcctgtcgccaaggaaatcgaggcggaattgctgggggcctgcgagaccgtccgggcaatccgtaacgatcttatgagtgccctcggcctgcgcggggaggatgcgccatga

SEQ ID NO: 343723 - DNA, 912 bp, Pseudomonas aeruginosa
atggctaaaaaatacgcacatataaagaatccgttaacagtaatcgctatattcgcaacatttgttgagcttggcggaacagtagttctgcctctattagaaggtgaagtacaggatcaatatgtttggttcttgatgggctttccttctttcttggttttactattctttggtgtgttgtggtttaaacatgaagtgctttatgctcctaaagactatcgcaatgatgatacatttcttcatgcgcgtggaattgcccaggcttcgcaggcttcagttctcgacaaaataatagaagaggttgacgaaacacgcgtgcatacagattgcgaacctgtcgtagactcattgccaggcaagttagagatcagtgtgtcgaacgttccggcctctcaggacgctagcggtggcagcgcgtccggtcaagatgaagagcaggagggactatcgttagaagctatggagcagccacctgagcgtgcgcctgagccgactgacttggttcggtctgttcaagatatatttaagcaagaaaatgatgcacttgatcttctctccagagaaaagaaaactttctttcaaagaaatgttgctcttgaagggggtgcatacatctttagtggtgcgtcaattacgccaaaagaaactctgttggtagaggtttttagaccttggcagatatttaacgggaaaaaggttgggatgatccaagagaccgtcagtcaatattatcataattatcaccttggatctgaccatgttcggtttaagtttattgttttagtagtgggggcggatcgccctgcgttgtttgccaagagcgttgtgcgccttaaagaaatgtttaggggttatggtgtgccgcatgaggtctatgctgtaaatagcattcaaactctcaacaaagtttga

SEQ ID NO: 343724 - DNA, 201 bp, Pseudomonas aeruginosa
atgactgacttccagcagtacttcgacgagtcccatcaactgatccgggattcggtgcgccgtttcgtcgagcgcgaggtgttgccgcacatcgatgaatgggaggaggccgaggaatttccccgtgaactctatctcaaggccggcgcggccgggatcctcggcatcggctacccggaagcctacggcggcagttgctaa

SEQ ID NO: 343725 - DNA, 1545 bp, Pseudomonas aeruginosa
atgagtacccaacccacccctgccgccgcccggcactgcaaggtcgccatcatcggcaccggtttctccgggctggggatggcgatccgtctccgccaggaaggcgaggacgacttcctgatcttcgaaaaggacgccggcgtcggcggcacctggagagtcaacaactaccctggctgcgcctgcgacgtgcaatcccacgtctattccttctccttcgaagcgaacccggagtggacgcggatgttcgcccgccagccggaaatccgcgcctatctggagaagtgctgggaaaaataccgcttgcaggaaaagaccctgctgaacaccgagatcggcaagctggcctgggacgagcggcaaagcctctggcacctgcatgacgcccagggcaaccattacaccgcgaacgccgtggtttccggcatgggcggcctgtccaccccggcctatccacgcctcgatggcctggagaacttccagggcaaggtcttccattcccagcagtgggaccatgactacgacctcaagggcaagcgcgtggcggtgatcggcaccggcgcctcggcgatccagttcgtcccggagatccagccgctggtggccgcgctcgatctctaccagcgcactccgccatggatcctgcccaaacccgaccgggcaatcagcgaaaccgagcgccgccgcttccggcgcttcccgctggtgcagaagctctggcgcggcggcctctacagcctgctcgaagggcgggtgctgggcttcaccttcgccccgcaggtgatgaagctggtgcagcgcctggcgatccgccacatccacaagcagatcaaggatccggaactgcgccgcaaggtcacgccggactacaccatcggctgcaagcgcatcctcatgtcgcacaactactacccggccctggctgccgccaactccacggtgatcaccgaaggcatccgcgccgtcaccgccaacggaatcgtcgacggcaacggccgggaacgcgaggtcgacgcgatcatcttcggtaccggcttcaccgccaacgaccctatcccccgcggagtggtcttcggtcgcgacggccgcgacctgctggacagctggaccaagggcccggaagcctacaagggcactaccaccgccggcttccccaatctgttcttcctgatgggaccgaacaccggcctcggccacaactcgatggtctacatgatcgagtcgcagatcgcctacgtcctcgatgcgctgaagctgatgaagcgccgcgaactgctcagtctcgaggtcaaggccccggtgcaggaacgctacaacgaatacctccagcgcaagctggaccgcagcgtctggagcgtgggcggttgcaagagctggtacctgcatccggtcagcggccgcaactgcaccctgtggccgggattcacctggcgcttccgtgccctgacccggcagttcgacgcctccgcctaccacctcaccacgacaccgctcgccgccctgagcaacgaagcccgccaacaggccgaaggggtacccgcatga

SEQ ID NO: 343726 - DNA, 756 bp, Pseudomonas aeruginosa
atgcttgttcgcttaccaagcgcagctcattatgcaggacaagtggagaaagaacaggagtggttaccgaaactggccccatttttgcctaataagattcctgttcctttaggaatgggtacgccaggcgagaattatccctggaagtggtccatttatcgatggattgaagggaaaacagtcgcttcattcccaggagtcgacctctgtgtgctcgctaaagatttggcaaattttcttacctcgctccaggcggttgactcaaaaggaggacctgttgcaggacctcaaaatttttatcgcggtggttctgttaatgtatacgattcagaaaccagacaggccatcagaatattaagcgatgaaataaattcaaatctggtgacagaaatatgggaagctggcagttcccaaacatggtcaaaagagccagtttgggtccatggtgatataagtgcaggaaatctgataattaataataatcggctggatgcagttattgattttggtcagttatgtatcggagatccttcatgcgacctggttattgcctggacattattcgatgctgaaagtaggcaggtattccatgatactcttttacctgatccgagcacatgggcacgtgctcgttcctgggctctatggaaagcattaatagtgatactaaatgccgctcagacaaatattattgaggcaaaccaagcacatcggacattcgataacattcttgctgaatatgtttcaagccattaa

SEQ ID NO: 343727 - DNA, 414 bp, Pseudomonas aeruginosa
atgccgtcgatcggcctggccgccatctacttcgagcagttggatccctacatcggcgacctaccgctcacgcacgtcgatgacgagtcgcttaccccgtacatcaaggacaagctgaagccgagcaggacatcgaccggcaaggtgaagcctggtgtaaccccaaggacggtgaacatcgccctggagaaggtcatccgcattctcaaccaatgcgcccggaaatggcgtgacgaagagaaacggccctggctggacacggtaccgatgatcagcaagctggacgagaagcgatcgaggcgaacgccctacccgctttcgtgggaagagcaatcgctgctgttctcggaactgccggaccacctgcgccggatggcgctctacaagggcaactgcggctcccgcgagcagtag

SEQ ID NO: 343728 - DNA, 1179 bp, Pseudomonas aeruginosa
atgagcgaaagcggtcaggcagatatgttagcggctattgtgggagggaagtccgaagaagagatggcccggcttgatcgagaaatctcggaaacggcggaacatcacgatttgcagttgcgtgagtatccagttgaggttctggtccagaagtattcggatggactggaaacggatagcgcagagatatttattccagattaccagcgggagtttatttggcttcctaaacagcaaagtcgattcatagagtctttgtttatgaatcttccaattaccccgctatatatgggggagacggaggatgagatgcatccaggggcgtgggaagtcattgatggaagtcagcgactaaggacgctctattattttatgaacgatcgtttgattctctgcgatctaaagaagattaaatctctcaacgggtttaaatatagccagcttcctgtcaagtggcagcgccgaattaaggggaaggtcgttaggattgctgttcttacggtgagattggatgagggggctcgccgtgagatgttcgatcgccttaactctggggggacaaagctgcagccgatggagcagagacgtgggcatagtgatggcccgttcctcaccttaattgaaactttggcaaaggacccagtgtttagggcagtttgtcctctttctgagaagagagctaaactacgagagtatgaggaaatgcttttgcgtttctttgcatacctagataacgcggagggattctctcatgaggtaactccgttccttactgattacctcactgagatgaataaacgtgcgcaagaaagtgaagggttgatagactcctatcgggacgaattcaatcgcatgatcgcatttgttgagcgaaacttccccgatggtttccgtaaagaacctaaccataagactgtaccaagagtccgctttgaggcaattgcagttggagtagcacgagctcttcgcgagaatctagagcttatccccgctacagaggttactacatggctggaaagcaatgagttcaaattgcatacaaggtcggatgcgacaaactccaggccgaaactcttggaccgtctctattacgtacgagatatgttgttggggcgggagcctgagactatgcggaaaaggcctgttgatgatgactggaagaatttggaactattctga

SEQ ID NO: 343729 - DNA, 723 bp, Pseudomonas aeruginosa
atgctcaaggccagggaggtttatgaaactcgtgtggaggaaatcgacatatatttcgattttctattcaaggtcgtagatcggaatgcacaactgtctctctcgctaccctatggagagggggctccaggcgagcgtgagttggtacatataaagtctagtctgattgatactttgaaggctaatggttttctgttgctctataatcttgttgaggcatcagtcaggcaagctttacaggcgattagaaatgatatgcagaagcatgggcaccattttgatgatctccatgatgagttgcagcatcattttgcaaccctaatgaaagatgatgatattcgtggtcggataaagaagcaaagactggatgggcgccctccactggctgtagctataataaatgccggtttcgaagcgaacaaaataggggggaatgtacactacggagagctcgagaaacttgcgaaaaagtttgggttcaatccgggtaaagatccctatctaaaagagtataatttagcgccactcttggaagttaaagatcgtcgtaacgatttggctcatgggagtctggcattcttagcatgtggctccagtgtcactattgatcaaatcttagcgatcaaatgtgctgttgtcgattacctagcttcactccttgataatattgaggcttacctttttaggaagggctacctagccaagcctacggcgccagcctga

SEQ ID NO: 343730 - DNA, 2184 bp, Pseudomonas aeruginosa
atgaacacgaatcttaaggaaaaatcctatcgtgcgaattttactgttgacgctgctcttctcagagagttaggcgagaggcttgtaggtaaaccacacattgctctggcggagttagtcaaaaatagctacgacgctgatgctactgaagtagtgattagatttggtggaggaaaaataactgtcattgataatggtgatggtatgtcgccagatgcatttatcaatcattggttgcgtgtgggaaccactcataagcaagatgcgaagctgaccgctaggaagagacaggtcacaggctcaaaaggggttgggcgactctctgttcagtttcttggcgataatgtacggattttgtctcggggtaaggatcaggctaggcagttttctgcttttgttgactgggctgaagcccgagagtctggaaatttagttgaggctggcgctgatgtaactgacaccagtgagttagatttaattgatggaaagtactctcatggtactttggttgagattagtggccttaaaaagaagtggtatattgaagacttacaagatctcgctcgagaactgtggtttctgaagcctcctgaagatttgcttcagatcgataaccctgatgatgttccggatatctttgatgttcgtttggagggagtaacagataaagcgttagaagccttctccggacagatgaatcaagctttaaagaattggattgctactattgatggggagttgaacgacggtaaaggtgagggtgagaatgaagtatctgtaagatttaaaagtggcgagattttcagcgctaaatttaagcccagaaagagatttcttgagaaagccaagtttaagattttggtttttaaactttctggaaagcaagcgggtggcattcaggtaagcgacgcgcgcacttattttaagaaatttggtggtgtgcatatctatgacaacgggttcaggcttcccttctacggtggtgaagaacaagactggttgcagcttgaaatggctcactctcatcgcctgaataagtcagatttacttccaaggaatctacaggttcagagtgggctaaatgaccttcctactaatgggcgtatctttggtgtcgtaaaagtctcaacctcccttgagcgccaaacagcaaaagaggaggatctatctagtggccgttacttaaatgttcaggtgactcgtgatagattaattgacaatgatgcttttgaagagcttcaacattctgttcggtgggcgattgatttttacgcgatgcgctcatatgaaatgcgacagagaaagattgcctcggaaaggttggagattccacatacagaggagaaggtttctgaaatcagagagaatttatttcagatagctttgtccgcaccatccgatattgctttgaagatagatgccgtatcctcaaaatttaaagaacttgagacgttagagcatcagcgtataacggcatttgaggaggagagaattttattagccgcgcttgctacaacaggaatggcggcgatagctatggaacatgagttggccaaagagctgactcttttagaagagattcgtggcgaactgaatggtggcgctaacatcgttaatcagcctaagctaatagagtctttaaatgcctgggcggataggacttcaaatgcccgaaagctattttcccctgtaatgcacgaagcagatcgagagaaacgaaatgagtacaatgctaaaaagacagtttctaaaattgctagcaactcatcggtacttcttcgcgaagttcaaataattaatgacatacctttggacctgaaattgccacttgctacatttgcagcgtggaactctattgttcagaatgttcttatcaatgctgttaatgcaatgctcgattctgatattagaaaaattaaatgctctggcgaacagtatgattctggaggagcgctctatatttctgatacaggggtgggcgttcagcttgatggaagtgacgaattattcaagccttttatacgtcgtcttgaaataccagaggaaaggaaatcgcttgggctgggtggtatggggatgggcttaactatagtaaagatggttgcagactctttgcattgtagggtgtcatttgtgcgccctgattttggatataacacttcgttcaaaattgagtgggactga

SEQ ID NO: 343731 - DNA, 1191 bp, Pseudomonas aeruginosa
atgatgaagattcttatattggatgatgagactaggcgtgccaatgaatggaaggcatctattagtaatttttcaaaggtggaaattgatgtttttgctcctgagcacgtatcggagttgatttcgaagtttcatcaggcacgctttgattcccgtggtggtaaatatattcctgtgacagattatgatcaatatgatttagtgataattgattatgacctgcttgggttgcaaatggatagacctgcggcttgggccacaggtgctgagcttgcatattgcataagaatgatgtccttaataggatatgttgttgtagttaatcagttcggcactaactctttcgatttgactatgtgtagaggtatttcctcatatgccgacaccgatgtaggtagctcacagatagcatcaaaagggctctggtcttctagtggttttgaagggttccgtccttggcactggcctgatctgcttaaggagagtgcacgctttcctattgttaagggttttgttaaagagcacttggatgattcggtgttcgagtctcttggttttgacctttctgattctgatcttccgaattttgttaattatgaagtttcctcttatataggtgctggtcagaggaataatgttacttttagagatcttatttcgagtggcacggggcgaatatttaatgcgcttgagaaggataggccgatatttgaggtgatgcctcctgatcagcttgctgctgtttgtgcctccatattgattcgttggttggagaaagttgttttgccgtcccaagaagtagtttctgatctgcctcatctatgtattcaaatgccttgggtggtggatgaattcaatagcatggggcgttgggcttctctatgctcttttgagcgtgagattgttccgcagattttagagccttatttgtttcaacatgattttttattttcccgcccggttttctgggcggagcgtgcgcgtagagaaatccttgttcctgatgggtttactttcgaggcaacgccgtctattcaattctgtgaggatttatctcgttttatgcctgaaggtgagtgctccagttttcctagtgatgttttagctttcgataagaagcgctggatctgcgatcaagatgcagcagccaaaaatgttaattatgagccgcagtcttatttgctgatgtag

SEQ ID NO: 343732 - DNA, 657 bp, Pseudomonas aeruginosa
atggatgataaacgtgcaggacgtttggcggattttcttgcaaatctgcatgataatggtcggaaaaaaattcaggggaagcaggcccttgcaaagtatcaaggtctgatgcaatcacctgctccaaatcgacactgtgctataaattacacgagggataataaggcgtcgttgcgggatcatctctttaggttttttaaggagccggccggtaatacttctgtggttttggttcatgttgatgataaaagggattgggtgaggtttataagatttgtgagtaaggggggaggagactttaatgccgagactatttctcttacaggtaagggtgtggaaggttttaatggttttggatatagatatgaacacccagaggcggagggggatgaacataattattttcatgttcagcccatctcggaaacttgtctaaatgaaaaaatacctggtctccctgcatggttctcgtttcggttccctactttttatatgagggctgaaaactcttacgagctcagcatatatgctattagctcattatgtagttggaaagagctgcgtacttatcaaacaaccgcacatgatgattgctggctgctaaatcatttgatacgccaaggggcggaagcgagcgctcggagtattgcgaagtaa

SEQ ID NO: 343733 - DNA, 363 bp, Pseudomonas aeruginosa
atgtactggattgaaatctgcaccgacggcagctacgtgatcaatgggcaagaatatccactgctctccgagggtatcgaagagcatgagagctacgatggcgagcgctctggcaacgattgggcaaagagcatcattcctttcgagctcgaaaccgagcatggcgttttcgtctgggaagtggagatcatcgaatatctggggcgagatgtcgccagcctcttaggctaccggatcactgagtacccagaccacgttctcctaaaagacgaggtcatgttccgtatgcaggacggatgggcttacccgaaagagccgacactcgacttgaagcccaaagtgactaaaatgcggctcgtttga

SEQ ID NO: 343734 - DNA, 1509 bp, Pseudomonas aeruginosa; identical to SEQ ID NO: 332096

SEQ ID NO: 343735 - DNA, 648 bp, Pseudomonas aeruginosa
atgatgggcgtcaacgcgaacatttccgagtccctcaccgggaccatcgaagcccctttcccggagttcgaggcgccgccggcgaaccccatggaggtgctgcgcaactggctggaacgcgcccgccgctacggcgtgcgcgagccgcgggccctagccctggccacggtcgacgggcagggccggccgtcgacgcggatcgtggtgatcgccgaactcggcgagcgcggggtggtgttcgccacccacgccgatagccagaagggccgcgaactggcgcagaacccctgggcctcgggggtgctgtactggcgcgagagcagccagcagatcatcctcaacggccgcgccgaacgcctgcccgacgagcgtgccgacgcccagtggctgagccgcccgtaccagacccacccgatgtcgatcgcctcgcggcagagcgaaaccctcgccgacatccacgccctgcgcgccgaagcccggcgcctggcggaaaccgatggcccgctgccgcgcccgccgggctactgcctgttcgaactgtgcctggagtcggtggagttctggggcaacggcaccgagcggctgcacgagcgcctgcgctacgaccgcgacgaaggaggctggaggcaccgctacctgcaaccgtga

SEQ ID NO: 343736 - DNA, 288 bp, Pseudomonas aeruginosa
gtgaactgcttcgccggcgccgggcggcactggcgcagccgcatgttctcgccggcctacggcgtggtcgaggacgccgccaccggctccgccgccgggccgctggcgatccacctggcgcgccaccggcagatcccctacgggcagcagatcgagatcctccagggcgtcgagatcggccggccgtcgcgcatgtacgcccgcgccgagggcgccggcgagcgggtctcggcggtggaagtgtcgggcaacggcgcggccttcgccgaaggccgggcctacctgtga

SEQ ID NO: 343737 - DNA, 291 bp, Pseudomonas aeruginosa
ttgctgctggtcgagcaacgcggcgaggtcctgcaggttgcggcctccttgctgttgctgctggtcgagcagcgcgacgaggtcctgcaggttgcggcttccctgctgttgctgctggtcgagcagcgcggcgaggtcctgcaggttgcggcctccttgctgttgttgctggtcgagcagtgcgacgaggtcctgcaggttgcgacttccctgctgttgttgctggtcgaggacagcggccaggtcctggaggaactgccggcccttctgctgttgttgctggtcgagtag

SEQ ID NO: 343738 - DNA, 708 bp, Pseudomonas aeruginosa
atgctgaaagtcctgatccagaccctgatcctgggggtgttgctgggggcctccgcggcccgtgccgaattgcccgccgactacaaggtggtgctgctgaccgagaacttcccgcccttcaacatggcggtggacgacaagaacttcgcccgcgacgacggcatcgacggcatcagtgccgacatcgtccgggagatgttcaggcgcgccggcatcggctattccctgagcctgcgcttcccctgggaccgcctgtaccggttgaccctggacaagcccggctatgggctgttctccatgacctacacccccgagcgggtgccgcagttcaaatgggtcggcccgctggccgacaccagttgggtgttgctggcgccggccggcagcaagatcgccgtgaagaatctcaaggacgccgcccgctacaagctcggcgcctacaagaacgacgcggtcagccagcacctggaggcccagggcatcccggtgatcaacgccctgcgcgaccaggaaaacgtgaagaagcttaccggcgggcagatcgacctgtgggccaccaccgatccggtcggccgctacctggccaagcaggaaggcgtgtccggcctgcagacggtgctgcgtttcaacgaggccaagctctacctggcgttgaacaaggacactccggacgaggtggtggagcgcctgcaaaaggccctggagtag

SEQ ID NO: 343739 - DNA, 603 bp, Pseudomonas aeruginosa
atgccccccctgggtatcggcggtaatcactccgtcgccgatcgaggccagggtgatctgggcccgttcgcgctcggcatcgagggcgttctccacttcctggcgctgcatcagttgctgccgggtccgcaggaacgccaggaggatgagcacgctggcggtggtcaggttggccaccagcagcagcctgagcaaggcccgcgagccctcgccgagggcgtcgctgaaggccttggccgccggcgtgaccttctcgttgatcgcgtggatctcggtcttccactgttgcacctgctcggcgctggcctgcccggcgccgatgcccgcgcgcatcttgccggcaacgtcgatcagttccatgacgtacttgtcgcccaccagccacagctcgatggcgcgctcgaagtaactgaagtcgtggaagttgcggtacagccagatgatcgcggtaacgtcgtcggcatggttgccgcccttgaggatgccctggcgggccgcctcgatgtccgggtcgggctggtccagggcaaggcgcatctcgcggtcgccgagggggatcgcgatggcctcctcgtagcggcggaagtcttcgtcggcgcgtga

SEQ ID NO: 343740 - DNA, 3285 bp, Pseudomonas aeruginosa
atggaactgatcgacaacatcaaccacctgctcggcgatgatctcaagcagacgctcgaaccaggtgcccgcctgaagatcgcggcctcctgcttttcgatgtacgcgtttgaagcgctcaaagcagagctggaaaaaatcgacgagcttcaattcatctttacctcgccgacgttcaccgccaacgaggttaccgacaagattcgcaaggaacgcaaagaattccacatcccgaaggctgaccgcgaacggagtctgtacgggagtgagttcgagattcagctacgcaacaaactgacccagcgcgcgattgcaaaacagtgcgcggactggatgcggcgtaaggcgacgttcaagtccaatcgcagcaaggcacccatgcagcagtttgcctgcgttcaggcggccgccacagagactgcctacatgccattgcacggctttaccgccgtcgaccttggctaccagcagggcaacgctgtctctaacctcgtcaacaagatggacgagccgacctttacggcgacctacctcagtctgtttaaccagatctggcaggaccccgagaagctggaggatgtgacggcgcagatctgcgaccatattgcgtctgtgtaccaggaaaactcgcccgagagcatctatttcctgatgctctacaacatcttcaatgagttcctggacgacatcaatgaggatgtcctgccgaacgaccgcacgggctaccaagacacgctcatctggaacaagctcttcaactaccagaaagatgcggccactgggatcatcaacaaacttgagacctacagcggctgcatcctggccgacagcgtcggcttgggcaaaaccttcacggccctggcggtcgtcaagtattacgagctgcgtaacaagtcagtcctggtgttatgccccaagaagctggcggacaactggctgaactacaaccgcaacctcaagaccaacatctttgcccgcgaccggttcaactacgacgtgctttgtcataccgacctcagccgcaccagcggcgagtcgtttggcacaccgctgaaccgcatcaactggggcaattacgacctcgtcgtcatcgacgagtcgcacaacttccgcaataacgacgcctacaaggacaaggaaacccgctaccagaagctgatgaacaaggtcatcaaggagggcgtgaaaaccaaggtgctgatgctttcagctaccccggtgaacaaccgcttcaatgacctgcgcaaccaactggcactggcctacgagggcgactccgagaacctcagcaagaagctgcgcaccggcaagtcggtagaggacattttccgaggtgcgcaggccagcttcaatgcatgggcaaagcttccaccggaagagcgcacagcgcgggccatcctggactcgttggacttcgacttctttgaattgctcgacagcgtcaccatcgcacgctcgcgcaagcacatccagaccttctacgacaccaaggacatcggccaattcccagagcgccgcaaacccttgtcgttccacagcccgctcacgcagcgaacggacgtgatgagcttcaacgagatcttcgagcaactgtccctgcttaagctcgctgtgtacgccccgatcagctacatcctgccgagtaggctcaagaagtacgaggagatgtacgacacccaggtcgctggcaaaggcaaactcaagcaagtcgaccgcgaaaagagcctgcaggcgttgatgaccaccaacctgctcaagcgcctagaaagctcgattgagtccttccgattgaccctccagtcgctgcgtgcgaaccacacgaatacgctggccaagatcagcacgttcaatcagaccggcaacgtcgccagcgttgatgacctgaccgaccagttggaaaacctcgacgcggaggacgacgacctgcccaccattgggggcagcgagatcggcggcaaggtcaagatcagcctcgccgatatggacttgccttcttgggagcacgagctaaaggtcgatctggaaatcattgatgccttgctggcgtcgatgaaaaagatcacgcctgacgatgacgccaagctgcagcacctgaaggcactggtgctggagaaaattgcagcaccgatcaatcccggcaataagaaggtgctgatcttcaccgccttcgccgacaccgctgactatctgtatgccaatttggctccggagttgctggccacacagaccctgcacagcgcgaaagtcaccggcaaaggtgcgccgcaatcgaccttgagagacggcacgctcaggaagagctacgactttcaggagctgctcaccctgttctcgccgcgttcgaaggagaaagccatcgtgctgccgaacgaaccggcagagattgatttgctgatcggcactgattgcatctctgaaggccagaacctgcaggactgcgactacctcatcaactacgacatccactggaaccccgtgcgcatcatccagcgtttcggccgtgtggatcgcatcggctcgcccaacagcagtattcagctggttaactactggccagacatctcgctcgacgagtacatcaacctcaaggagcgggttgagagtcggatgatgattgccgacgtcacggccaccggcgatgacaacgtactgagcgcccaagccaacgacgtgtcttatcgcaaggaacaactgcgtcgtctgcaagaagaagtgatcgagctggaagacctgaagactggcgtgtcgatcactgacctcgggctcaatgacttccgcatggacttgctcaactatgtgaaagccaatggcgaattgagcaacgtgccaagcggcatgcatgccgtggtgcctgccaggccggagttgggcctgcgcccgggcgtgatcttcacgctgcgcaaccgcaatccgagcgtcaatgtcagccagcacaaccggctgcacccttactacctcgtctacatcaaccgccagggtgaagtcattcacgaccataccgaggtcaagcgtttgctggatctggtgcgcagttgctgcaaggggcaagcccagcctattccagatgcctgccgcctgttcaacaaggaaacggccgatggccgcaagatgcaggtgtattcggacctgcttggcaagaccatccgctccatgatcgaggtgaaggaagagaaggatctggacagcctgttcagcggcggcaagaccaccgcgctggtcaataccatcgccgggctggacgacttcgaactgatcaccttcctcgtgattcaggaggccggatga

SEQ ID NO: 343741 - DNA, 702 bp, Pseudomonas aeruginosa
atgagtctgcccgcccgattcgagtcgaacgccgcgttcatcaactacccgaagcaggccgcttttggccgcaccctgccaaagaacaagatctacgaacacagcggtgccaacacgaggctgaaggacttgttcgtcgagcaggtggagcagatcgtctggcaatacaagttggcaccagaaacgatcaaccttcccgccaagccgggagtgccagagcttcagattttctcgatccagctcaagacgtcagagctgaatctggacgttttgcgctgcatcgatggcgcggtgcagtttcccatcatcttcgagctgagctttgatggccgaacgcaggtgattgccgcgtacaagcgcccgaacgagtcagacgccagccgttgggtcttgagcgactactttgcaacggcctggttgccgagtgactgtgagcgcgccgccatgcccttggcactcgacttgggcggcttgtatgagcaggcgcttcaccgcctgatccccacgcccgcgcgcccacaagaaagcctcgctgacttggtcgcccgcgttgaacaggttgcagccaagcagcgtgaggttgagaaagccgccagccgacttgccaaagaaaaacaattcaaccgcaaggtagagatcaacgcgcacttgcggcagcttaaaaacgaacttgaagaattgaccgggagggagagtgcatga

SEQ ID NO: 343742 - DNA, 2703 bp, Pseudomonas aeruginosa
atgacgcagagcctgaatgacgaatcgaggaaacacatcgagcaggtcgctggcgaagcgttggcgcaactcgaaagcattgctgaaacggccaagagcaagctgcacgatgggcggacactgggctcggatgcgctggcaagcatcaacacaatgacgtccagctcagctatccaaaggctggatcagatcagtcaggcgaaccgcgaaagttatcaggtgctggtagcagagcctgccatcgcccgcgttgtggtggtcgatgaagagggagaagagaaaacctattacatctgccgcacgacgccggtatcgggctttcccaatttggccagctaccgcgcgccggttggacgcctggcctcactggcaattggcgcagagttcacgcttcccaatggaaccgtcgttgaggttcttgagcgggcccagcttcggcccaatgcgctcgccgatgggtgggactctcgcgacaccgttgttgaagctgagcattttgggccgttcaccatcgagtcgctgcgtgcgctgctgaccgaggttgcgggggaggaagtcaccgaagacattctgggccaattgctggccgaggagaccgtcaaggccaacatcatcgatggcgttcgccgcagcgtcatcaccaagatgggactgcgggatcagcccatcctcgatcaataccaggatgagattttccgtctccctctcgacaagcgcctgttgatcctgggcccgcctggtacaggcaagacaaccaccctgatccgccgcctcggccaaaaactcgacaccgccttcctggaagaaggcgaacagcgtctggttgaaacagtcgcctcagcccaaggcattgcacacgcaaacagctggctgatgttcacacccacggaattgctcaagcaatacctcaaggaggcatttgcgcgtgaaggtgttcccgcctcggatctgcgcatcagaacgtggcaggactatcgacgcgagctggcccgcaacgcattcggcgtcctcagaacggcttctggcggcggtacctttgtcctgaaagacggattagtcagcctgagcgaggcagcactagagcgccccattcaatggtttgacgatttcgacacatggcagcgcaaggcctatgtgcaggagctgcatgatgccgcaacccagctccacgaagccaaaactcccgaagtactgaatctcggcgcacgcctgcaagacatcttgtcgcgggcggccgatggcgcactggcggcaatgtttggctcgctggcggtggagattgccaaagtacaggcactcgtcagcagcctgaaggaaggctccgacggcaagatcaaggcagcgctcaacttgcaactcaaccgcaaccgagcctttctggatgagttggcccgcgtaatagacaacctgcaacaggcgcaagcgactgatgcggacgaccaggacgaccccgacgctgatgaggaggaagacgccacggcaccgcgcacaggccgtgccgccgcgctcaatgcctatatgcaagccgtgcgtgcccaagcccgggcggcagcatcgaagcgcacagtcagcaaagcctcccgcaacggcaaaatcatcgagtggttgggggatcgtggtctgacagaagcggatcgcgccgaggtgggggcaagccttctggtgcaggccagtgcccgccgcttcgtcaacccggtcaagcgctacctcgacggcattccgaagcgctaccgtgccttcaggcgcgaacgccaaccggcaaacacctggtatcgccacgaaggctttgaggcgcgcgacatccacccgctggagttggacatcgtcttgctcgcgatcttgcgcgccgcaggcgatctgatcagtcggcccaatgttcagcgcgacatcgatagtcccgcgtggtcttcgctccagcctatcctgggacattaccgcaaccagatcctggtagatgaagcgacggacttctcgcccatccagcttgcgagcatggcggcgctggcgcatccacgactgcgctcattctttgcctgtggcgacttcaatcaacgcctgactacctggggcgcacgctctgccgacgacttgaagtgggtcttcgccgatttcgacattaaggagatcaccgtctcctaccggcagagcaagcagctaaacgatctggcccgcgccatgatccgcgccgtcggaggaaccgagcaaaacgccagcttgcctgcgcatatggacagtgtgggcgttgcgccagccttgctggaacacgctaccaacgcagaagctattgtcggttggttggcggatcgcattcgcgagattgagcgctttgtcggccagttgccatccactgccatttttgtgaacaccgaggacgacgttgctccggtggccgacgcgctgaacgccgccctggcggagcacaacattcaggtcatcgcctgccgagaaggccaggctgtggggcaggaaagcaacgtgcgcgtgttcgacatccagcacatcaaaggcctggaatttgaggcggtgttctttgtcggcattgaccagctcgccacgctgcacccggagctgttcgacaagtacctgtacgtcggcaccacccgcgcggccacctacttgggtgtgacctgccagggcagcttgccatccgccattgagagtctgcgcacgcacttttgccaggactggcaacaaggcgactga

SEQ ID NO: 343743 - DNA, 1935 bp, Pseudomonas aeruginosa
atggaaaagctaaaattgcattcacccaatctcacgcaggacaacatcgcccgcattcgtgacctgtttccgggctgcgtcaccgaagccaagggcgaggacggcagcgtgaagttggccgtggattttgaccagttgcggcaagagttggccgagtcgattgtggaagggccgcaggaacgctaccacctgaactggccgggaaagcgcgaagccttgctcgcggccaacgcgcccattgccaagacacttcggcccttccggggagagagcgtggacttcgataccaccaagaacctgttcatcgaaggtgacaacctcgatgcactcaagctcttgcaggaaacgtacctcggcaaggtcaagatgatctacatcgatccgccgtacaacactggcaatgacttcatctacgaagacgactttgcggaggaggcggaggcatatcttctccgatccggccagaaggattcgttcggaagcaagcttgttgcgaaccccacatccaacggccgattccactcagactggttgggaatgctctactcgcgactgagactcgccagattgcttctttctgacgatggagttctggtcgcttcgatagacgataacgaagtggcaaacttcaaaaagctccttgatgaagtttttggagaggacaacttcctattccagataactgcgctctgcaatccaaagggtcgatcccaagataagtacgtagccaattgccatgagtacatcctaggctactcaaaagagcctctgcccaagggggcaacgaacattcccaaggacgacagtgagattgagggaaactacaggctcatcgacgagcgcggacgatatagggagcttgagctacgtaacacccatcgcgaatttggtaagcacaacagaaggaacttgtactacccatttttcgtaacctccgacggctgcgtctctctggagcaaacggatcatgccgtagcggtgtatccagactgggatgatggtttcgagggttgctggacgtggggcaccgataaggctcgtcagcagatttcagaagtggtcgccaaaaaggtgaacgggaaatggaagatctatcgcaagaactacgccaaagacgaggacggtgaagcgacaaaacaagtcaagtccatttggacggacaaagagtttcatacagagaagggccaagccacgttcaacgagctattcgagagcaagaccaagctttttcaatcgccaaagtcagtggacacgattcgacaactattgctcatgggttcgaggaaggactccatcgtgatggacttttttgccggatcaggaactacggcccatgcagtgctggcaatgaatgctgaggacgccggccaacggaggttcgtgttggttcaagttcccgaagtgtcagcagaggactctgaggcattcaaggcgggttatagaacaattgcggaactgagcaaagagcgaattcgccgtgcggggaagaagatagccgctggtcttgccaatgcaaagctggatacaggttttcgcgtgctgaaggtcgacacatccaacatggccgacgtgtactacgcgcctgatgcgctggacaaggaaaacctcgacctgtttgtcgacaacatcaagcccgaccgtacacccgaagacctgctattccaagtgatgctggactggggcgtcgatttggccctccccattaccaaacagtcgattcaaggcaaggatgtgttctttgttgatagcaatgcgctggccgcctgcttcgatgcgagcggcagcattgatgaagcctttgtgaaggaactggccaagcagcagccgctgcgtgtggtgttccgcgacgcgggctacaagaacagcgcggtcaagatcaacgtcgagcagattttcaagctcttgtcgcccgccaccgaagtgaaatgcatctaa

SEQ ID NO: 343744 - DNA, 3054 bp, Pseudomonas aeruginosa
atgaaactcaaatttaaaacgcaggcttatcagacagcggcggtgcaagccgtggtcgactgcttcaaagggcaaccgcccgcaacggcagaggccatcagctatcgcatcgatccgggtaaggcgaagaaaggcgtcgaggatctgtttgccgagagcgggttcaagaacgccgacctgaagctgaccgatattgcgctgttggagaacatcacccaggttcagcatcaacagaacttaccccagtcgtccgaactggtgaagaccaaggtcagcagggtcaatctcgatatcgagatggaaaccggcactggcaagacctattgctacatcaagaccatcttcgagctgaacaagcagtatggctggagcaagttcatcatcgtagtgcccagcattgccattcgcgaaggcgtggccaaatcgctggagatcacggccgagcactttctggagacgtaccacaagaaagcgcgcttcttcatctacaactccaagcagctgcaccacctggagagcttttcgtcggacgcgggcatcaacgtgatggtgatcaacgtgcaggcatttgctgcccgtggcgctgacaaccggcgcatttatgacgtgctggacgacttccagtctcgccgaccgattgatgtgatcagtgccaaccgcccgatcctgatcctagacgagccgcaaaaaatggaaggtgcagccacgctgaagtccctggaggaattcaaggcactgatggtgctgcgctactcggccacccacaagaccacgcacaacaagatccaccggctggacgcgctggatgcctacaaccagaagttggtgaagaagattgccgtgcgcggcatctcagtgaaggggctggcgggaaccaatgcctatctgtacctgcagtccatcgaaatttcgagcaaggcgcctgtggcgcgtgttgagttcgagcagaagctgaaaagtggcgaaatcaagcgcgtggtgcgcaagctttccaagggtgacaacctcttctccgacggtttttcaaacgagctggatcagtaccgtgggtttgtggtcgcggacatcaacgccaataccgacaccttgagcttcaccaacggcgttgagctttttgttggcgaagccactggggacgtgaacgaagcgtcgctgcgtcgcatccagattcgggaggcgatcaaggcgcacttcgacaaggagcaggcactgttccagcagggcatcaaggtcttgaccttgttcttcatcgacgaagtggtcaagtaccgcgactactcggctgcggacgagaaaggtgactacgcaaggatctttgaagaggaatacagccagtacctgaacgaggtgctggatctggatgaaacgccgtacatcaagtacctgaagggcatcacggcggaaaagacgcacagcgggtatttctccatcgacaagaagaccaagcgcgacgtggatccgagcattgccaagactggcgaaaacaaaggactgtccgacgatgtggatgcctatgacctgattctgcgaaagaaggagcaacttcttaaattcgaagagccggtacgtttcatcttctcgcactcggccctgcgcgaaggctgggacaaccccaacgtcttcgtgatctgtttcctgaagcaccccgactacaacaacgaggtcacgcgccgacaagaggtcggtcgtggtctgcgcttgtctgtcaatcagctcggtgaccgtgtggatcatccggccatcgtccatgacgtcaacgtgctgaccgtggtggcgagcgaaagcttcaaggagttcgtcactgcgctgcagaaagatatcagcgactccttgtctgcccgccccaaggtggccaacgaagcctacttcaccggcaaggtgctcaagacgcccacaggcaatgtcgaagtcacgccgcaattggccaagcagatctacaagtacctgctcaagaacgactacagcgacgataccgaccgcatcacgggcacataccacgaggccaagaaggaaggcaccctggcaccgctgcccccggaactgcaggctcatgctgaacaggtgtaccaactgatcgacagcgtcttcagcgacagccagatgtttgagatcagcgacgaccgtcgcccgaagaagaatccgctcaacagcaacttcgacaaacaggagttcaaggagctgtggaaccggatcaatcgcaaggcggcttacagcgttgactttgattcagtggagttggtgaagaaggccgttgccgaactggacaagagccttcacgtgacgccgttgcagtacacgattcaaaccggtgaacaagtggagcaagtaacggctgatgcactgaaaagtggagacggcttcaaggttgataaaacaacgatcgagtacaacaagcagtcagttcattctgcagtgaagtacgacctcatcggcaagatcgctgaaggcacgcaactcacgcgacgcactacggcagacatcctgaaaggaattagcgtcgcggtgtttgcacagttccgcaccaatcccgagagcttcatcgccgaagccgtgcgactgatcaacgagcagaaggcaacgatgatcatcgaacacttggcctacgaccctgtcgaggacaagttcgatatcgacatcttcaccgcaggtcagaccaagcaggacttcagcaaggccggtgacaagctcaagcggcacatctacgactacgtgatcactgattctggtatcgagcgcaaattcgtcgagacgctggacacctgcaccgaagtggtcgtgtacgccaagttgccccgtggcttcctgatcccgacgccggtgggtgactacaaccctgactgggcaatttcgttcaaagagggtgccgtcaagcacgtctacttcgtggcggagaccaagggatcaatgtcaacgatgcagctgacgaagatcgaggaaaccaagatcgagtgcgcgcgcaagtttttcgatgaaatcaacaggaagtatgcaccagagaacgtgaagtacgacgtggtgaacagctttgggaaactgatggaattggttaagtga

SEQ ID NO: 343745 - DNA, 495 bp, Pseudomonas aeruginosa
atgctccagagcttcgagctggcgataacgctcatgctccatccgcgtcgaaagtttgatccggacgatcagctgcctatcggattggtggaggacggcatgacctctcaaaccacccaggtcaacaaaccgctcaacgctatctgcgtggatcaccactggttgcagctcgaccttttcctccaaaagtccgccgtcttctgttgcaacccgaactgtttctatccgcgctgggagcatgagctgtttgcgctgagcgatcagggcgaccgctgcacgtctgacaccttcgcggaatccatcaacgcagtcgttcgacttcacgtggcggaagtgcggaatgaccttctctccgttgttggctgcgttcaacggttgctggcagccggggcagatgcatctgcagcgcagtccgttctcgacctcgtaggcccggaagagggccccgtcacgttctccgaatgggattttggtttcgtgcatgtcctttgctaa

SEQ ID NO: 343746 - DNA, 714 bp, Pseudomonas aeruginosa
atgctcaatgataacgatctatccgtaattgctattcagcgaaatccactccgtcattccgataactccaatctgcatctgtactacgacaagactttcgaaggcctgcccgtcatggtcgataagggaccatttatccgggagtacttatctgatctcaaacacaccattgatcttgcgctggcggagtacccaaggatctttgccttcagggttgatcttcggttacctcgatacatcgatctgcctgattacgtcgatacgaatcaggttataagtcggttcttcgagtccttcacgaacaaaattcagtatgatcgtgaaagagcacgtgcacaaagccgctacgctcgtggctgcaaggtccggtatgtatggtcgagagaggatagcgagggtggcaagcagcactatcatctgctgatcctgcttaaccgggatgcttactttaggttagggcgcttggtgtccgagaggacgaatatgattaaccgtattgagcagtcttgggcgggcgctttgagactatcggcggggcaggtgagcggcctggtacacattccaaagaacgctgtgtatcgagtgaatcgtgaagtccgtagggatgaagtcgataacctgggaacactgttcaggcgagccagttatctgtgcaagacggccacgaagtcttatggatatcgccggagagggttcgatactagtagaggatag

SEQ ID NO: 343747 - DNA, 174 bp, Pseudomonas aeruginosa
atgaagctgctgctacgtacctttgttgcagtattcgtgtttgccggcatccttgcaggctgcctggcgacattactgctagtggctctgatggtgcgctttccgccgctgctagtcgcggtggtggctgcgtgctggatctatcgcaagctccaaacccaaacgcagatataa

SEQ ID NO: 343748 - DNA, 1104 bp, Pseudomonas aeruginosa
atgagtgataaaacaagcaaggcatgtgaatggagcagggagggtgtaatcgaagggcttcatgatggttgctacgattactttgaaggtggttacgtctatgtctgtccagaaaggactgtctgtgctcatctggtaagattagagcgcttggtaaaggaggtggtagcacatggtcaggaagtattcaaaataaaaacgaaaggttggaataaatatttagtttacgatgctttagggcgggatattctgagatttatatggcgagaagaatggatgagatatcattatccacttcataggttcagtcctcatgtcgaagcttttttcaggtgctcaatagcctttcggcagaagtactgtgatccaggagtttctggatacccgagcgaagatgtgtgttgcgttgccgaatcattgaacagaatgatcgaggatcttaaaaaattagtatctagtgacaattttaagagcgaaatcagccagcataatcgttcctcaaacaagaatcgcagaagcattgttaagtatataaatgctctctttgattctaagtctaggctgcttgttgttagggtggatctagggtatgaagcaagaaccaaaagaaatggtggggatgttagctatgctcaggcgaaagagcacagagaggaatttttcaaggagctaaaaaagttatttcctaagggggatttggttggttattgctggaagttagagttcggtatttccaagtcttatcattatcatgtgatggtgtttttagatggcgcaaaaagaagagaggatgtttcgttaggaaggttgattggagagatttggcaggaaaatgttacgcttgggaagggtgtgtattttaattgtaactctaaaaaatcagcttacaggtcttgcgggataggaatgataaaccatggtgagcttgagaagcgagaaagccttttaaaggctgcgacatatttaactaagcaagatgtctatatcaagattgctcttgacggtggagggcgatgctttggtcgaggcgaattaccaaaggttggctcaataaggaaaggcaggccacgaaaaagcgctgccaaatctaaggtaacgttgtga

SEQ ID NO: 343749 - DNA, 669 bp, Pseudomonas aeruginosa
atgtcaatttcaaatattgaactctctgagttcctcatcgatgcaaagcaacagaataaacacttgttcagctccaagttccccgaaatggattacgacaaagtaattgtggagcccggggcacgaaaaatcgaaaacgaatgtattgaaactacacaacaggaaatcgattcactgtttcgaacacagcagccatggaacatctgcttagagctaataaaaggatcctacgtcatactgaagcagatcgaaggattcatagaaaaggatctaagggttccagacgatatcatcccatacattgagtacttattaaggctggctggcaccccatattaccacccgctgtaccatgagcttggccagcaaaaattcatagcgtcaaccggcggaaaggcgcgctcacacatttaccacccagcaaaacaggaggcagcaagactctttgaatcatgcaaacctgccaacggctggatgagcatcgcccaagccattgacgaaatagataaaaaattgtacgaattcataagggcgcagaggataccgctgaaacaggcagcacttccggaaaccctgcgaagatggacgaggaaagatacagaacttagatcagctctggagaaaaccttatccaccgaggcccgcacgcgaattggaattttaaaataa

SEQ ID NO: 343750 - DNA, 1137 bp, Pseudomonas aeruginosa
atgacgctcgccgaagccgggcaacgggctaaagagcttgccggaattcacaagtcgggcaccaaggatataaaagaacacctcgaggcagaggaagcctcgcgtattgcagctcgcgacgccgagcttgcaagagctgccgctgaaaaagctgctattgcagaggcaaacgctcgactggcagccaggaaaacagtccaagatttgtttgaccgctgggcaaaggttgaccttatcaatcgcaaagatggcggggatgaggttcgccgcatgttcaaaaaggacgtcctgccatttctgggagagttgcctctggaagatgtgaaaaaagggcacatcactggagtcaccgatgcattgctcgcccgcggcgtcaaccgcatggctaagatgatcttcagtctaatgcgtcagatgtttaggttcgccgtggatcgggacatgattgaccatgatccaactgcaagcatccgcaaagccaagatcggagggaaagacacggagcgggacagagttctcaatgaagatgaaatccgaacattggccaggcttgcccccgaggctggcttgcttccgtcaactgaggccgctatctggatagccctctcgacttgctgtcgcatcggagagctgatgaacgcccgttggaacaacatcgacctaaaagcaggcaggtggctcatacctgctgaagatagcaaaaatggcaaagcccataccgtgacactctcgaaatttgcgaccgcgcagtttgagatagttgaatcactaagcggtgatagcgaatggtgttatcccaatagcacaaacacgggtccagtctgctccaaaacggtgaccaagcaactcggcgacagacagcgacgcccagatataggcattatgagcaatcgcagcgcaaaggcacaggctctattactaccaggtggaaaatggacaccccatgaccttcgtcgtactggtgcaacactgatgacagctctaggcgtattaccagaagtagcagagcggtgccttaaccataccgaagaaaacaaggtcaagcggacatatcaaagacacaactattcgaaagaaatggctcatgcctgggaggtgcttggcgataaaatatcagacctgaaacatatttactag

SEQ ID NO: 343751 - DNA, 1146 bp, Pseudomonas aeruginosa
atgcgtatacaatatagctatcgactcgtcgaaaaagaatttcatgaaccttggcgaatgtctgtagaaaaagcggttgaacccgctctcaagccgctgatcgaaaagcgctccgaagattcggtacgtcttcaaatcgtcctcgaacgcgcgaaaaaaggatctcgcttaacggccagtggccacatgcacttgccgggcaaaaaaatcgtcagcgtcactgcatcgcataacgatctgacgcctctcgcgcacatgctagcgcaggcgttgttccggcaggccaagaagcactttgatcggctgagcgctcaggatcaaatcaagcgtaaggcgcgtcgtgaacgcttgcgcgagctcaaggcgcggatcgacactcaacctgcctctgtcgtccagcaagcacgcgggataatcgagacgctgctgccgaaggttgaggccgttgcgcaacgcgagttggcttatctgcatgccgccggtgatttgcctcgcgattatccgacgctgcacgacgtggtggacgaagcgattgctctggctgaatcggtatggacatccgttccagaagaaaatgccgcttacctcgatcttttgaagcatctttttgccgtcattgatcgcgaagtggcaaacagccggcaatatggcgaggccgtttcgctggatgcgccggtcgaagcggatgcgcaggacatggcggaggccatggtagaggaagagttctacgagttttatcagcctgatgacgcactcagcctggccgacgtcatggctgatagtcggcttcccgacccagcagcaatcgccgaacaggaggaaattggtgacagatcgagcgaattcgcatttgcattcgacctgatgaagggtatgccgcacttgtggcgccgcatttttctgcttatccgtgtggacgggctggatgccagcagcgtctctgaaatcctgctgattcctagtaaggaagatactgtccaaaggtggctcatgcaggccgaagcgttcatcgctgctcatttggaagaggccggagtaagcaaagacgggaacgattggctccaaggcgttgattggtcggcattgtctgtgacccgaagcgcggcagcctcactgtggtccaaggaggcgaaccatgaagaatga

SEQ ID NO: 343752 - DNA, 612 bp, Pseudomonas aeruginosa
atgaatgcaaataccatcgccgattcgaatgcggataaccctgccgatgccgtgtgttcactgacccaaaattggtggttgtttgcgctgcgcggcatattcgcgttgatttttgcagtcctcgcattctggatgccacactcggctttgttcgccatgacgatagtgttcggcgcattttctttggtcaatggtgcgttcaacctggttgcagcggtgcggcaaatgcggcaaaagcagcgctggggctggctgttgttcagcggcatcgtcggcatactcaccggtgtcgttgtggtagttgcccctctggctgccactttggcgttggcctatttcttgtgggtaagcgtggcattctgggcaattttcaccggtatgctggagatatccgccgccgttcgtctgcgccgggaaatcaagggcgagatctggcttgccctcagcgggctgctttccgtgctcctcggtgcgatcatcctatggatgttttttacccgcccgatcgaatcatttctggccgcgggctgggtattgggtttccatgctgcgatcttcggtatgactcttttgcttcttagttggcgtttgcgcaaagcgcgtcagaggtaa

SEQ ID NO: 343753 - DNA, 1662 bp, Pseudomonas aeruginosa
gtggctgacctgacgccgcaggacatggccgccaatctgctggcctcgggcttcgagcgcaacggcccttcggtcgcggccctgagcgaccccatcgccgacacgccgatggtggtgacgctagaccagttgcgcccctacgaccacgacccgcgcgtgacgcgcaacccggcctacgaggacatcaaggcctcgatccgcgaacgcgggctcgatgcgccgcccgcgatcacgcgccggccctgcgaaccgcactacatcatccgcaacggcggcaacacgcgcctggcgatcctgcgcgagctgtggagcgagacgaaagacgaacggttcttccgcatcccctgcctgttccgcccgtggccgcagcgcggcgaagtggtgatgctgaccgggcacctggccgagaacgagttgcgcggcgggctcagcttcatcgagcgggccttgggcgtggagaaggcgcgcgagttctacgagcaggaaatggggcgggacagcggccagccgctgtcgcagagcgagctggcgcggcggcttacggccgatggcttcccgctgccgcagtcgcacatcagccgcatgcaggacgccgtgcactacctgctcccggcgatccccacgctgctgtacggcgggctcggccggcatcaggtggaacggctcgcggtgctgcgcaaggcctgcgaacgcacctgggagcggcgtgccctgaggcgcaacctgtcgatggacttcgctacgctgttccaggacgtgctggcgcagttcgacacgcagcccgacaacttctcaccgcagcgggtgcaggacgagctggtcggccagatggccgagctgctggaagcggactacgacacgctgagcctggaaatcgacgacagcgagagccggcagcgcgcattgaccagcgatcctgcgccgctgcaggcggcaagacctgcggtgccggccgggccaccgcgaccaccgtcaccgccttcgctgccgaccggcccctcggtgcagtcgtcggagcctggccctggccaggctgcgcaggccggttccacgccggccgccagcgacaagggcatgcagcaggatgacgaacgcctgcagggtcacatcgtgtccccggccccgaccaccgaacgcctgcaatccatccagcgcatggtggccgatcagatgggcgacaagctgcccgacttcgaggccgacgcgctgcgcgcgatccctgtgcaggcgggcgggctctaccccatctcggatgtctggtacatcgagcccggcctggatgtgccggatcggctgcgggtgcacatcgcgcagttcgcgcgcgagatcgccgaggaagccgacgttgccgggcaggtcgaacccagcgaaggcggcatgggcttcgtctgcgtggcgcccccggcggtgcgcgcattgcctccgttcgcgtgtgcggtgctgaccttgctgcatgcgctgtgcgccgcgccccgacccgcccccggcttcgatggcgcccggctggccgacgacctggcggccttgctgcatggcggcggcgcatatccgcgcctgagcgatgccgggctggtaaagctgttccggctgctgcgcatggcgcgccggctgctggatctggagaccggcgcggcctccagcaaccccggccacggcgcctga

SEQ ID NO: 343754 - DNA, 561 bp, Pseudomonas aeruginosa
atgtcggcaccgcatccgctcaaccaggccgtcatcgcacaggcgctgcacgacctgcgcaatgggcaactgcggcgctgcaaggcgatgggcttcggcgaggaggagctggacgcgctcaagcaccccgaactcgtgagcatgctggtcaacgccacggtgtcgtggtgttcggtgtcggtgaaccgcgatgtgctgaagcggctgctgagccaagtgcacgacgtggagcgagagatcgcgacggtcgaccgcatgctgcgcctgggcgccagcacggagatggtcagccgcttctacgggcttacgcaccaggaggtggccctgcgccgcgacatcctcggcctgcccaagcgcaaggggcggcatccggtgctggacgaggcgcaggacacggcgctgtggaagcagtggaaggccggcgtcatggagcgcggcatcgcgctggacgatgaggtggcgatgctgacgctgaccatggacctggccgagaccttgaacctgccgatgtcggtgatctggtcggcgatacgcaactggatcgaccaggggctggtgtag

SEQ ID NO: 343755 - DNA, 1251 bp, Pseudomonas aeruginosa
atggcgaccggcggcgcaccccggcgcgatggccccgtggcgctgtcggcactgttcgacgacgcgctgcgggaactggtgccacgggcaccaccgacaccgccagccccgcgcggcgctgctgctgcatcgccggccgcgccggtcagcgacggcttcctctacagcggcaaccggcacgagagcgtgccgcgtgcgctgttcctcgaccggcgcctgacgccgctggagcgcaacgcctggcaggtgttccgcctgcagctccagatcgacggcgtgacggcgttcccgacctacgaccagcttcgcccctacctcgcctcgatgccctgcgcggcgcaggcctcgcacgagaccgtggcgcgcgccttgacgctgctgcggctgacgcgctggctgagcctggtgcgacggcgccgcgacccgaagaccgggcgcatcctgagcaacctctacgtgctgcacgacgaaccgctgacacccttcgaggcgatgcagctcgaccccgactacctcggcctggtcagccaggcgctgacccatgcggcgaaggcggtgcagatcgtcggcatgaacaccctgcgcgagatcgccgaagacccgatgctcaacggccgcacgctgcccacgcggctgcaggtgctggcacagcgcatggcgcgcaacgaatgggcggacgcgagttatccacaagcgcctgtggatcacgaatccgaagaaggccaggacggcctgcttcggaatctcgaaggcccgtcttcggaatccgaagcagggctgaaatccgcgccagacggctcacttcggaatccgaaggaggaccgtactgtacgtatggatcgtataaatcaagtacgtacagtaccgcgcgcgaagtcgttgcagcacctgcgcctgcccgagcgcctgctgcgcttgaaggacgagcagcaaagcggcgcgatggtggccttgcagcaggtggacgagtcgctgcggcaggcggtgttggacgaatgggatgcgcgctgccgcaacagcgcggtacgcaacccggccggctatctgttcggcatcatccagaaggcgatccgcggcgagttcaaggcctgggccggcgaaggcggttcgccatcgacgccgcctgcgccgccgccacggccagccgcaccggcaccgtctgcaccgccaccgcccgcgccgaacggccctgaccgcgaggcagcgcgggcctacctggcgaaactgcgttcaaccctgggcgattcctga

SEQ ID NO: 343756 - DNA, 501 bp, Pseudomonas aeruginosa
atgaaggaatcctacctatcgatattgctgcaaatgagattgatcgtcggcttccttggtgagcgtgctcaatgcgcttggtggccaacggcgttttatgaagcgtcaagcaggctcttcctggagcctgtcttctccaaaacttcccggctcgctcagtaccacggtgtgctggaggcagctagacgattgcacgatgagcatttgagcgtcggcagctaccacctattccgtttgccggaagagatcgaacaagacctgcacgcgatggtgcaagacggtgggggcgaggaactcgccaaccaggttgcacaaagcaaagaggctgcaatggatgcgttgaagcgcttggccgcgacgagcggcacgcctggtgtcggacctacagcagtcggcagcatcaaggatatcgattccactgacaccctgaaggccattgcggcagcctacctgtcggcgttcaagcagaacgccaaaacgtatccgtatctggtgggttga

SEQ ID NO: 343757 - DNA, 1425 bp, Pseudomonas aeruginosa
atgcgggcgcagccgctgtggcgcctgcttgcctcgaacactggacctaccgtcattggcctgcttcaggcccatctttacgagagtgagcgaagtcttcctgcctccatttttcacgaacgcatcgcaagggatctggaagagctgcgcgcccaaggcgaagactttccccaaacggcacaggcgtatgtcgccagctggctcgccgatgggtacctggagcgacgcttcccggctggcgcttcagaagaggaatatgaactctccacggcggccgtcgaagccattcggtttgtctctggcctggcgcaaccgcactcagcagcgaccgaaagccgtctgacgctcgtcatcgaggccttggcacgacttgccgaggacaccgacactgacaaattccgccgcatcgaccggctcatggctgagcaagcccgcatcgacaaggagattgacgccatccagaaggggcagatgcgcgtgctgccccatacaacggcgctcgagcgcacgcgggagatcatcacgctggccgacgatctggccggtgatttccgccgagtccgcgatcagttcgaccagctgaatcgcgatcttcgtgaacgcatcatggacaacgatggcaatcgtggggatgtgctggattcgctgttcgccggaatcgacctgatttcagagagtgacgccggaagaactttctccgctttctggcgattgcttacggacccggagcaagcggccacgcttgatcaggcgcttgatagcgttctgtcgcgggagttcgtggggcagctcgaagccaaggagcgacgattccttctgcggctgacgcgcacccttcttgagcagggcggcatggttcacgaggtgctccagaccttcgcgcgcagtctgaagcacttcgtccagagtcgtgaatacctcgagcaacgccgactcaatcacctgctgaaagacgctcagcgcgcagcactgagcctgaagggtgaagtcagggccactgacaccctccagtacacgctggaactcacgagcagtcggttgcgctccttatctcaatgggtgctgcacgacccatccctgcaagcattgcctgggcagatggcagaaggagacgcgccgcctatcgatctagagtctgtgagcgaactggtcgcacagtccgagatcgacttccgaacactgaaggccaacgtcctggcagtcctggagcaacggtcccaggcatcgattgccgacgtgctggaacagttccccgctgcacaggggctgggcagcgtcatcggcctgctggcgttgggtagtcggtatgggttcaaggccgaccacagtgaaaccgtaggctgggttggaggcgacgatgagcgtcgtagcgcccgaattccaaagatcttctttttgagggagcgggccaatgaactggtctga

SEQ ID NO: 343758 - DNA, 708 bp, Pseudomonas aeruginosa
atgaactggtctgagaacgacgaagcggcaatgccagccgaggcacaagcacccgatgatgctcaggcacctgccaacaccctgttcctgggcgacagcggcgagttggcactggatacccggcgggccctggtgcaactgctggcagggccgtctctcgatggacgtcgacatccaaaactctggccgatcttggtaagagacgaagcggtgatccgtcggcgtcttgccgagctgtttctcgaactggttatcgatagagatatacaggtggctttcacgcgccaggcagataccggcgaccttgaggtacctctcctgctgcgtcgcgcccagctgacgttcattgactccatcctgctgctccaccttcgccagcgattgacccaggccgactcgcagggcgaccgtgccgtggtgtcgacagacgagatcacggagtttctctccctctatgagcgcgccgccaacaccgaccgtgcagggttcgtgaaacgggttcatgcctccatcgagaagatcaagaagcacagcatcctgcagaaaattcgctcaagcgaggatcgcttcgagatttcgccgacgctgaaactcctgttctcggcagaggaaatacaagcgctgacgcagctgtatcagcgcatggcggccggagaaacgccagcgcagctggttcagactgacgccgatgaggaggccgaccaatga

SEQ ID NO: 343759 - DNA, 3375 bp, Pseudomonas aeruginosa
atgatctcggaaccccaaaccgcctccttgtttgcccgcgagcagttccggatgactcgcctgcaggtttacaactggggtactttctccggcctgcacgacgtgccgatcagcgaacgaggcttcctgtttgtgggtcgatccggcgcagggaagtcgacgcttctcgatgcgttttcggcgttgctgacgccacctcgctggatcgacttcaacgcggccgcccgcgaggcggaccgcagtggtcgtgaccgaaacctcgttacctacatacgtggtgcgtgggctgaacagaaggatggggagtcgggagagatcgcaacccgctacctgcgcgcagggacgacctggtctgccttggcgctgacctaccagaatgccttgggtcagtctgtggtgctggttcaggtgttctggctgcggggcaatgcgaatggcagtaccgacgtcaaacgccactaccttgtcatggaacgggcctttgacctacgcgagctggaggactttggccaatccaacttcgacatccggaagctcaagcagtctttccctgaggcattcgcacgcgacgaatttcgcccctattgcgaacggttctgccgtctgctcggcatcgaaagcgaaatggcgctgcgtttgctgcacaaaacccagtcggccaaaaacctcggcgacctcaatacattcctgcgcgacttcatgctcgacaagcccgagaccttcgaggtggcggatcgcttggtcagcgagtttggagaactcaatgcggcccaccaggcggtcgtcacggctcgcgagcaggttcaaacgctcgcgccagcgcgggagcaatatcagcgcagggattcgttgatgctgcagcgcaatggcttggatgagcttcggcttggcgttgatggctatcgggaaacccgacgcattgagctcctcaaggagcacgtggcatccctagaggtgcaggccagcggctcagagggtgaagtcgggcggcgtcaaagcactctggataaccacgccgcaatcttgcgcgatctggagcgacagcaccgtgaggcaggcggtgatcagatcgagcaatgggaggccgagaaatcagggctggaaggccagcgcacagatcgtctgcgcaaacgcggtcaggccgaagaggcatgcaagaagctggagtggagtctcccggattcgcctcaagccttcgcggaacttttgggcaacgcgcggcaggaggtcgaaaactgggagcagcgcagcaacgcgaaccgcgaagaacagttccgcctggccggtgaaaaaagggacgctgaggcagcattttcgcaagcactgaaagaggtgcaggcacttcagcgccagccatcgaacatcccagcagacatgctggaaatgcgccgaaacattgccgctgccatcgggatctctgagtccgcgctgccattcgttggggaactcatcgaggtgaagcccgacgaggccgaatggcagggggccatagagcgcgtactgcacgggtttgcgctctcgctcctggtagacgaacgccagtattcggcattggccaatcacatcaacaccacccaccttgggcagcgcttggtgtattaccggactggccgtccggagacgtggcaggcaaagcctatcggggccaattcgctcgtcctcaagctgaacgtcaaggaagggacgtatgccgactggcttcaggccgaactacggcaacgcttcgattacgcgtgcgtcgactctattcagtccttcaggagcgcagatcgcgccatcacccgtgaaggccaggtcaagcacagcaaaacccggcatgagaaagacgaccgcagaaatgtcggcgaccggcgaaactgggtgctcgggttcgacaaccgcgagaagcttgcgctcttccaaacccaagcgcaggagctggctgacaccatatcgcgcctcggcggggagatcgacaagctttccgaccaggacaagaatcgtgcggcccgagcgatgcagtgccagactctggtgaatctccagtggcaggaaatagatgtgctcccattactggatcgcatctccaccattgaacggcagatccgcgaagcgcgggaaggcaatacagccctactgcaaatcagccaacggatcgacaagcaaaaggacctggttgagcaggctgacaaggatctccgcgaagccaaggtcgcgcaggactcagttctcaagcagatcaaagacagcacgcaaaaactcgaatccctccttcaagatgcttccagagtttcattgaccccccaccagatcaaggggctcggcgaacgattcaccaagcagtcagacgtgatcaggctcgaaagcctcgacaaggtaacaacagctgttgagagaggactcaacacagaaatcagtgagatcaaagatgaaatcgccgattgcgagaaggaaatagaagcacgctttgccgatttcaaacggcaatggccgatggacgcgggcgacatggacacgagccttgccagcgcgccagacttcttcgccaagctggttcggctggagacggatggtctgcccgcctatgagcagcggttctttgagttgctgcagaaccaaagtcaccagaacctggcggcgctttccacctacctgaacgaagcgcgtaaggcgatcctggaacggatggatctggtcaacgacagtcttggccaggtgcccttcaaccagagcaccaatcaacgcacctatctccacatcgacgccagtgaccggcagcttgtcgacgtcaaggagttcaagcaagagatccagcaggcgctgagccatgcatggacggaggatcgagagtttgccgaggcgcggttcctggccttgcgacgacttgttgatcgactcgccagtcaggaccccgagcaaaagcgctggcgcgagactgtgctcgatgttcgacagcacgttgagttcatcgggcgggagatagatgaaagtggtgtcgaggtcgagatctaccgcagcggagcaggcaagtctggtggccaacggcagaagctggccaccacgtgcttggccgcagccctgcgatatcaactgggtggtaacgaccacggcgtgccgatgtatgcccccgtcgtgctggatgaagccttcgacaaggcggataacgagttcaccgcattggcgatgaacatctttaccaatttcggattccagatggtggtcgccacgccgctaaagtcggtcatgacccttgagccattcatcggtggcgcctgctttgtggatatcagcgatcggcgcgtctcaggcgtcctgctcatcgagtacgacggtgatcgtcagcggttgaagctgccagagcacgcacgagaggaggctagcgttgaagcttcctga

SEQ ID NO: 343760 - DNA, 1164 bp, Pseudomonas aeruginosa
ttgaagcttcctgaagatgttcggcagtttctcgcccgtcgctttcaaagcaagcaccgcgagtggttgatcggtgatacgggtgaggatcaatggccgctggaagttccgctcggcataccgacggaacaggctgcgctgaggcaggtcgacggcgttcgtgcttgggtgagcgcatggcaaggttggcaaggagtcggctccttgtcctggtgtgagcgtcggtggaaagcgcttggagtccagcgactgccagagaaactggcgttacgaggccctgaagatgttgccatgtggatcggtgcatccgctcggtgggttcgttccctgtctcggtatcagacgctcactgctcgctggccagtgcttgcgcagcagttgccgagatattttgatgtcctcgctgactacagcgatgccgatttccgtcgactggcagagatgctggattggatcagtcgcaatccgaaatcgaatctctacccacgacaaattccggttgccggtgccgacagcaaatggctggattctagaaagggcatcatctctgacttgattgcaacgctccagggtgacccaacaggagagcgcgacttcttctggcgctgcggcttgagggcacagccgcagttaatgcgcatgcgcgttctagacccggatctaagagcccgttttggcggtcttggcgatatctctgcgccttgtgatgaggtcgcgagaattagtattcgaccaaagaatgtcttcgttgttgagaaccttcaaactggcctggcctttgatgatctgccaggggcggttgtgatcatgcgactgggttacgcggttgacgttttgggacagcttccatggctacaacaggcgcaatgtatctactggggtgacattgatacgcatggctttgccattcttaatcgagccagaacatacatcccaagcctgaagactgtgcttatggacgagtctacgctgatgagtcatcgcgatttatgggtcgaagagaaagaccagcactcttccacagagctcccactactcaccaataccgaacaaaagctctaccagtcgattaaaggaaatgcctgggaccaacaagtccgcctcgaacaggagcggatacgctgggatgtggcgtggaatgccatacaggcaagtattcgatga

SEQ ID NO: 343761 - DNA, 510 bp, Pseudomonas aeruginosa
gtgagtggaaatcgatgggaccagccgggtgtgccccacaagggatggcactgcgttgacgtggtcgacctgagggccgatggcgagtcagcagacgagaccgactacgcgacctgccaaatgtgcggcaacgagaagatccgctacgtccacatcatggagcacccggatctggacgagaatttcgaagtcgggtgcgtctgcgccgagaagatgagcggcgactacgaggggccgaagcggcgtgaggccaagctgcgcaaccgcgccgtccgacgcactcgatggctacagcgcaagtggcgggtctccgccaagggcaacagctttctgaatgtcgacggccataacctcggcgtgcatccgacgaagacaaagcgatggggatatcggatcgacagccgtttcagtgcaaagacctatgcctccaaggacgaggcgaagctggcgctgttcgatgacttctgggcggcgacccaggatgacgagcggttgtgggctagcgactga

SEQ ID NO: 343762 - DNA, 444 bp, Pseudomonas aeruginosa
atgccggcccccgtcttcaaggcttcgccccggctgccgaccatcagcattgcgcccgggctgtgggcagtgctgttcatgtttacccagactgcagcagccgacgtgctcgtcgtcaccgacagccaccatccggttcaggcctctgtcggcgtgcgggtcatcgagctggacctgccggcgcgcatcgaggccaagatcgccacggatctgcccaacgatcctgacaaggcgactactctggtgcgccagcgactgcgcgatggcggcgatgcgctacaacgccgcatcggccatgcctaccaaggtgtcgcggatgcctggggactgggcatcgccaagattcccgccgtggtggtcgatcgacgctacgtggtctatggcgagcccgacgtgtcccgcgccgtcgcgcgcatcaacgcctaccggagcacgcagccatga

SEQ ID NO: 343763 - DNA, 1494 bp, Pseudomonas aeruginosa
atgaagctcctgcatgagtgcctcgtgcgcagtgcgcgcgagtatccgggcaatatcgccgtcgttgaccaggccggctcctgtagctatgccgaactggacgcgcgggccgaggcctatgccggcttgctggttgcgctgggggtggggcgcggagagcggatcctgctctgggcggaaaagtcggtggagttgccggcgctgatgcagggggccttgcgcaagggcgttgtctatgtcccggtggatccgctgggaccggtgtcacggctggaaaagattctcgccgacagcggggcgagcctggttttttccaccgcgagtcgtctggcggatctggacgctctggaacggcgcccgcgtatcgtggtcctggacgatcccgcatgccccctgcactggtctcatgtggagctacccgccagcgcatccgccccggaggaaataggcgaacacgatctggcctacatcctctacacctcgggctctaccggcacgccgaaaggcgttgcgctgagccaccgcaatgccctggccttcgtggagtgggccaatgagcgttttgccttcgaggcacgcgatcggttttccaaccatgctccgttccatttcgacctgtcggtgctcgatctctattgcgccttcagccgtggcgcggcggtttgcctggttccggaaggcatcgccttttccccggcgctgttgacggcgttcctccaggaacagcggatcagcgtctggtattcggtaccttcggtcctgctcatgatgatgcgcgacggcaacctgctgcagtcttgcccggactccctcagagtcgtgctgttcgccggtgagccttttccgatcaaacacctgcgtgtgctccgggaagcgttcccagggctgcgcatggccaacctgttcggtcccaccgagaccaatgtctgcacctgttacgaggttgtcgcggtcgatcctgctcgtctccagccggtgcccatcgggacggctgcttccggcgacgaagtctgggcggaaaaggacgatggccggcgctgcgaggtcggggaggagggcgagctgatcgttcgcggccccaccgtgatgctcggctatttcggccagccggcggttaccgggagctatcgcaccggcgacctcgtcaggcaactggacgatggcaactacgagtatctcggtcgtcgtgacgacatgctcaaggttcgtggctatcgcatcgaacggggcgaggtggaggccgctctgctggcccatccgcgggtacgcgaggctgcggtgatcgtcgccgggggcggcatggacgccgcgctctgggcgttcctggtgccaagcgatggcgaggcagtctcgctcatcgaactcaagcgtcactgcgctgagcgactgccgcgctacatgatcgtcgaccgggcgaagacgctagcggaactgccgcgcaacgctaacggcaaggtcgatcgcttcaagttgaaagccctggtggaggactga

SEQ ID NO: 343764 - DNA, 129 bp, Pseudomonas aeruginosa
atggagacggtggtcccggtagaggcgtgtggactggtcaagcgcttcgccaccctgagagagagtgagataaaccagaagggtaaagcgagaaaattgtgggatatagaggaagggaaagggatttag

SEQ ID NO: 343765 - DNA, 204 bp, Pseudomonas aeruginosa
atgactgatgtcaaagtggcagtcggcaagattgagactcgccttgaaagcatcgagaagcacatggtgacaaaagggcagatggcggtatgggccctttctgccatgctcgttgtaggcgggtcgttcgtaggagctatctggtggatggctcagcaatacctagcgcccatactgtctgaaatcggcagaataacctcctga

SEQ ID NO: 343766 - DNA, 387 bp, Pseudomonas aeruginosa
atgaagcttgatcgtgaccactccaaggatcgcggagagaccgccatcgtcttcaaggaagtcgagcccctttgctgttatcccgacatgcaggacctcttggggcccattcatgtgtccggtgatgctggcgcgtaccagtccgtgctcatgcagatatttgcagcaccaggtcatgtcctcgttttcatcgaaaagatcggccaagtcatcgaagtcaacctgccttgggtacgcgtcggccagccgatcaagaacggctctctgcacagacctatcaattttcattttccgggcctccgatggctttttcgtgtggaagcaaaaagctaccacggatgcgccggactccatcttccgccgatcccgagagtcgctcggggttga

SEQ ID NO: 343767 - DNA, 573 bp, Pseudomonas aeruginosa; identical to SEQ ID NO: 331465

SEQ ID NO: 343768 - DNA, 519 bp, Pseudomonas aeruginosa
gtgctcgacctgccctgcggcgccggacgcttctggccgctgctggcggaaaaggacaaccgggtgatcatcggcgccgacaattccgcggacatgctggcggtcgcctgcgccggccagccggacggtgtagtgaaacgggtacggcccttgcagacttccgctttcgccatcgacctgccggacagctcggtggacaatatcttctgcatgcggctgctccaccacatcggcgaggcggatgatcgacgcgtcctgctccgcgagtttcaccgggtcacgcgggacagcgtgattctttccctctgggtcgatggcaatttcaaggcctggaagcgtaggcgcatggaggcacggcgggtagcgaacggggaacagaccggctaccagaaccgcttcgtgttaccagccgaaacggtcgagcgcgagttccgcgacgccggcttcgtcgtccagaagcatctcgatttcatcccgctgtatcacatgtggcgggtctatatcttgcgaaaggaataa

SEQ ID NO: 343769 - DNA, 864 bp, Pseudomonas aeruginosa
gtgacgcagcataacaacgtcgatgatcacatccggttcaatatggcgatctattccgccagtgtgaaatcgatcagcagaagcggtggccgttcggccaccgccgctgctgcgtatcgcactggcgaagagatccacgacgagcgcaccggccagaccttcgactatcgccgtcgcggcggtgtcgaaagcgtgtcgatgcaccttcccgaaggtgtggcggcgatgactaccgccgagctgtggaacctggccgagggcgccgagaagcggaaggactccaaggtcgcccgcgagctgctggtggccctgccgcacgagctggacacggcccagcgccaagcgctggcggatgccatcgccagcgacctggtggagcgctaccaggtcggcgcccaggtggcggtgcacctgcccgacgccgagggcgacaaccgcaaccaccacgctcacatcctgttcaccactcgccgtctcggcccggacgggttgggggagaagacccgcgagctggacgtgaagcccagcagcagcgtcgaggttgagtggatccgcgccatggtcgaggggcgcaccaatgccgccctggaggcgggcggccacgccgagcgcgtggatcggaggagcctggccgaccagcacgccgccgccctggaggcgggcgaccaggtgaaggcgatggagaccgaccgagcgccgaccatccatgacggcccggcgatcaccgaggcccgccgcgaggccgagcgccgtggcgagccggcgcccgacctggacaagctggcccggagcgacctgcgccgcgaccagcgggagctggcccaggtcagcgccaagatctacgggtgggaggctgccacgtga

SEQ ID NO: 343770 - DNA, 243 bp, Pseudomonas aeruginosa
atgctgctcatcctccagatacggtccggcaacgtcggccaggcagttgagcatgcccgagcggttgccgatcgcataatcgatcgcttgcgtggccagtgtaacaaattcctcgacgtccacacggccgcagtcgatgagcgcttcgatatcagctttatcctgctctgtataccgacccagcttggaaatggccagatccacgccagcggcaacataaacgtgcaggggctgatcgcctga

SEQ ID NO: 343771 - DNA, 165 bp, Pseudomonas aeruginosa
atgcagaggcccaagcgccgtgttgtagttggggtcgaactccacagtgagatcctgatcgccctgctcatagaattcaggctcagccaatacagccactacctcatcacggcgcagaaatttagcagcatgcacctcagcatcaatgtccgcactgccacgtga

SEQ ID NO: 343772 - DNA, 726 bp, Pseudomonas aeruginosa
atgcacaacgcaggcaacaatacgtgggcggtcaccttcttccgaacccgcaacccaatctttccggatgtagccagagccactactgcgaagcttctggacgggatgcttgcccctgagcaagtgcgccctctgatgcattatggggagaccactgcatccccgggatttagcccaatcaagttcatcggggcaaaaaacggcttcggtgtccttgcctacggtaccgcggcgcgagaaacgctcgacgagttggccaacatgattgcgatctgctggtccgcaaagctaggcgtacctgtcatccaggacagcagttcaggttacttcgaggcaactgccctgccctactttgttgatctgacgattcccaggatcgtcatccagaagaaaccacgccaccaggccgcaatccaggccgacatgactggtcatatctcacggctgatcctcagcagcatttccagccaatgtgaattcgccggcttaacccctcccccgcagctgcaaattcagccaatgcactgggagcacagcccaccagcacggctagggcacggcggtgcggctctagccacactgcgcaatttgcagcttcgagccaacataaagctggctggatggtggagcctgggctacatcaccggcaaaggctacggcaacctcaactgtaccgccgcggccgcgagagccctggggaagcaggagacctctgctgatgcgtaa

SEQ ID NO: 343773 - DNA, 795 bp, Pseudomonas aeruginosa
atgcgtaacacgatcatctggcccagtgatctcgccatgcaagcacttggtattcgcccggataagtttcttggtgcagatgcgctgacctggagtacccccccggctccctgtggacggtgcggacgacccattcagcccggcgacccttataagcctgcgaaagcaaccgacaccttctccgacacccgagatcttgccgcccctggcagttcgctttgcggcggatgtgcgattctcggactcaagcctgccatgaaccggttgtcgtacagcgtactgacccgggaaggtgtttaccctatagccaaggacgtacacaaagcctggctgttcctcagcccgccagacccccctttcgttgcggtgatcagcgcatcgaccatggctcatctggtttggcgaacccccgtttcactctcaaaggagagattctttctacgctacggcaatgacctattcaccattcgccccgaaaaaatcaattcggctatcgcctgtgcggaggccctgaagtgccggcgcgaagagaagcaaaaatcgacgggcgaaaaggccaagcgtgccaccgtccgtctctcgccctatctcgcccttgaccgaaatctggtcaaccacaatcacggccagctctcccctgcaactatcgaagacatgaaccaggcagaaagagccattttcttgggcctgacccccggagaggtatgggcgctcagctttttgctgacgtcgaaaccgcccattcccgaacaaccccagcccttgtcgattgatctcaataaaggatcggactga

SEQ ID NO: 343774 - DNA, 651 bp, Pseudomonas aeruginosa
atgagaccattccgcgtgaccatccagctcgccgggccgatgattatcccaaagcacccgattcattttgacggcctcctcgccgccctacacgttcaggcgctggaggaggcgggacacccgtcgccgtgggatgagcaacacaaccttcccttggagcgttacgttacgcagtcgggtgaatgggtattcaaggccagcatgttgctaggtgccttgattatcgagccccatctctacacgattacgagtcgcaccgatgcagcaaaagtaatgggcgacattgagtcaggccttttgaagtgtcgacaggcgagaatcaacactgcaagcggccacttcaagtcagggcttctgaacctccacacgacatgggtcagggagctacgcgcagagggaataggcgaaattcctgcaatcgagatgctgctgcagcgcttagaattcgtcgggcctcgtcgaggcctctgcatggggcgtgtagcctccgtagcgatcgaagagacaagcgaagcacagtggatgaatcgccatcttccgttagacgcagaagtcgaccgctctgagtcccacatacaccaaatcggagcgctacgcccgccatattgggacaagggaaaaatgacaacgatagttgcgccggtgatttga

SEQ ID NO: 343775 - DNA, 513 bp, Pseudomonas aeruginosa
atggagcttgtacgttatgggctgacggatccgtgtgcggatgctgagtatgttcgcaaagatctcgaaaacatgatcgccattgcgaatgagctgggcgccaccaggttccaagggttcagcgtgctgcgggacgtggtgcagtttgaaaagcagggcgatcgctgggagccaggccctatgcagctccgtagcctgtcttatgaggatgtctgcggtcactaccagcgaattctctcagagcatccgggatgtggcctacaggtcgctcggtatggactggtatttcatgatgatgacgggcgaacccttttgcgggcgccgttcaagcatgatggcacgacgatcgacgaggacgaaatactcgagctggatggtgacgagttctattacggctgctgggctggcgagaccccagagaaaaccaggcaagacattctctccccagtgctgaagagcattccggatctcgaagagattttgtcgcggaacaactcgcggtcttttttctag

SEQ ID NO: 343776 - DNA, 288 bp, Pseudomonas aeruginosa
atgcacgtgtttactacccaggtgctgccggcggacgtccgtctcgttcgcctctttccgatggtccatgtggtgcggcgtgtgccgatcagcgaccagattggctccgcgatgggggcttgcattgatcagttgtgctcgacggcccaccaggatgccaatgccctcattggtgtgtccttttcaacttctgcgctgctaaccaaagaaggggagcaagtcattgttttggcctatgccggtactcctgcgttgttagaggtgatcgtcagggacgcagaggattag

SEQ ID NO: 343777 - DNA, 528 bp, Pseudomonas aeruginosa
atgcaggatcgggacatccgtttcgacaagatgttggagccaggggaggggcgaaagaccttttccgcggccgagatcgaggcggcccgggccttcgtcaagaacgttacgttcgagatggccaccaagctgcctgatacccagagcccgcaggggaaagtgcttcgggggcacgagctggcacatgatgcggttatgtcgctggccagcaacagcctcaatggcttgatcgccagacggtctcctgttggcggaggaccctcgttctacgagctgatgtccaacgagattgaaaagcgatttctcactccggagtggtacgccgccgagagtggcaggactaccgctccgctgttaactgaatacctgcacatgcaagccctggaagatgttctggcgcttgaaagatcccaggctcgcgagcggatcgagatgatgctcgcgatgcagactgagcggctgaaccggaaggacatccagccccgcctcgaaaatcagcgcggcgcagccgctagggcagggcagtga

SEQ ID NO: 343778 - DNA, 291 bp, Pseudomonas aeruginosa
gtgacgctggatcaccgcgagctggtcctggtagaacgctccatgagcggcgtcttgcaacatgcgattttcagctgcagtttgccgagcgcttcctaccaccgcgttaccaaccgcctgcacgctagccatcgtttctgcctggctgctcgcggggatactgtcctcggctgcattaccggcacgttcctgggccatcagggtagcgtcaaccgcctgcttaccttcaaagagggcctgctgagcagcgagctgctgcgtcattactgcctgttggccattcactcctga

SEQ ID NO: 343779 - DNA, 603 bp, Pseudomonas aeruginosa
atgatttttcggcaggacataaacgctctcagagcattagctgtatctctcgttatcttatttcacttcggagtgccatgcttcgaaggtggttttgtgggggtggatgttttttttgtgctgtccggatacctcatgactaaggccattgtgcctgccttaaagagtgggagattcgagttctgctccttctaccatgcgcgagctaaacgtattatccccgcgcttttagtgctttgtgttgttgtaacactgtttggctatttctgtctgccagtagatgagtttcggactcttggtcgtgaggttaagagtagcttgctattttatagtaatttcgctcttgctgcctctagtggctattttgaatcgcccaaggcagaacattggctgttgcacacctggtcgctctctgttgaatggcaattctatatagtatatccagtcctactcttggggctgtacaggtttttagggattcgatggttgtttgccggggttctgatcgcgggtgttctttcttatattttttcagtataccttacttcaagttttcctaatcatgcattctacatgctcccggccagacggttactctgttag

SEQ ID NO: 343780 - DNA, 1746 bp, Pseudomonas aeruginosa
atgcgacaggacgacgacgctgcactcgcttccggtactacatccgatggctggttcacccggctccggcgttcgctgctggcgcgccttggcaataccgggctcgtgctggggacgttgttcttcgccgcctcgctcacgcccagcctcacgccacggatcacggtcgcgcaggcggtgctgtcgggcatgtgcctggccgccggctacggcctgggcgtgctgctgcgctggctgtggggatacctggagctgccgctccccgggccggcgggacagccgcgtcgccgccgtatcgcggtcgtcgcctgcgcggtcatcgccgcgctcgcgctttggcgcagccagcactgggaaaacatcgtccgcgaactgatgcacctggctcccgccggtccatcgcgcatcctgggcgtactcgcgggtgcggcggtcgtggggctgctgctggtcgtgctgggccgcatcgcgctgatgatcatcaaggcggtgatgcgcctggtcacccgcaaggtgccgcgacggatcgcgcacgtggtcggtgcgatcgccggcgtgctgctgctggtgggcctggtcaacggcgtgatcctgtcctcgttgctggacaccctggacgcctcctatcgccaggccgatgcactgatcccgcccgacatgccgccgccgaccgaatgggacagccccggcagcgcgcagtcgctagtggcctggaaccagctcgggcgcatgggccggcgctacgtcgatgcccgccccaccgccgacgaactcgccgcctacgccggtcccggcgccaaggcgccgctgcgcgtgtacgcgggcctgcccaccggcgacacgcccgaagagcgcgcccagctggcgctggaagaactcaagcgcgtcggcggcttcgagcgcaaggcgctgatcatcatcactccgaccggcaccggttgggtcgacccgtccggcatcgacggcatcgaatatctctaccgcggcgatgtggccagcgtcgcggtgcagtactcgtacctgtccagtccgctgacgctgttcctggatccggacacaggcggggtcaccgcgcgcgcactgttccgcgaggtctacggctactggcgcacgctgccgcccgagcggcggccgaagctgtacctgcacggcctgagcctgggcgcgctcaattcggaacgctcgttcgagatgttcgagctgctcggcgaatcattcgatggcgcggtctggagcggacctccgttcgccgccagcaagtgggccgggctgacccgctcgcgcaatcccggttcgccggtgtggctgccgcagttccaggacggctcgttcgtccgcttcatgaaccaggacggcagctccaccccgcccggcacgccgtggggcccgatgcgcgtggtctacctgcagtacggcagcgacgcggtgacgttcttcgaccgtcacggcttcttccgcgaaccggaactgctcgatgccccgcgcccgccggacgtatccccggcgatgcgctggtatccggtcgtgacgatgatgcagatggcaatggatacttcgctgtcgatgagcgcaccaatgggtttcggccacgtctacgcgccatcgcactacatcaacgcctggctggaagtcaccggcatcgacgactggtcgcccgaagacgtggcccgcctgcagcgccacctggatgagcgccgggccgaagagctgtccaaggatggcggcgaggagaccgtggacggctga

SEQ ID NO: 343781 - DNA, 219 bp, Pseudomonas aeruginosa
atgacgaccgccatggaccgcaccgatgtacgcggccacggctgcaacgagcgcagatgccgcaaggaggaacgccgtcagaataccagttattctggccttctcagctgcgtcggctgcctttgctttgacttcttccgcggtttttgcagcctgggcctgaacgtcagcaatcgcctttttcgcttcttccactctggcctgagcttcggtgcgtag

SEQ ID NO: 343782 - DNA, 873 bp, Pseudomonas aeruginosa
atgcatacagaagcggcgataacaaaggcacttgaagaactcggtgtcgagaagggcaacttgttgatgcttcacgcgtcattgaaggcaattgggccagttgagggcggagcggagacgatcgttagagcgctgcgttcagcagtagggccatcgggtacactgatgggctacgcgtcgtgggacaggtcaccatatgaggaaacgctgaatggtgttcaattggatgatgaagtccgcgcctcctggccaccattcaatccggcgactgcggacatctattgcggattcggcctgctaaatcggtttcttgttcaagctccgggcgcccggcgcagccctcatcccgatgcatctatggtcgcaattggtccgctcgcagccaatctgattgagccccatgagcttggtcacgctttcggccaaggatcgcccaccgagcggttcgttcgatgggccggtaaggttttgctcttgggtgcccctttggactccgtaactgtcttgcactacgcggaggcggtagcggatatccccaacaagcgccgagtaacatacgagatgccaattgctggaagtgacggcgaggttgtttggaaagcggcatcggacttcgattctaatggtattcttgattgctttgctattgaaggtaagcccgacgccgtagaaacaatagcatgcgcctacgtagagcttggtcgccatcgagctggaatcgtgggttcggcgccgtgttacttgttcgacgcccaagacctagtgtcgtttggcgtgacctatcttgaacaaaatttcggttctgcggtggcttttaacggcggtggagcgccggacccatgcgagccggcaggtgggagccatcgaccttaa

SEQ ID NO: 343783 - DNA, 558 bp, Pseudomonas aeruginosa; identical to SEQ ID NO: 25303

SEQ ID NO: 343784 - DNA, 3006 bp, Pseudomonas aeruginosa; identical to SEQ ID NO: 152274

SEQ ID NO: 343785 - DNA, 513 bp, Pseudomonas aeruginosa
atgtcctactccgaccccaggcattgccacaaccagcgcgtcacccaatggctcgccgcgatacggcagcatgccgcctggctgtacgccgcggatgagcagtacctgtacctggtgggcgaggcaaacgaactctaccagtgcggaatcgtgggcctgcaggaccgccacgacatggtcaccgacgcgctcggcatgtactcctgggcgatcgagcacggcataacgcgcgagacgcactactgcgcggactgctgctacgacgtgctcgacggcggccgtgctgtcgggacggtggacagcgaggggatctaccacgggcccgcacccgcacgacagcgagtgggctgtatcagccaggatccactggacgggcaggtctatctgcgcctgggccatgcgctcgagcgcgccggcgttgtgcgcggcctcgtgatcgagctcgacgccggcggcacgctgcaactcgtcgagcagttccctgatgacttccggccctggcggtgggcctga

SEQ ID NO: 343786 - DNA, 561 bp, Pseudomonas aeruginosa
atgcccgcacccggcacgggttccgtcccggaattgcaactcgtcccgttccagctggaacacttcccaatcctgcaacgctggttcgccacggaaaaggagctggtgcaatgggccggccccgccctgcggcatccgctgagcctcgagcagatgcatgaagacctcgcggaaagccgccggcgaccgccgctgcgcctgctctggagcgcttgccgggatgaccaggtcatcggccattgccagttgctgttcgaccgccgcaacggcgtcgtccgcctggctcgcatagtcctggcgccaagcgcgcgcggccagggcctggggctaccgatgctggaggcgctgctcgccgaggccttcgccgacgccgacatcgagcgcgttgaattgaacgtgtacgactggaacgctgccgcccgtcatctctatcgacgcgcggggttccgcgaagaaggcttgcgccgctccgccacccgggtcggccgggaacgctggaatgtcgttctcatggggcttttgcggcaagagtgggcggcgggaggcgccggcaacgactga

SEQ ID NO: 343787 - DNA, 486 bp, Pseudomonas aeruginosa
atgctcgacgagatcctgccgcgggtctgggcacactgccccgaggcgcgcatgagcgtctgcggctatgcgctgccggcggagtgggcgcaacgctggagcgatccgcgcatcgaatggcaaggcttcgttcccgacctgctgcaactgcaatcgagcagttcggtgttcctcgccgcgctgcgccatggcggcggttcgaagctgaaggtgctcgaggccctggccgccgggctgccgctggcgagtaccgcgcagggcgtttccggcctggaactgcgggacggcgaggactacctcggcggcgaatccgccgagcagctcgccaacgccgtggtgcgcctgttgcaggacccggcgcaggcccgcgcgctgggcgagaacggccgcgcctacgtacgtcgcgcgcacgactggagcgtcgccgccagccaactggaacaggtctacgccggcctcgccgaaggagcgccggcatgcgcatag

SEQ ID NO: 343788 - DNA, 1650 bp, Pseudomonas aeruginosa
gtgattgcgttgcgcgcctggctggtcctgctgtgcgccgtgccgttgctgcttcgcgcagcggaggcgccggtccagctggcctggcgcacgacccagggctacgaactggtgagcctggatcgccagcgggtactcgagcgccggccgttgccggccgatttgcaggctccgctgggcagcctgtggaaactgttcgtcttcgcctggctgagcgacaccggccaggccgagccgccctatacctgccaggggcgcagccgcgaggaggtctactgctgcgagaatggccagacgatcggtcgtgaccgcgccctggtgcgctcctgcgggctgtatttcgagccgcagcgcctcgccttgcggccggaggcctggcgcggctactggcaggcgcgccaggcaccggcctggttgctcgatctggaacggctgcaaccgcagacgcgggtgccggttaaggagcttctggagcagttgcagcaactgccggcccagggcgaggcgcggcgggtactgctcgacgtggcgttgcaggccggcgacggccatgccgtggccagccttggcggccgcctgcgggtgaagacctggagctggctcgacgaccatgacccgcaggcgcgccagggcggtttcgctggctggctggtcgatggaacgccgctctggctcggcggcccgggaaccagcaagatgattctggaccgctacgccgaggtgctcgggcgcttcctgccgagtccgtggccggccgatccgggccgttgcgtggaagtgaacctgttcagccgctatccgctgcgctcggtcagcgatccctccggccacccggccgccgaaggcctgctgcatggtccgcagcaagtgctcttcgccaacggcaatcgactggacatcgccagcgccggcgacctcttcctgcaacgggtggatggcgtgccgcgcctggtcgcgcgggtttcgcgcgaagagtacgtggcgcgggtgctggagcgcgaagcctcggcgcagccgaaggaagccgctcgcgcgctggcggtgaccattcgcacctatctattgcaaaacgccgcgccgcgcggcgaatgcctggccatcgatgacagcagccagcgccagcgcgtggcgccgcgcccggccagcgcgccgacgcggcggatcgctgcctggagcgccgacctggtgctggccggggcgaccgtcaactatcactccgaccagcctggtccggcgcgcctgtcctggaagcacgcggtggagcaagccgggcagggactgggctacgacagcatcctcgcccaggctttcccgcgcagcagcctgagccgctgggacaacccggtggccgcctgccagccgttgccggctgccgaagactggctgcgcaagcagcgccggcagtggcgcgagcgtctcgaccgagagcccggctacgaggagattccgagtttttccgtgtgccgcctggcttccgggcggccctatgtcgatcgcgagcgcgaacgcatcttcgtccgcggcctgtattccctacaggaacgcctggacctcacccacgaatacctgcacctggccttccgcgcccatcccagcggccaggacgaaaactatatcgaaagcctggcccggcgcctgctactggaatga

SEQ ID NO: 343789 - DNA, 249 bp, Pseudomonas aeruginosa
atggcggtaccggtggtggcggtactggcggtactggcggtggtggtgatggcggaacaggcggtggcggcgatggcggtaccggtggcggtggcgatggtggcggcacgcctggaacgggtggtggcggcgatggcggcggaacgggtggcggcactggcggcggtgacggctcaggggagggcggtggtaccggtggcggcactggcctggaaggtggctgtaaggacgatagttgcgcgttcgtga

SEQ ID NO: 343790 - DNA, 885 bp, Pseudomonas aeruginosa
atgccgtccttccagatcaacgacgaggagcgggaggcgctccgcggcctacccatgcttgcccgcgagatctacgtgttcgccctgcgcccgttcatggacttcgcaacaggcattgtcggagagcggcgcgggatctcttggaagtcgattgccgatgagctctacgtcgagccgcaccagggcatcaagggcggggagccctccgaaaaggaactgcgtcgggcgctggtctggctgcagaaggtggggctggtgggccccaacctggccgaaaggcgcctgatttttgagttgccgaaggcttcacgggatcaatccgtccgaaaaaaagtgggcactaagtgggcagatgaagcgggcagttatgtggaagggtcagagcccagtaactacgcggctttcccggaaaaagagggcagatatgtgggagggggtgaaagtgaaaaagtgggcacacctccggtatccggtaataaccgtaccgtacctaacgcgtgcgtgcgcgaatgcccagccgatccggccactgcgggacagtggtgccagttcttcattcgtgagcgcggatttcagatccacgcggtgcagaccgccaggaccatgccgctgttcgcctcttgggtcgagcgcggtgtcaccgcggagcagatgctcgcggcaatggagatcgccgaagccaagctcggcgccccgcctgactcccccctgtactaccgaaattttctcgatgaactcttgctggagcgccaccggatggcaacagcaccgcatgcggagcaccgccatgagcaaaccgacggacgaaacgcccaagcacgtcagcgacccgctgcacgacgttcgcgcaacgctgttgacatcctccacgacgacgactggtga

SEQ ID NO: 343791 - DNA, 330 bp, Pseudomonas aeruginosa
atggctcgccagaacgacatcgaaaccatcaaggacttgatgcatcgcggagaactcactgccgaccaggcaaacgtccagatggttcgcaacgaccgattccgcatggtgattaattctctgcccgcagatgtgcgcaaggctcttaatgccgcagtgaaaaccggcgagcttggccacatgaagaaagaaggccacaaaccagagtgttattaccaccctaccttcaagtatctggctgttgaggcccgtaacaagcgtgagcgcgagatcgcaggagcgagccgaagcgttcttgtcagcatgagcgagcttgatccgtttgattaa

SEQ ID NO: 343792 - DNA, 162 bp, Pseudomonas aeruginosa
atgaacgccaccctagcacgcctccagaatgaacgttgtgccactcttcgcctgatgcttctgccggagcatcgtggataccagttcactggccacccttgggccgagcgaatccgcaatctccacgacgaagcccggtgcatccgcagccatcacaactaa

SEQ ID NO: 343793 - DNA, 159 bp, Pseudomonas aeruginosa; identical to SEQ ID NO: 326795

SEQ ID NO: 343794 - DNA, 366 bp, Pseudomonas aeruginosa
atgaacaccgcattgaaatacgcccaggagcgctgggacaacgcgctaccgcctgatgatgacagcgaccgcgagtacgtcaccacgcaggtcgggaagcttctgaactgcgaggacggtgattgcgtgccgttccatgaccggaaagagaggccctttatcgggccggagttcacgatctatggctttgccggtttcgtgcctgagtggctagcagaggtcgacagcaaagagtgcccgatgacccaactgctgcttgccgtgcgccgaggcgacctggaattggcccaacgcatctggttccgcgcattcgaatccacgctgatcgagaacgctgaacgactggttagggagagacgagtatga

SEQ ID NO: 343795 - DNA, 798 bp, Pseudomonas aeruginosa
atgagctggctttgttctcgggcgctggtggaggaattctcggcggccacctcctcggatggcgcacggtctgcgctgtcgagttcgagccctacgccgcaagcgttcttgccgccagacagaatgacggccttctcccgcccttcccgatctgggatgacgttcggacctttgacggacgaccttggcgcggccttgttgacgtggtttctggcggattcccgtgtcaggacatatcagctgccgggaatggcgccggaatcgacggcgagcgctcaggactctggcgagaaatggcacgaatcgtcggtgaggtacgacctcgattcgtcttcgtggagaactcaccgctccttgttcgaagaggacttgccgtggtcctcggtgaccttaccgagctggggtatgacgctcgatggtgtgttatgggagccgccgacgtcggggcgccccatcggcgggaccggatatggattgttgcccactccaacagccacggattacaagtccgagagtatgacgccggcacttgtgcagagcagaatggggcgaccaggtggagtgaggctgacggaatggcttcatcgcaaatcactgccaaccccgaatcactggggcggacgcctagacgaatgggggggatctacaaacccattcagaggaacagaggttgggaaattacctctgaacccgtgttgggtagaggagttgatggggtggccggtcgggtggacagacttaaagcccttgggaatggccaggttccaagagtggctgcaacagcattcacttatctag

SEQ ID NO: 343796 - DNA, 507 bp, Pseudomonas aeruginosa
atgagtgagacattcaccctggagatggatgacgcacagcgctccgccttctggtcgaaagtctggatcacgtggctgaagacggattgctgggagtggcaaggagcgagaaagccaaaaggttacgggaactgcacagttaacaaggaaagccttggagctcaccgcgtcgcattctggctgtccaatggggacttccctgcgaacatgcacgtttgccacacctgcgacaacccaagctgctgtaacccatcccacttgatgcttgggactgttgatagcaactacatcgacatgctcatcaaaggccgatctggcttcaccaagaatcgcgccattggaacccgcaatgccaacgcaaagctgaccgaccagcaggtttctgatatccgacgcgcatacgcgtctggcgaaggtaatcagtacgaactggcagcaaggtacggcgtttctcaggctgccatcggcagcatcctgcgcaataagacttggagacatgtcgcatga

SEQ ID NO: 343797 - DNA, 471 bp, Pseudomonas aeruginosa
atgagaggcatcaacaaagcaatcatcatcggaaactgcgccggagagccggaagcgcgattcctgcctaatggcaacgccgtaaccaatgtaacggtagtgaccaacgaaacctggaaagacaagcaaactgggcagcaacaagagcgcgccgagttccatcgcgtggtgttcttcggccgccttgcggagatcgccggcgagtacctgcgcaagggttcccaggtctacgtcgaaggcagcctgcgcacccgcaagtggcagggccaggacggtcatgatcgctacaccaccgagatcgtggtcgacatcaacggcaacatgcagttgctcggcagtcgcccctccggcgacgactcgcagcgtgccccgcgcgagccaatgcagcgcccgcagaacgcaagccgcccgcagtctgccccgcaggtcgcgcaggattacgacagcttcgacgaagacatcccattctaa

SEQ ID NO: 343798 - DNA, 237 bp, Pseudomonas aeruginosa
atgaaatgcccattctgcaagtgcgacccgttccattatgtggacaacggcgttggctgggagcccgttgcgattaattgctgcgagcttggaatagacctgtatcacggtagcaaaagagcgcggcgtctcctgcgcgacatgcagaatccatctccgcgagcccaggccagggcaatgcgggtactgcgcgaagaggggatgcggcctgagaagaaaatgagggttaagccatga

SEQ ID NO: 343799 - DNA, 855 bp, Pseudomonas aeruginosa
gtggctaagactgcgctccggctgcaaggcctccaccagttgctcgaacggcaggtcctggtgcgcctgggcctccagcgcgcgttggcgggcctgtgccagcagctcgtcgaagcccatccgaccgtccaggtcggccttgagcacctgggtgttgacgaagaagccgatcagccgctcggtctccacgcggttgcgattggcgatcggcacgccgacacggatatccgcctgcccgctgtagcgatacagcagcgcctggaacgaagccagcaacagggcgaaggcagtagccccctcctgctgggccacgcgcctgagcgcctgggacagatcaatatccagttccaggatgaactgggcaccacgatggctttgccgaaccgggcgcggccggtcgaacggcaactccagcaccggctgctcgccgcccagcaggccggtccagtacgccaactggcgctccttttctcctgcctccatccagctgcgctgccacagggcgtagtccgcgtactggatcggcaaagccggcagcgctacctcgagccctcgactataggcggcatagagctggaccagttcctcgaccatcacctgcatcgaccaaccgtcggacacgatgtgatgttggaccagcaccagcacatggtcgtcctcggccagccgcaacaggctcacccgcagcagcggcccacgctccaggtcgaacggccgcgcgatcgtcgtctcgacctgccgagcgagggcgccctcctcgagcggccccaacgcgacgatatccaacggcaatgccatggatgcggcgatctcctggcgcgcctcgtcgccgtcgaggcgaaaacgggtgcgtag

SEQ ID NO: 343800 - DNA, 231 bp, Pseudomonas aeruginosa; identical to SEQ ID NO: 341253

SEQ ID NO: 343801 - DNA, 396 bp, Pseudomonas aeruginosa
atgtcgccttcgactgatccgcgttcaccgatgttctacgactggatatccggctatcaggatttcccgttcgacattccccaggtgggcaaggtcattcgactgaacgtcgactcagagaccaatgaggtgctgagccagtcgtgcccgcccttccatgctgagggtagctacagcacgaagtttcgcattcaggtggcagggcgccgggtgtacgtcgacggcaatgcgagccgcgttaaccgcctggacaacctctacggcctgaccacgctcgcggacaacatggccgtcatcaactcgatcttgaccgcaccggaaatcggtcttccgccgctcactcgatgcacccggcttgatcgtctgcaggacggttcggcggtggtggacgggtaa

SEQ ID NO: 343802 - DNA, 180 bp, Pseudomonas aeruginosa; identical to SEQ ID NO: 340153

SEQ ID NO: 343803 - DNA, 261 bp, Pseudomonas aeruginosa; identical to SEQ ID NO: 341245

SEQ ID NO: 343804 - DNA, 597 bp, Pseudomonas aeruginosa
gtgagcggctgccatcagcaacaacggtcacgcgggttccctgggacggctgctgcggccgaaacgaatgcggggtctgcacctgcgcaccggtcgcggcggacgctgcgcagcctctccacgctgctcgccgcgctgttcgcgccctacccgctgctggccagcgtcaacggcctgtcggcggagctgcaacgcaccgccacggagttgctgcgcgagccctgggacgtggtccaggtcgagcacagctatagcttccagccctacgagcgaccgctgcgcgacgccggccagccgttcgtgctcaccgagcacaacgtcgagtcgtccctcggtgccgccacctacgaccgcctgccgggctgggcgctgcccttcgtgcgctacgaccagtggcgttaccgccgctgggaacgccgggtgatgagccaggcggcagcggtcgtcgccgtgaccgagaaagatgcgcggcagctcggcgcgatgctcggccgcccggtgccagtggtggtcaacggggtcgactgcgagcacttcgccgccgcccggccgacgcccgaagcgcagcgcgtgctgttcctcggcaactacgaatag

SEQ ID NO: 343805 - DNA, 1095 bp, Pseudomonas aeruginosa
atgaacgacagccgaaagaggggaccacagcgcataggcgatacaaccggcgacctgctttccacgattgaagcgatgcgggaaaaacatcgccagcgtgtcgaggcggccgctttgccgggagagactttcgagcaggccgaggcccgcgttctgcggcgcgatgaacgcaccaaagcgtcgaacgtttcaacggtcagcgaacagatggaacgcgccaaagagcgggaaaaagcccagtcgcttgtccgcaagccacccaagggcgacgaacaggccgactttctggtgcccaacctgtatgacgtagctggccgggacaatcgcggcgtcatggatgtggcggtatttcgtttgtcgaagaaagacaagcgagctggcgaaatgatgcgctacgagctgccagacggctatgttgaggtgtcagccggtgcacacggaatggcatctgtgtgggactacgacattgtgctgatgatggtttcacaccttaccgaagccatgaaccgctaccgcgatggtaaggacaccatgccggggcgtgtgttccgtcctcatgtttccgacattctcaaatttgctcgccgtggtgacggcagcaggcaggttgaagaaattgaggcggcgctagatcgtttgcggggaaccaccatcaagacagtgcgtgaaaacggcaaattccgcacgaccgaggcagaggggcttattgcgcgttatcgcgtgctttcacgcacggacacaaagaagatagcaagcgtcgagattgaggcaccggagtggatttaccgggaagtggtggagggcaaacggcccgacgtgctgaccgttcacccggactacttcctgattgagccgggaatcggtcgcttcctgtaccggcttgcgcgccgggcggccgggcaaacgcaagctaagtggtcattccagtccatctatgagcgcagcggctccactggcaccctcaagaagttcagcgagaaccttcgcaaggtcatcaccgccaatgatctgccggagtacgacctgcgagaggaggctgggcagagtgggccacagctcatcatgtcccaccgtaatgctctacccagcccctga

SEQ ID NO: 343806 - DNA, 255 bp, Pseudomonas aeruginosa
atggctaccaaaaaaaacaccgatctgaccggacttgtcgccaccaaaggcagcgccgcgcctgttgccgacatgcctacccggaccctcaaaccgacgactaacgatgaaccggccaacaacgtgccgctgaacttccgtgtgtcggccgatacccgtcgccggttccgcatgttcgccgccgctcacgatctcaagctgaacgaactgctgcgactggccttcgacgaatacgaaaagcgccacagcagctaa

SEQ ID NO: 343807 - DNA, 651 bp, Pseudomonas aeruginosa
gtgaaaaccttagtgttggcaagccagaagggcggcgcaggcaaaacgacgctggccgcgcatctggcaatcgctgccgaactggccggagttggcccggctgtactgattgacaccgacccccaaggcagcctgtcggcgtggtggaactcgcgcgatgcgaacaccccagcactggcggccgcgaagctggttgagctaccggcgaagctggaagcgttggccagcgccgggttcaagctggccgtcatcgacacccccccggcgattaccgatgcgatccgggatgtggtgaagctggccgacctcgtattgatcccgacccggcccagcccacacgacctgcgagctgtcggcagtacggtggacattgcacaggaggcaggaaagccattcgccttcacgctcactcaggcgaagcctaacgcgcgcctcacggtccaagccgtcgccgctttgtctgcacatggcccggtcgccccgtccatcgtgcatgaccgggtggattatgcgggcagcatggtggacggccgcacggtgcaggaaaccgacagcaagggccgcagcgccgaggaaatcacagcattgtttgctttcgtgcaagaacgcatgaacgaaaaaaagaaaacccgtaagaaggaaaccgtttaa

SEQ ID NO: 343808 - DNA, 447 bp, Pseudomonas aeruginosa
atgaaagaccgatcccacgatcaggcgatggccgagcagttccgcgcggacccggcctatgccgccgagctgctggccgaggtacgccgcgacggcgacccgaccgaactggccgctaccttgcgccagatggccgaagcgttcggccgcgccgggccgtggtgggacggccttaccaatgacgagcgggccttatgtgccgcgcaattcagccgctacgacacggcggactatctcaagaccggggacgacattgcggcctatctcgatgccgtggcggaggatggcgactccgcgctgatcgcggcggcgcttggagacgtggcccgtgcgcgcaaccttagccagctcgcccgcgacgtggagggcgacccgagcttcgcaaccgtggtgaaagtcgcccacgcgcttggcctgcggctcgctttcaagccggttggccggtga

SEQ ID NO: 343809 - DNA, 618 bp, Pseudomonas aeruginosa
atggcacgacacaaagacgaccccggcacgctcgacctgatgagcggcaagctgctgatcggctatgcgcgggtttcgaccgacgaccaggagctgaccaatcagcgggccgagctgcacgcggcgggctgttcccgcatctttgccgagaagatcaccggcacccacagcaagcgcgccgagctggcccggatgctggaccaccttcgaccgggcgacgtggtgacggtgacgcggcttgaccgcctcgcccgcaacacccgcgacctgctggacatagccgagcagttgcaggcgaagggtgcgggcctgcggtcgctggccgagccgtgggccgatacgaccagcccggccgggcgcatggtcctgacggtgtttgcaggcatcgccgagtttgagcggtccctgatcgtggagcgcacccgcaacggacgcacagcggccaaagcgaggggcgttcgtttcggccgccgccctgccctcagtcccgcgcaaattgcccacgcgcgccgcctgattgacgaagacgggcacaccgcaaacgaggcggccgccctgctgggcgtccaccgggcgaccctctaccgggcgctgaccagagaggagagcaccaaatga

SEQ ID NO: 343810 - DNA, 294 bp, Pseudomonas aeruginosa
atgtcaacgaaagccgttttcacgatgaagctggaaccagagctgcgcgacacgttcatggcagaagccgccgccgatgaccggccagcagcgcaggtcgtgcgcgagctgatgcgcgactacatcaaccaacgccgcgaggcgcgggagtacgacgaatttttgcgccgcaaggtcgaggttgcgcgcaggcagcgtgatgctggcctgcacgtctcaaatgaggaagtggaagccgatgcggccgcccgccgtgtggacctgctacgccgcgccggagaggctggattgtga

SEQ ID NO: 343811 - DNA, 297 bp, Pseudomonas aeruginosa
gtgaaagtccgctggatagctgcggcgagacaggaccgggccgacatcgtggattacatcgcggtcgaaaacccacgggcggcgctcaagatggacgatcttttcagtgaagcggcccaaaggctgggaaagtttcccatgctcggccgcattgggaaagttccgggcactcgcgagctgatcccccacgaaaactaccggctcgtctatgaagtggacgaagcgacggacacggtttgggtgatggccctcatgcacaccgcccgccagtggccgcccgtaagggaggaccgataa

SEQ ID NO: 343812 - DNA, 567 bp, Pseudomonas aeruginosa
atgagcgacaccaaagaaaacaccggatggaccacccctgacgttgcgccgggcggctggaacaaggccgacaccgagcggctggccgaatacgagcagggctatcgggaacggtcagaggccaagctggcgaaacgtgaatccacggccgagcgcgtggaagtcgtcgaggaacgcgacgtgaccgaccccagccgggtctatacgccgcgggagtcgggcgaggttgcgcaggagcgcgaggcagacgcaccggagctggcaggcggcggggaagccgcaggctatgacgaggtacagacggccgaggtggtggaagaagacccggtgcgcgcggcggccatagccgaggtcgaacaggcttttgccggggaaagctacggccatgagagcgaggcccagcttaaagcggccgagatcgaggccgaggccgtccagttcaccggcatgtcggaggccgcgcagacggccgaggtggtggaggaagacccggcgcgtgcggcggctatagccgaggttgaacgggcgttcagcagtcccggccatgaccaagagatagagcggtga

SEQ ID NO: 343813 - DNA, 3177 bp, Pseudomonas aeruginosa
atggcaatctaccattgcagcgttaaagcggtatcacgcagcaccgggcgcagcgcgccgggtgcggccgcttatcgcgccggtgaattgctgaccgacaatcgcaccggcgaggtgttcgactacaccaaaaagggcggcgtcctgtccgccgatatcgtgctgccggaaggtgcgccggagtgggccaaagaccgcaaccagctatggaacgccgccgaggctgccgagcgccgcaaggatgcttgcgtggcgcgtgaatatgaggtggccttgccgcatgagttgacgcacgaacaacggcgcgagcttgcgctgacgttcgccaaagagctgtcagatcgccacggcgtggcggttgatgtttgtctgcatgagccgagccgcgacggcaacgacaagaactatcacgcacacattctgacaacgacgcgcgtgatgggaaaagatgggttagagggcaaggcagaaattgaaaaagccgggcgcaagcggaccgacgatctcaaggaaacccgcgccttatggggcgcactttgcaatgatgcgctggagcgtgccgggcacgtcgagcgcgtggaccatcgcagttataaagagcaaggcgttgacctgacgccgaccaagcatattggcgtttctgccgtggcgatggaccgcaagggcatggatgccgagcggctggaaattcacgccgagacacgcgccgagaacgccgagaagatcgaggctaatccgtcgctcatcctcgataagatcaccaccacgcaggccgtttttgaccgcagggacatggcgcgcgagcttaaccggtacatagacgatccccagcagttccagaacatcatggcccgtctggagagcgcgccggagctggtacagcttgcgccggaaatgacagacggccgccgtacggttccggccaagttcacgacccgcgaaatggttatgacggaacgggcgatgattgacagcgccgagcgtctggccggggcgggatcgcacggtgttgcggcgggcacgatagcccgcaccgttggccgctacgataccctttcggacgagcaacgcgccgctgttgagcacgttaccggagagggccgcttgtccgtcattataggggatgcaggcaccggaaaatccttcgcaatgcgcgtggcgaaagaggcatgggaggccgaaggcttccgcgtccgtgggtgcgcgctggccggtaaggcggccgatgaattgcaggccgggagtggcatcgacagccgcacgattcacagccttgaagcatcgtggaaccggggcgtagacatgctgaccgcgcgtgacgttctggtaatagacgaggcgggcatggttggcagtcggcagcttggtcgggtgctcgaagcggccgagaaggcaggcgcaaaagtcatcatgctgggcgatgacaagcagcttgccgccatcgaggccggggccggtttccgggccattaccgaacgtgtcggcgctgccgaaatcacgcagattcgccgccaaacggaaagctgggcgcgggaggccagcacagagctggcgcgcggtgacgtccgcaccggtctggacgcctatcatgagcgcggccatgtgcggatcgaggacacccgagaggaagcccgcacagcccttgcggccgactggctggccgaccgagagaaaggcgggaccagcatcattctggcccacacgaacaaggacgtggcgagccttaacaataccgtgcgaacggcgcttaaagcgtccggcgagctgggcgctgaaaccgagttcctgaccgaacgcggggcgcgcagctttgccgagggcgaccgccttgtgttcctcaagaacgacagcgcgctaggcgtgaaaaacggaacccttggcaccgtcgaaaaggccgaagaaggccgcttgtcggttcgtctggacagtggccgagaggtggactttgacgcgggcacctacggccacgttgaccacggttatgccgtcaccatccacaaatcacagggcgttaccgtagaccgtgcctatgtgctggcgacgggcggcatggaccgcaatctggcctatgtcggcatgacgcggcaccgcgacagcgcgacgctgtacgccggggccgaagacttcaccgatcgccgttccgggcgactggtggcccacggcgccgccccttatgagaacgacccggcgaacagccagagctatttcgtgacgctggaatcggacagcggcaagcagcgcaccgtctggggcgtggatctggcgcgggccgttgccgaatctggcgcacagttgggcgaccggattggccttgagcacaccggcagcgaaaccgtgcagctcccggacggagggattgccgagcgcaatcactggcaggttaacggcagcgccgagctggcctatacgaaactggccgaacggctgggccgtcagcagccgaaggcgagcacgctggactttgccgaaagcgcctatggctttgccgagcagcgcgatttcgacggtgcgggcgttgtgcgccagtgggtcgagcgcggccgcgagaagctggccgggcttgccgaccgggccgaaaaagccctttcccgcgtactggaacgcgccggaatccgccgcgacgtgcccggcatggaacaggccaccccggaagacattgcggccctgcgcgagccgcaggcgcggccagagctgacgccagaggatgccgcacgcgcagcggccatagccgaggtcgagcgggctttcggtggcggcctgcccgtgcgccaggtcgatccgctggacgtgtaccgcaagggcgtggagcaggcgcggcaggcaggtgacgggctggacattcagattgcagaacgccgcttgcagcttgccgaagacgcacaggcggccggacataacccggcccacatggccgcgaaaatcaacgcgcaggcgcaggccgacgtgattgccggattgcagggccagcagccgcaggcgcggccagaaccaacgccggaggacgccgcccgtgcggcggcccgtgccgaggtcgaacgggctttgggcggcggcaaggtcgaacggccagcgccgcagcagcaggaatcgggcatgtcggagcgggataaagcccgcgccgaggttgagaaagcaatgggccacggtcgcaaacgtgatcgtggaattgagctgtaa

SEQ ID NO: 343814 - DNA, 252 bp, Pseudomonas aeruginosa
atggctaagcccactctcaaagaacgccgtgccaaggcactggcagaagtcgaagcggcaaaaagcaagctggctcaacttgaaaccgctgcggctgaacgtatcggccgtttagccctcaaggccgggctggttgatttggacctgagcgacgagcagcttagtgcggagttcgacgctatcgcgtctaagtttcgcaaccgcccggcggtcgccagtggcacgaaccagacaacaactagcgagggctga

SEQ ID NO: 343815 - DNA, 2661 bp, Pseudomonas aeruginosa
atgaaatgctacattctggcgcttgctctggctcttccttgggccaccgcgaacgcgcaaggtatggcaccagaaacatgccaagatacatttgttgaatccatccgtcaggcggccgctgcgcgcgacgctgatgctctccacaagttgtacgatcagaccgatatccgcgagtacgcgaaagccaccgatgagcggctggatgcgcgatttatcaatgagccgacatgcgccaatatccagcacaccgtgcaggaaattaagacgctatggaagtcgctggatgaggtcgaaagtgccgagagaacggaacagcagcagcgacaggccgagaaccttttgaacggcgcgcaggcgcaaattttgagccgcaaccgttcgcaggttattgctggaatggaaacggtgaaaacctaccttctggacaccgagcgcgcctttgttggcaagggtcttgccgcctgctctacggcgggcggaagcgtccagaatgtgcagcaagcatgtgacccggttccgcatttcaagcgggccattgaccgggaatttaatcgccttaactggcccgtcgcggcgtccccaagcgccgcttatgcatggttgatagaccagtataaagacggcccgcaaagcatccagaagcccattgaaaacttcctgcaactgaacgtgaccgacctgcgcgcggaagactttggcggacgtgttgcgcaattgcagggcaaggaacgggcggtgcaggctcaacaggcccgaacagtagcccgtgagacgcggaaggaacacgacgcgacggtgatcggcaacatcacgtcgatgggcgaccggctcaaggaatcgctgtggaatattctcggtggtcttctgctcgttttcctgttcccggtggtctttgccatcccgattgtcggcccgctgatccgtgtgttcatgcccgccgaaaaagcggcccgtggcctgtttctgctttgggtgacaacgctgccgttttacgcggcctatgtcgtgctcggcggcttcatcgcgccactggcggcgatggtgccgggctggttccgcctgcccctgcttctgctgcttttcgtcccggcctgcgttctggtgcagcggtcccggtggtatgcggcgttgtatgcccgtttaccggctcgcctgcgcggcattgcggccgctccaaggggcacacaggccgccgcgcctgcgccctcgaatggtctgcatgggtccgcacactggacgacaacggaacaggcaattcagaagggccattatcagccggtcgggcacgttctggctgacagccacggctttgctttgggtcgcccgctcgatgccgataacaaggccatgcagggctacgatgcccggttccgctacatgggccatgtgctgaccattgcccccaacggctccggtaagggtatcggctcggtcatcccgaacctgctggactatcccggctctacggtggtgctcgacgtgaagggcgagaactacgccgcaacggcccgattccgccgcgaacagctcggtcatgacgtctatctggtggacccgttcggcgtcaccggccagccgtcgcaccggttcaactggattgaccgcctcgacccggacagcccggccgtggtggaggaagccggggcactggctgacctgatgattgtctcggagggccacgcgtccgatgcgtcggcgcacttcaatgaaacggccaaaatcttcctgcgcggcctgctggttcacgtcgctacgctggccccggccagccgcaacatgagcgaggttcgccgcctgctgtcgcttggcgaggacgaaaccaaggcgctgctggccgatatgatcacgaacacgcgcggttttgacttgccgccccgtgccgcgcgggccttcatgaataccccggacaaggaacgcggctcgctgcgctccacgctgaaccggcatctggccttcctcgatgatccgcgcctgatttcgacgctggccgccacggattttgcctttgatgacctcaagcgcaagccgatgacggtctatctggtgatgccgccccactcgctgcacgcttaccggggctatgtgcgcggcttcttcggtcaggccatcatgtcggttctggcaaccgggttgcagaagccgggcgatctgcgcgtgctgttcctgctcgatgagttcgcccagctcggccacatgagcatcattgccgaaaagctctcggtcatccggggttatggcgcggccatgtggttcatcctgcaaaacctcggccagctcaaggaaacctatccgcgctggcaggactttttcgccaactgcaacgccaaacagtggttcggcacctcggacgtggacacggccaagtacatcagcgaaagcctcggcaagctgacggtcgaatacaacacggccaacagttcgtcggggtcttcgtttggctctggcgtcagctccaacagtggtgcgggcgtgtcccagcagttcaccggccgggatctgctgacgcctgacgaagtgatgcggctgccgaacgatgtggagatcgtgcaggtgcagggcgaagcgccctacacgctgcgccgcctcaactacctgacggacccggaatatgcgggccggtttgattccgcgttccctgagcgcgaccgggcgacggtctag

SEQ ID NO: 343816 - DNA, 174 bp, Pseudomonas aeruginosa
atgggactggcgatctttctgcttctcggcgtgggcctgttcattggcctgctgatcggtgtgatttctgcctatgccgggttctggcattggctgttcgaccgactggatgcccggcaggcgcggcgactgtccgcaaaacctgtccgcaatgatggcggaaagcgtcgctaa

SEQ ID NO: 343817 - DNA, 2463 bp, Pseudomonas aeruginosa
gtgccgctccacctcatccgccagatgttgcgcgctccactgtccggcgtcgccgagcaggacccgggctcctgccagcaggggtacgaagagttgttcggcagcggcatcgaaactgatcgaggcgaactgcaattggcagtcgccagggccgacgccgtaggtgcgtgctgccgcctggcagtgcgcgacgagcgccgcctggctgaccgccactcctttgggctggccggtcgagccggacgtatagatcacgtaggccagcgtctcgccagctacctccggcagcggccgcgtatctgcactcgccggccaggcggcggtctccagcggcagccgctcgacctctgccgggcagggcagccgctccgccagggtttcctggcagatcagccagcgcgcgccgctgtcgcgcaacatgtacgccaggcgctccgcggggtagttcggatccagcggcaggtagccggcaccggccttgaggatacccagcaggccgacgaccaggtcgaaggagcgctcggcagcgatcgccaccagcgcttccgcggccacgccgcgcgcccgcaggccacgcgccagacgctcggcgcgcatatccagttcggcatagctgagatactcgtcgccgcataccagcgcgatcgcctcaggcgccgacgctgcctgatgcgcgaaggccgccgcgacgccgccccgcggcagcgcctcgagcggtgcctgccaatcccgcagcgcctcctggcgttccccggcgtcgagcagggccagctcgcccagcgctgcctgaggggtctcggccatccgctgcagcagatgcagcagatgacggtccagttcggcgatgtccgctgcgtcgaaatcgcgccgcgcatagacgtactgcaggctcaggcgctcacccagggtgacacccagcgtcagggggtagttggtctgctcgtggttgcttggcgtggagaactccagatcggcgggagcctggcgcagagcctcggccacggggaagttctcgaacaccaggatgctatcgaacagagcctcgccgccatgcccggcccagcgctggatgtcgtacagaggcgtatgctcgtgttcgcgcagcgccaggttgagcgcctgcatcccctgcaggtagtccgcgacgctctgctgtggctgcggcgcggcgatcaccggcagggtattgataaacagaccgatctgcgcctcgatgcctggcagttccgccggccgtccggccacggtggcgccgaaggctaccgtctcctgcccgcagtgccgctgcaggagcagcgcccaggccgcttgcaccaaggtgttgagcgtgaccttctgaccttgggcgaaggacgccagttggcgggtcgtctgcggatccagttcgcgcagatgctcaccctggccaggctgctccgtcctcgtctggcgcgccaggcgtgtcggcatctccagggaggccagccgatcgcgccagaaggactcggtcgccttcgcatcgcggctctgcaaccaaccgatgtagtcgcggtaacgcccaacgggagcggctacctcctgccccgcatagcgctgcagtacctcggcgagcagttgggcgttgctccagccatccatctggatgtggtgataggtatagatgaggtgcatccgcccattcgccagcggcaccaacaccaagcgttgcaacggcgccctggccgggtcgaaaccggcttcgcgctcagcctctgcctgccgttgcggatcactgcctggcggggccagccgcagctccagcgtcgcctgctcgaataccacctgcaacggctgaggccagccgtccttccagaggaatccgctgcgcaggatctcatgggcatcgagggtggcctgccaggctgcgcggaagcgatccgggtccaatccgccgatatccatgcgcaactggttgacatagtcgccttccgttccatgaagactgtgaaacagcatgccctgctgcatcggcgacaacggatagatgtcccgcaccgaatcaggatccaaggacaattcatcgagctgcgtctgggaaagcccggccagcgggaagtccgacggcgtcacaccccgatgccgcgggtcgagacaatgctcgatcagcgcgtgcagctcccgcgcgtagtcatcgaccaggcgctggacggtcgcctcggcgaacatttcccggctgaagctccagtgcaggctcagctcgccaccgtagacctggccttcgatgctcaaccagttggccagcggggcgcacggatcctgggcggcgccggcgctttccgtggccggtaccagcagcgccgccccatcgaactgacggtcgaaccggcccaggtaattgaaggtgatccgcggctgcggcagcgcggccaggcgggccgcagcctcctctccagccaggtagcgcagcaggccgtagccgacgcccttgtccggcacgcagcgtag

SEQ ID NO: 343818 - DNA, 231 bp, Pseudomonas aeruginosa
atgaaaaacctgaagaaactgttcgttcgtggtggttccgccgttgctgtaggcgctgccctggtcgtctcgcaatccgcctcggcggctggctgggattacagcggtctgactaaggatgtcgacttctcgaccatcgcgaccggcgtgctggctgtcgctgcgctgctggccgctgtgtatgccgggatcaagggcgctcgcgtggtcctgggcttcctgcggagctga

SEQ ID NO: 343819 - DNA, 228 bp, Pseudomonas aeruginosa
atgatttccgccctgtcctgcgatggctccatctcgattgcgccggatggggcgcccctgtgttcgggcatgtgggtcttgacccaggtgccggagcagttcgacccgtcgatgttggacaccgaggcactcgcccaggcgttctcggtcgggttcggtcttgtcgcgacggtcttggtcggcgccctaggcgttaaggccgtactcgacttcattaaacgcgcttaa

SEQ ID NO: 343820 - DNA, 1263 bp, Pseudomonas aeruginosa
atgcgcaggttgttgttattggtcgctctgttttcgagctttgcgaatgctgaatattatcagtggcgggttagtccgcctgggcaggcctctagggcgttccctgacccgtattctgcttgtgagtggggttatacgtttatttctacgaactggtctagaaaaatagaagttatatctagagagtcggttgcctgtaagtattccgggaatggtctttattgggaagtcatgtatgcatccttgcgtggcacggagtgccctgataatggcaagtatgacgaagaagctcgcatgtgtaagccgcctgagccggaaaagcccaatgactgcattgaggggttgtatgacttgttcagtagtccgccgtctccagttgttcaggttggtggcaggaatcaagttataagtagtccgccggcaggctgtaagaacgggtgcgcttattctgcggattcatcgaagactacgagttgttatttcgtcactggctcgacgaatgaggggttctgcaattactcgctgcgaagtactggcgccacgtgtccagccgacacgaacaaccctggaatgaccgggccgtcgttgaatagcacgccgccgactgatccgaatgaaccgccgtccgatccgaacgaccctggctgtccggctggctatagctggtccggcacgacgtgcgtcaagacgccgactgaccccgctgacccgacgaatccgggtgatggtggtggcgatgggggaaccggtggtggcggcactggcggtggtggtgatggtggcagcgatggcggtactggtggcggcggtgatggcggtaccggtggcggtggcgatggtggcggcacgcctggaacgggtggtggcggcgatggcggtgggacgggtggcggcactggcggcggtgacggctcaggggagggcggtggtaccggtggcggcactggcctggaaggtggctgtaaggacgatagttgcgcgttcgtgaagaacaacccgtttggcacggacaaggttccgggctttgacgaatcgctgcaaaaggcttggacggatatcaagaaagccccgattggccaggccctgggcaagatcacgtttccgaccgggggaagttgtccagttcagagcgttgaactgttcgggaagagtgtgatgttcgattcgcactgtaacttgtggtctcagattgagccgattttgaaagcggtgttcctggctttttgggcgctgctgtctgttcgcgtgttcctgtcagcgtga

SEQ ID NO: 343821 - DNA, 468 bp, Pseudomonas aeruginosa
atgatcaaatggcctgatggccttccctttccgctcagggaggggtacggcttcaagacggttgaaccaatggccaggaccgccctccagagcggccgggcacgctatcgacggaacttcagcggcgtgccggttgctctggaggtttcttggctgttcaccgctgagcaggcgcgtctgttcaaggggtggtaccgagacgtcctgaaagacggcgtcaagtggttcgagtgcgagctcagaaccgaagaaggcattgttccgtgccacctgcacttcgaggggatctacgacggtggctatctcgtcgggcgcgaccactggcgcttcaacgcgaccgtcgtgatgcgagagcgctcgatcatcgatcctgggtgggctgagattctgcccgagtacatcctcctcgctgacatcttcgacatcgcgatgaacagggagtggcctcgacatggcgacggctcttga

SEQ ID NO: 343822 - DNA, 369 bp, Pseudomonas aeruginosa; identical to SEQ ID NO: 324023

SEQ ID NO: 343823 - DNA, 630 bp, Pseudomonas aeruginosa
atgcctatcactgagcagcagttgctgcatgtcctcccgaacgccggccctcgagccggcgtttttgttggtgcgctgaaccgcgggatgacgcggttcggtatcacgtcgcctgtgcgagtcgccgcgttcctcgcccaagttggccacgaaagcggccagttgacccgcctggtggagaacctcaactacagcgcgcacggcttggcggcgacatggccgagccgatacctaggcgccgacggccagcccaacgccctggcgcagcgcctggcgcgcaactcccgagccatcgccaacaacgcctacgcctcgcgcaacggcaatggcgacgaggcatcgggcgatggctggcggtaccgcgggcgcgggctgctgcaaatcaccggccgggcgaactaccgcgccgccggcgccgggctgggccagccactggagcaggaacccgagcttctcgagcaaccggagtgggcggcgatctcggcggcctggtggtgggccagtcacggcttgaacgacctggccgaccgcggcgaattcgccgccatcactcggcgcatcaatggcggcacgaacggccaggcggagcgcctggcgctgtgggagcgggccaaggcggtgctgtcgtga

SEQ ID NO: 343824 - DNA, 468 bp, Pseudomonas aeruginosa; identical to SEQ ID NO: 343821

SEQ ID NO: 343825 - DNA, 366 bp, Pseudomonas aeruginosa
atgctaggcctcttcggaggacgccaatatggcggaggcgtccaggcaaatggcctgtaccgaatcaacgagaacggcgcgccagaggtattccaggctgcgaatggccggcagtacatgctgccgaacacccgtggagaggtgatcagcaacggcgacgcctccgctcaaggctcgccgcagatcagcctgcagatcatcaacaacggtccgccggtttccgccaccgccgccatggacgggaacaacctgcgggtaactctcgatgcggtcgagcaggactttgccaacaaggtttcgtctggccaggggctttacccgaaagcaatcgaaggcgcctatggattcaagagggcagggcgatga

SEQ ID NO: 343826 - DNA, 291 bp, Pseudomonas aeruginosa
gtggtgttggaccagcaccagtacatggtcgtcctcggccagttgcaacaggttcacccgcagcagcggcccccgttccaggtcgaatggctgcacaacgatggcctgtatccgttcgatcaggccttcttcaccgaacggttcccgctcgatggaaacgctaaccgcaggttgtacctgctggtacgaacgccctccctccagccggaagcgggtacgcaaggtttcatgccgcgcgaccaggctgtcgaagctgcgttgcaaggcatccacgtccagccgcccgcgtag

SEQ ID NO: 343827 - DNA, 135 bp, Pseudomonas aeruginosa
atgagggtcaagacgccgggtttcgagggtctcactgctcaggtcgaggccggttactacgacctcatcaacaccgccgcgctgcgccacatctacaacgtcagcgagttccccggactcaaatactggccttga

SEQ ID NO: 343828 - DNA, 1077 bp, Pseudomonas aeruginosa
atggcagaagaaactgcgaagacgaaccaaaccctcctttgttctgaatgtttcacggatgaaggactgcggatagatgcattcaagctcggcattgaggagcatgtggaatgtccgaactgccacagccaagaaggcagaaagctgacgaaggagcttattgaagctcttgcatggcgtttttttgtaggtggtactaccgtccgttgtgactacggtgcagcgcctgttattcagtgcaacgagcgtcactttgggaggagcgatatattgccctcgatctggctcaaagatgacatcaggcttcttgaggaggctgctcagcttggcttcttccactacggtccacgcctctggatggttggcgaagtcgagccacttaaggatcttcaggacgaattgaagcggtcgaaaatcatcaagcgcgtaatgaaggaatacccagagaagacgcttgaaatggggcagaaattttatcgcctacgaatctgcccacaacgtccagctgatccggcagagtacgacagcccacccattgcactcgctggaaaggggcgactcgactcgccaggctttcccatcatgtacggatcgcaggacatcgacgtttgcattcatgaatgtcgagcatcgacagacgacgacatctacgttgctaccctagagcccaagcggaatttgaggcttttggatcttactcatctactcgaagaagatgtgacggagttcgaaagcttggatatggctatccatatgctctttctggcccgctctcactcctatgaaatttccagagcaattgcattatcggccaaagaagcgggcttcgacggcataatttacccgtcgttctttagtttgattcggactggcggccatccttttgaaaccgcatatggcttatcactgcggcgctgtcatcctgatcgggtaaaatacgcagaggcatatacaataaaaaatttcgccttgtttggacgtccgcttgagaacgacctggtaagcatccaatgcattaatcgtttggtactcactcaggtcggatatagaggacacttcggtcccgtgcagtattga

SEQ ID NO: 343829 - DNA, 858 bp, Pseudomonas aeruginosa
atgaacttagtaaaagctttttgtcttacaaaaggcactcagacgacattcgataaagctcaacatggtctttcggaaagactacgcccaccagggaaagagttgattgacgcttttctctctgcgttcacgagtccaaaccaaagaggtgaacttcaaaactttgatgaatttctcaaagcattgactggagcaccgctgaccgctaacttcgcttatgaccttgtaaagcttttaccgcagacagtgagtggacataggctctggtgctcagctgcaggcgctgatgagcggatgttccctatccatgatattcagtactggaagagcacggacggaaagagcatctggcttcgagtattatttgagaacgaaaatctcacccgacatggcatgtctcgctcccgtctcctgaaagacacagggctacattcggatttccgaattgtttctcaagacttcagcacagacaagactcatacaaccctggaaatgaaaaccccccttccaataacaggatacgcctcagataaaattcatgaactttcaagactcataaaggatcgagtttggtcggtcgtttctacagtgcctccatacagaaagcactacgtatacgcatgcccacaaaatgagcagcagcacgttattccgcagctattaagcatttatgcaatttcatactatctaggttctattacacgataccgaccccaccagcttccgaaaatatcgaaagatatatttggccctctgattcaagattttatcaccgggcaaccgatgcaatttctttacctaatggcttcggagtttgctgaacaggacgtagctaagccagcgatcgttctacaataa

SEQ ID NO: 343830 - DNA, 153 bp, Pseudomonas aeruginosa
atgggtgatatgaatcaggctggttcagcagttttgcacaagcgcattcgtgcgttcggtagcatggccatcggcttcggcttgatgggcatcgatccagtgtccgctgttgcactggcgcttttggctactgtcgtcttggcgatgttgtaa

SEQ ID NO: 343831 - DNA, 846 bp, Pseudomonas aeruginosa
ttgtacaatctcttggtgcggtacggcggatggagcggtcgccgtgacgaggtatcgctcagccgaatctatgttccacaggatgacccggttctccgtcttcctgacggttcagtcaatttcgcagcactgacccaaatcccagctctcttcgtcgaagagactgcacggggcgagacgcaatttgccagagtgggcagcatcacctccatcacggctgcgggcgccagtgtaagcattcaatatagctacgagcctaacgttccacctatcccccacgatgaggtgatgcgtttagctgcagccttggatatcccaatgcctacgcgagggtttactgcttttgagcacagccactggcgtgtacctagggccgatctgtacaaagtgatcgctactgaagtcagtcggacagaccgaaccccgagggttttccagttgcgagagccgcaacttgtagaacaggacttgttgagtgcgatgatgccctttgctggtttcggtggggtttaccacgcaatccaaggagcggctgcaaacaatctcatgcgctgccaccgagctgatgatatttgggagaatcacgcgatcattcaggatgttgtcgacctgattgataggtcctcgattgtggtctgcgactgtactaaccggaatcccaacgttttctatgagatcggggtggctcatgcgctaggaaaagaggttatcctgatcacacagagtggcggggacgtgcccttcgacctagcacacatccggcacatccggtatttcgcgaatgacctgcaccaattgacagtcgatctcactgcacgcattcaggctattcgggcgaggagataa

SEQ ID NO: 343832 - DNA, 399 bp, Pseudomonas aeruginosa
atgaccacattgaaagtcgggattgccggctacgacgaaatgaaggcccgcaccatgcggattgccaagggcgaggaaaagcccgcgcccggcgatccgaaggtgtggttcacatccatggaatccttcgccaaggtgctgtcggcgggcaatcgcgaattgctgcgcgtcatcgaccagcaagcgccgggttcgctggaggaactggccgagatcaccggccgggccaagtccaacctgtcccgcactctgaaacggatggccagttacggccttgtccgcatggagaagggcgaaggccgcaagctcacgcccagggtcatccacgaccgagtagaactagacctgccgctgaccgagcgcgcagggccgcgcaaggcggcaggaggccggcaatga

SEQ ID NO: 343833 - DNA, 354 bp, Pseudomonas aeruginosa
atgagcgaggatcgtgatccgaacctcgacacgcttctggacctcgacggccaggtgctcgttgtcgatcccgagggcggccattgggtgaagttcatcgtcacccgcgttccggcatcgccggagaagccgcacggcctcgattactcgctcacgcttcacgggccttcgggcgaacggttggtcggcttcgacaacgcccatccagtcggccgaggcaggcgcggcgatccgatggaccatcggcaccgcctccagaccgtgaagccctacgcctacgaggatgcggccacgttgctggccgacttctggcaggcggtggacgcggttttgaaggagcgaggcgtaacatga

SEQ ID NO: 343834 - DNA, 315 bp, Pseudomonas aeruginosa
atgtgcgcgagacgccgccatacccaaaggggccgcccacgacagccggctccgcagacgcttcccgatgacctttacgactatgacgacgatcccgcgccgcgcatcagcccgccgcgcggaagcccgcccgatgccttcgacgtggagaagctgcccgtcatcgacgactggccggagaaagtgccgatcaccgaggcagagattcaggtgttcgagcgatggtttgccgatgtcttcgacgagatgttcggcccacttccaaccgtgccgggcttgactaagttatcttcatctgataacaaaaagccatga

SEQ ID NO: 343835 - DNA, 219 bp, Pseudomonas aeruginosa
atgagcaagctgaaactcggcacgttgcccgacgacaagcccgttaaggtgtcacgcgaattgcccgcgacactctttcgagatttgcaactttatggacgcttgttggcaggggcaggacagccgccgatagagccggaaaagctaattgtgccgatgctggaacgcttcctcgccacggatcgagagtttcagaaggcccgccgcgcggccagctaa

SEQ ID NO: 343836 - DNA, 1164 bp, Pseudomonas aeruginosa
atgagtgagaatgacaccaataccgccacgccgatgcggcttcgcgcggaagccccgcgcgtcacccgcctgtcccgcaaggtgctcgccagcgtggcggccgtcgcgctggtcggcgtcggcggcgcgctgatctacgcgctccagacccgcgacggcggcacgggcggcgaagaactgttttccaccaacaaccgccagcctgccgatgggcttgccggcctgccgcgcgactataccggcccggtcctggggccgccgctgccgggcgacctcggcagacccatcttggatgcgcagaacaggggccagcccgtcgtgccgccgacgatcaccacgccgcccgtggatcgcgccgaggaacgccggcttgccgaggaagaagccgcgcgcgtcagccgcgtgttcttccagaccgaggcccgcaccggcagcccggccgcaacgccgggcggcgcgaccacgccgggacttcccggcctcgaccttgccggcttgacagggcaacccggccagcagaccgcgcaggacaagcagcttgcgttcctcaatgcacccgtcgatcgccgcaccacgtcgtcggatcgcgtcatggctccagcctcgcccttcgtgctccaggccggggccgtgatcccggccgcgctcatcaccggcatccgttccgatcttccgggccagatcaccgcccaggtgacgcagcacatctatgacagcccgaccggcagcctgctcctgatcccgcaggggacgcggatcatcgggcagtatgacaatagcgttcagttcggccagcgccgtgtgctgctcgtctggaatcggctgatcctccccaatggccgctctatcgttctggagcgccagccgggcgcggatagccagggctacgccggtcttgaggatggcgtcgattatcattggtgggatttggcgaaggccgccggcctttcgacgttacttgcggtcggcacggagctggccgtcagcgacgaggaccgccttgtgcgcgccatccgcgacggggcgcaggacaccatcaacgacgccggccagcagatcatccgccgccagttgcaggttgcgccgacgctcacgatcaggccgggcttccccgtccgcgtgatcgtcacccgcgaccttgtgctcgaaccatacagaggttga

SEQ ID NO: 343837 - DNA, 957 bp, Pseudomonas aeruginosa
atgaggacgatcatccgcaccccggcgattcccgccgtcctgctttccgcaaccatgcttgccggctgcgcgacctacaaaccgccgcagatcagctacgatgcgagcgtgccgccgttgccggccgtccccgcggccgtcaccgacgaccggccgcggccgatccatatcccgcccgcctggaccgtcgcacgcggcggcaccgccgccggcacaccgaccgcgcgcgtcgagaacgccaatgccgccgcccgcgtgcagccgcgccgcgagggctattacaactccatccagatttacccgtggagcgacggcgcgctctatcaggtctatgccgcgccgggccagatcacgaacatcgccctggagccaggcgaaagcctgaccggcgcagggccgatagcggccggcgacacggcacgctggattatcggcgatacggaatccggttcgggcgtcacgcgccgagtccatatcctcgtgaagccaagccggccggacatcaccacgaaccttgtcgtgacgaccgaccggcgcgtttacatgctcgagctgcgctcgggcgagaagccctatatgcccgccgtcgcttgggcctatccgcagcagccggccgggcagcggcaggcggtgccggccacgccggtcatcccggccgtcgccgcgcgcaactatcgctatggactgacaggcgacaatccagcttggaagcccgtcgccgtctatgacgacggcaggcgcgtctatgtcgagtttccgcgcggcatcgttcaaggcgaaatgccgccgatcttcgtgctcggcgcggacggcgaggcgcagatcgtcaacagccgcatccatcaacacatcctgatcgtggaccgcctgttcggcgcggccgagctgcgccttggcagcggcgaccgccaacagaccgtcaggattgtccgcacagacgggaggccatcgtcatga

SEQ ID NO: 343838 - DNA, 690 bp, Pseudomonas aeruginosa
atgagcatcttcaagcgacccgccgtgcattacggcaagaccccacaacccgaaacgccttatcagcgcgccgcgcaggtttgggatgagcgcataggctcggcccgcgtgcaggcgaagaactggcgctacatggcgttcggcagcctgatcctttcggccggcttcgccgccgcgcttgtctggcaatcggcgcgcgggaccgtcgtgccctgggtagtccaagttgatcggctcggccaggcgcaggccgtcgcgcccgccacagccgacttccgcccgaccgatccgcaagtggcatggcacctggggcgctttatcgaacaggtcaggagtatccccgccgatcccatcatcgtccgccagaactggctacgcgcatacgagtggacgactgacaggggcgcggcggcgctcaacgactatgcgcgcgccaacgaccccttcaccaaggtcggaaagcaacaagtcgcggtcgaggtgtcgagcgtcatccgcgcctcgccggatagcttccgcgtcgcttggaccgaacgccactacgaatccggccagctttcaacaaccgagcgatggaccgcgatcctgaccatcgcaatccagccgccgcgcgataccgaacggctgcgcgccaatccgttgggaatctacgtcaatgcaatttcgtggtcgcgggagatgagccaatga

SEQ ID NO: 343839 - DNA, 1314 bp, Pseudomonas aeruginosa
atgggcggcgcaggcgtcatcgacaattttctcggcacgttcacgcaatacatcgactccggcttcggcctgttgggtggcgaggtggcgttcatcgccaccacgctcatcgtcatcgacgtgacgctcgcagcgctgttctggagctggagcgcagacgacgacatcattgcgcggctggtgaagaagacgctgttcgtcggcgtcttcgcctatcttatcggcaactggaacaacctcgcgaagatcgtcttcgacagtttcgccggcctgggcctgaaagcatccggcacgggcttcaccgcgcaggatttgatgcggcccggcaaggtggcgcaaaccggcctcgacgcagcgcgtccgctgctcgattccatttccgacttgatgggctggatcgcgttcttcgagaacttcattcagatcgcgtgcctgctgttcgcctgggcgctcgtcatcctcgccttcttcattttggcgatccagcttttcgtgacgctgatcgagttcaaattgagcacgttggcaggcttcgtgctgatcccgttcggcctgttcggcaagaccgccttcatggccgagcgcgtgcttggcaatgtgatttccagcggcatcaaagtgctggtgctcgccgtcatcgtcggcatcggctcgacgctgttttcgcaattcacgcaaggcttcggcggccagactcctagcatcgacgacgccatggccatcgtgctcgcggcgctttcgctcgtcgggctgggcatcttcggccccggcatcgcttccggccttgttagcggcggcccgcagctcggcgcgggcgcggcggtcggcaccggccttgccgttggtggcgcggcgctagccgcaggcggtgcagccgggcttgccgcaaagggaggcgctgccgccgtgcgcggaggcgcgaccgcagccggcgctgcatccgccgcctatagccttggctcgctcggccagtccggcgcggcgggcgtggcgtccggcctgggcggcgtggcgcgcgccgtaggcagcacagccacatcgccgctgcgccgggcggcggcaagcgtcaaatccagcttttccgatggcgtgaaagccgggttcggcgcgaccggcggcacatcctccatgggatcggccggcagcacgtccgcatccgcgccggccgctggcacatcgcccggttgggcgcagcggatgcgccaatccggccacaccggccatgccgtccagacggccgcgcacgccgtccgctctggcgacagccacgcctctggttcttccgtcaacctctctgaaagcgaccgcacatga

SEQ ID NO: 343840 - DNA, 276 bp, Pseudomonas aeruginosa
atggacggcaagatgctggcccggctgggcgcaatcgtattcgtggccatcgccatcacggcgacagccatcgaaatgacccgcaaggaagacgcgccggcatcgccgccgcgtcttctccagcccgaacgtgacccgctgcgcgaagggcagcgccggtgccagcagcttggccagcaggccgccgacgacgcggaatgcctacgtgtatgggccgaaacccgtgaccgctttctcggccggacgcgcgcgccggccgcaccggaagggcggtga

SEQ ID NO: 343841 - DNA, 774 bp, Pseudomonas aeruginosa
atgaccattcgtcttttccgctcgcgtgccatcgtcatggccgcaacgatgctcgccgccccgctggccgtttcgtccatgctggcaacgccggcacatgcgcaattcggaaggatcgtcttcgacccgtcgaactatgcgcaaaacatcctcacggccgcgcgcacgctggagcagatcaatcatcagatcacctcgctccagaacgaggcgaccatgttgatgaaccaggcgcgcaatctggcgagcctgccgttctcgtcgctccagcagcttcaacagaacgtccagcgcacgcagcagcttttgagccaggcgcagaacatcgccttcgacgtgcagcgcatcgaccaggcgttccagcagcaatacggcaacgtgtcgatgtcggcgacggatcagcagctcgtcgccaacgctcgcacgcgctggcagaacaccgtaggcggcttgcaggacgccatgcgcgttcaggccggcgtcgtcggcaacatcgacagcaaccgcacgcagatgtcggagctggtcggccagagccagaacgcgaccggcgcgctccaggcgacgcaagccggcaaccagcttctagccctccagtcgcagcagctttccgaccttgttgcgttgctcgcagccaacggccgggcgggcgcgctgaccgaggccgaacgcgcagcggcggccgaacaggggcgcgagcagcgccgtcgcttcctcacgcccggcaacggctaccagcccggcaacgcgcaaatgttcaacaacggcaattga

SEQ ID NO: 343842 - DNA, 2457 bp, Pseudomonas aeruginosa
atgatgaacctcgccgaatatcgccgcaccgccagtcgccttgccgactttctgccctgggccgcgctggtcggctctggcgtcgtcttgaacaaggacggctcgttccagcgcacggccaggtttcgcggtcccgatttggattccgccgttgcggccgagctggtcgccgtcgccggtcgcatcaacaacgccttccgccgtctcggatcgggctgggcgattttcgtcgaggcgcagcgcagcgaggccgcgacctatcccgacagcacgtttcccgatccggcgtcggccttgctcgacgccgagcgcaaggccgccttcgaggaagccggcgcgcatttcgtgtcgggctatttcctgaccttcctctacatgcccccggccgaggaagccgcccgcgccgaaacctggctctatgaaggccgcgagcaatccggcgtcgatccctatgaagtgctgcgcggtttcatcgaccgcaccgaccgcgtgctcgcattgctcgacggcttcatgccgtcctgccggtggctcgacgacagcgaaacgctgacctacctccattccaccgtctcgaccaaccggcatcgcgtccgcgttcccgaaacgccgatctatctcgacgcgctgctcgccgaccagccgttgaccggcgggctggagccgcgccttggcgaccagcatctccgcgtcctgaccgtcaccggctttcccaccgcgacaacgcccggcctgctcgacgacttgaaccggctcgccttcccgtatcgctggagcacgcgcgcggtcctgctcgacaagaccgacgcgacgaagctgctcaccaggatcaggcggcaatggttcgcgaagcgcaaaagcatcgccgcgatcttgaaagaggtgatgaccaacgaggcatccgttctcgtcgatacggacgccgccaacaaggccgccgacgccgacatggccttgcaggagcttggggcagatgtcgccggcatggcctacgtcaccgccaccatcaccgtatgggacgcggaccccaggattgccgacgagaaattgcggctggccgaaaaggtcatccagggccgcgacttcaccgccatggtggagacggtcaacgcggttgacgcatggctcggcagcttgcccggccacgcctacgcgaacgtccggcagccgcccatcagcactttgaatctcgcccacatgatcccgctttcagcggtgtgggcggggccggaacgggacgagcatttcggtgcgccccctctgctttatgcaaagaccgaaggctcgaccccgttccggttttcccttcacgtcggcgatgtcggccatacgctcgtcgtcggccccacaggcgcgggtaagtccgtcttgctcgcacttatggcgctccagttccggcgctacgaccgcagccaagtcttcgccttcgatttcggcggcagcatccgcgccgcgtcgctcgcaatgggcggcgactggcacgacctgggcggcggcctgaccgaaggttccgacgcttccgtatcgctccagccgctcgcccgcattcacgacacctatgaacgcgcctgggcggccgactggatcgtggccatcctcatgcgcgaaggcatgacgatcacgccggaggtgaaggaacatatctggacggcgctgacctcgcttgcctccgcgccaatcggggaacgcaccatcaccggcctcgcggtgctgctgcaatccaacgacctcaaacaagcccttcggccgtattgcgtcggcggtccttatggccggctgctcgatgccgaagccgaacatctcggctcggccgacgtgcaggcgttcgagattgaggggcttgtcggcacgggagccgcgcccgccgttctggcctacctgtttcaccgcatcggcgacaggttggacgggcggccgacgctgctcatcatcgacgagggttggcttgcgctcgacgatgaaggctttgccggccagctccgcgagtggcttaaaacgctgcgcaagaagaacgccagcgtcatcttcgccacgcaaagcctgtccgacatcgacggcagcaacattgcgcctgcgatcatcgagagctgcccgacgcggctgcttttgccgaacgagcgtgccatcgagccgcagatcaccgccatctatcggcgcttcggcctcaatgaccgccagatagagttgatcgcccgcgctacgccgaagcgggattactactgccagtcgcggcgcggcaatcgcctgttcgagctgggcctgtccgaaatcggcctcgcgctctgcgccgcatccgccaaatccgatcagacgctcattgcgcagatcgtcgccgaacacggccgcgacggctttctcgcggcttggctcacgacccgcgatgtcggctgggccgtcgagcttcttccgaacttcccgacgctgatcccccaaaccgaaaaggagtcccaaccatga

SEQ ID NO: 343843 - DNA, 282 bp, Pseudomonas aeruginosa
atggccgccgtcctcgaacaactcgacgcggtgccgggattttcggtcccggtccatcgggcgctgaccgagcacatcatgctcggcggcgcaccgcgctccatcgccatcatgaacggcacgctcgccggggccgtgggccttggcctgcgcctctggcttgtgggcctcgccatatgggccatcggccatttcgcggccgtatgggcggcgaagcgcgacccgctctttgtcgaggtggggcggcggcatctgcgcatccccgcaaaccttgcagcgtga

SEQ ID NO: 343844 - DNA, 984 bp, Pseudomonas aeruginosa
atgacatccacacaccataagccggaagcgatacagcgcggcgcgcgcatgttgcgcaccgcgctcggcgcggccatcgcccggtttctggaagacccggccgtggttgaggtcatgctgaatccagacgggcgaatctggatcgaccgactttccgaagggctggccgacacgggcgaaacgatgtcgccggccgatggcgaacgcatcgtccgtcttgtcgctcaccacgtcggcgcagaggttcacgcgcgatccccgcgcgtctcggcagagcttcccgaaaccggcgagcggttcgagggacttttgccgcccgtcgtcgctgcaccggcatttgcgatcaggaagcccgccgtcgcggtgttcagcctcgacgactatgtggcggccggcatcatgtccgccgaccaggccgtgacgttgcgcgaggcggtcgcatcccgcgccaatgtattggtggcgggcggcacctccaccggcaagaccacgctgaccaacgcgctgctcgccgaggtggcgaagggcgcggatcgcgtcgtcatcatcgaggatacgcgcgagctgcaatgcgccgcgcccaaccttgtcgccatgcggacgaaagacggcgtggcgacgctatccgatcttgtgcggtcctcgcttcgcctgcgccccgaccgcatccccatcggcgaggtgcgcggcgcggaagccctcgacctcctgaaagcgtggggcacgggccatccgggcggcatcggcaccatccatgccggcaccggcatcggcgcgctccgtcgccttgaacagctcattcaagaggctgtcgtcacggtcccgcgcgccctgatcgcggaaaccatcgaccttgttgccgtcctttccgggcgcggttccgcgcgccggctggccgaactcgcccgcgtcgaagggctggggtcggacggcgattaccgcatcacccccgcaatccccaacagcacaggagaacccaaatga

SEQ ID NO: 343845 - DNA, 462 bp, Pseudomonas aeruginosa
atgaccacccgaacccgcatgaacgtctatttcgccccggacttgctcgcccaggtcgaggcgctggcgctgcgccgccaagtgtcgaaatccgccatcgtcgaggcagccgtcgcttccttcctgtccggcgacagttcggatcggctggaggcggccatgtcgcgccgcctcgacaagctcggccgcgagatccacgcgctcgacgaggatcttgccgtgctcggcgaaaccgtctcgctgttcgtcaacatctggctttccgccacgccgccgctgccggagagcgcgcaggccgccgcccgcgcgaaaggtgccgaacggttcgagggtttcatgcagacgctcggccggcgtcttgcgaccggcgacaggttcctcaaagagttgtcgcgcgatgtcgattcgcttcccgatagtccatcgcaagatcagttcgaggccgatggcagcgtaacctga

SEQ ID NO: 343846 - DNA, 1989 bp, Pseudomonas aeruginosa
atgcgcggaggccgaatcctttggggtcagatcgccgtcgtcttcaccatcgttctggtgatgacttgggcggcgacgcaatggaccgcatggcgtctcggctttcaggcgcagctcggcaatccatggttcgagctggctggctggccgatctactacccacccgcgctgttctggtggtggtatgccttcgacgcctatgcgccttcgatcttcgtcgagggtggcgtcatcgcagcgtcgggcgggcttatggccatcgccgccgcaatcatgatgtcgatcatccgggcgcgggaggcgcgcaacgtcgccacctatggatcggcacgatgggccgaggacaaggaaatccgcacggccggattgctcggccccgatggcgtcgtgctcggccggcgcgaacgcgactatctgcgccatgatgggccggagcatgtgctttgcttcgcacctacgcggtcaggcaaaggcgtcggcctcgtggtgccgacgctgctaacctggccgggaagctgcatcgtccacgatataaaaggggagaactggacgctgaccgccggcttccgcgcgaagcacggccgcgttctgctgttcgatcccacgaacgccagatcgtcggcctacaacccgctactggaggtgcgccagggcgaatgggaagtccgcgacgtgcagaacatcgcggatattctcgtcgatcccgaagggagcttggatcgaagaaaccattgggagaagacgagccacagcctgcttgtcggcgcaatcctgcacgtcctctatgccgaacccgacaagacgctggccggcgtcgccagcttcctttccgatccgaagcgccccgtcgaggcgaccttgcgcgcgatgatggacacgccgcacctgggcgaagccggcgttcatcccgtcatcgcgtcatcggcccgcgagctgttgaacaagagcgagaacgagcgcagcggcgtgttgtccaccgccatgtcgttcctgggtttgtatcgcgatcccgtcgtggcgcgcgtcacggcgcggtgcgactggcgcattgccgatcttgtcggcagcaggaagccggtcagcctctaccttgtcgtgccgccgtccgacatcaaccgcaccaagccgctcattcgcctgatcctcaatcagatcggcaggcggttgacggaggaattgcacacgtccggcaagcggcatcgactgctgttgatgctcgacgagtttcctgcgctcggccggctcgatttctttgaatccgcgctcgccttcatggccggatatggcctcaaatccttcctgatcgcgcagagcctcaatcagatcgaaaaggcttacggggcgaacaacagcgtattggataattgccacgtccgcgtcgccttcgccacgaacgacgagcggaccgcgaaacggatcagcgatgcgcttggcaccgcgaccgagttgcgcgactctaccaactacgcaggacacagattagcgccatggctggggcatctcatggtgtcacggcaggagacagcgcggccgctgctcacgccgggcgaggtgatgcagctcccgccatccgatgaaatcgtgatggtcgccggcacgccgcccatccgcgcgaccaaggctcgctatttcgaggatgcgcggttcatggaacgcatcctgaccccgcccgatccggcagccgatcccgccgccgcgaacccgtcatccgacgattggtcgagccgcatcgtcgcggcgacgaaagcagcggccccggccacggccggcgggaccgaaggcgatccggccaatgccggtatccgccgcgagccggaattgccggagcatgaggaaatcatctcgccgccacgtccgcccgaacaggagttcgacattctggacgatgaaccggacgttgacgccgccaaagcccgcgcgctgcgccagcgtatgcggatggtcgcgcggcaagcgtcgctggaccccggcgacggcatcgagctttga

SEQ ID NO: 343847 - DNA, 942 bp, Pseudomonas aeruginosa
atgatcgaccgcaaatggggagtgccgacctcgttgggttcacgcattcccctcgcgtccctcattcaaacgctcgccgtcgccgaatatctgaacttccggcacgctgcgaacgcactcggcgtcagcctgtcgagcgtcagtgctcgcgtgaagacgctggagcaagaccttggcgttttgctgttcgagcgccatgcgcgaggcgtccggctgacagaggccggtcgccagttcgtcgagcatgttgcggccggcgtcgatcaactcgaccatgccgtgaagaccgccggcatggcggcgtcaggagagtgcggacgcctgcgcatcggcgtccatgccctgatccctcgcagcttcctcgcaggactgatcggacagtatcgcgaagactatcccggcatcgaagtcgagatcacggaaggcacagcacgcgatgcggttatgcaattgcgcgccgaccgtctggacatcgtattcatggcaggcacgcccgagctacccgactgccacacgcggcggatatggaccgaaccgctggtcgccgcgctgccggataggcatcggctcgccaagcaagccgccgtcacctgggccgatctagcgggcgagacgttccttgcccggcacggcggcaccggcccacaagtccatgaccatatcgtgctgcgccttgccggacgctggccggcatcatctatccaacgcttcgatgtcgagcgcggcacgctgctttccatggtcggacagggcttcggcgtcaccatcgtcggcgcggctacgtcgctgctacgaacttccgacgttactttccttccggtcgcggacgaaccggagccggttcctttctcggccgtctggtcgccattcaactgtagcgcggcacttcgcaatttgctcaccctcgcaagagaaatggggcgaactatcccggcggattga

SEQ ID NO: 343848 - DNA, 1410 bp, Pseudomonas aeruginosa
atgcgtcatcccccgttcccggcactactagcctctcttagcgttgcggcctgcacggtcggaccaagctatgtcgaatccagcccggcggtggcgcccggctggatttcggctgccaacccacatccgattgatgaagattggtggcgctcgttcaacgatccacagctcgttgaacttgtggaattggcagtaaccagcaaccacgacgttcgggaggcggaagcgcgcctacgcgaagcgcgggcgctgcgcgacgtcgcacgcggtcgcgccggtccagatgcagcattatccggcgcggccacggcgaaccgcgtcagcgaaaacggtcaattgccggttgccaatgttccggggttcgatcctcaattttcccttttcgatttcggattcgatgcgtcgtgggaaatcgacctatggggccgaacacggcgtagcatcgaagcggcggacgcccgtgcagaggcaattcaggaagcccggcgcaatgtcatcttacaggtgatcgcagaggttgtccgaagctacgtcgatctacgcggctcccaaactaggctgttggttgctcgcgcagacgccaacgcacagcaggccatcgccagcctggtcgaaaggcggtttagggccggcgaggcgtcgcgctttgactttgctcgtgccgacacacaggctcgggcagccagcgtaagccttaatgggattgaggccgacgcgcgcgcggcagcctatcgcttatccttgctaactggccaagcaccgggggcgacttcacttcggctgttgagccctgggtcgcttccggttgctccatcgcaggttacggctgggcttccatccgaactgttaaggcgacgcccggatatacgtcaggcagagcgcgaattggcggctttcaccgctgacgttggcgtggccacggctgacctctttccgcgactatcgctcattgggtcgattggtcagcaagctcagagcgcgggcgatctggcatcgggggcgagcacacgattgcaagttgggccgagcttccattggcccatattctccatggggcgtatccgagcgcagattcgggcggcggatgcccgagccgatgcagccatgatccgctacgagcggagcgtaacgggcgcgcttactgacagtgagacggcgcttaaccgatatgccgccgcacagatcatgcgccggaaagcggagggggcgacaacgcaggcggccgctgcggtcgatcttgcccgccagcgctaccaggctggcgaggacgacctaacgatattgctgaacgcgcaatccgcatacagcgctgcggagcgtgcgagccttgatgctcgcgtcggcgagttgatggccgttgtcgctctctacaaggcactagggggcggatgggaggccgccgtctcatga

SEQ ID NO: 343849 - DNA, 1125 bp, Pseudomonas aeruginosa
atgatgagttccgccagcttcgcgcgactatctgcgatcatcgtgaaagagctatgggcggtctttcgcgaccccagggctcgcatcacccttattgcgcctcccttgctccaactcgtcctgttcggattcgcagcgacattggaagtgcgcaacttcgacgttggcgtgctcgaccgcgattccggcatctggagccatgaaattgtttcgcgggtggcaggcagccccaacgtcggccgcatcgtgccgctcgcctcgcccgacgacatgcgggaggcaatcaacaatcagcaggtcatcgccgttctcagtttcgattcgcgattcagcgcggctatcgagggcgggcagattggcgaggttcagatcgtcctagacgggcgacgctcgaacgcatcgcagatcgtttcctcatacctgcaacagatcattggccaggtcgcagccgaagcgcgccccgccgcaactccagggcagcccactacccgaaccgtcgtcaccaactggttcaatcccgcgctgatatatctttggttcgtgatgccggcgttgcttgtaaccctgggcgcaaccggcaccttgtcgattacggctcaatccgttgcccgcgagcgggagctaggcaccttcgatcagcttatggtttcgccgttgagggtccacgaaatcctcattggcaagatggcaccgcctttgctgatcggattcttcaatgccacgctctatgtgatccttatccccacggtcttcggagtgccgcttaccggctccgtggcgtcgttctacttctctctgttcttctatgtagtgtcgctgatcggcgtcgggatgctggtatccacgttgtcgcaaacccagcaacaagcctttctcggcatgtttctggtgacggtgccgctaatcctgctgtccggcttcgccactccagtcgataacatgcccggctggctacaggtgatcgctttcgccaatccctgccggcatttcctcgtcgtctccgaaggcgtcttcctgaaagacatgccggcggcggtcattctcgcgaacacatggccgctggcggctatcgcgtccgtcacgctgaccgtttcggcaattcttttccgcgctcggatggagtag

SEQ ID NO: 343850 - DNA, 1128 bp, Pseudomonas aeruginosa
atgaacgaccgcttctatcctcgacgcttcatggccctgctcgtcaaggagtcgctacagattctccgcgacccctcgacgatgctgattgcctttgtgctgccgctgctcctgcttttcctgtttggatacggtgtgtctctcgatacggcgaggacgcggatcggcttggcggttcaagattccagcgaagcggcggccagcctggcgggggcctaccgatcatcccggtggtttcaggttcaatcccggcgcgacgtgacttcgctcaaggatgaactgatcgctgggcatatccggggcatcgtggtcattccgagtgatttcggccagagggtcgcagccgggatcgacgcgccgatccaggtgattaccgatggctcgctgccgaacacggcatcctttgtcgccgcctatgccgaaggtgttcgggctacctgggcggaaggccgtgcattggatcgtggtgtgcgactagctcccgcaatcgccccgctgccccgcttctggttcaatccgggcctcgaaagtcgcttcgctctcattcccggctcgatcagcattgtcatgacgatgatcgggacgcttctgaccgcgctcgtcgtcgcgcgggaatgggagcgcggcacgctcgaagcgttgatggctacgcccgtcagcatgggcgagttcctggccacgaaaatcattccctatttcgtgctcgggctcggttcgatgacgctctgcgtcatcgtcgccgtcttcctgttcggcgtgccctttagagggtcgatcctcgcgctgtatgcggttggcgcggccttcctcatgccagcattgggccaaggcttgctgatttcggcggcgacgaagaatcagttcgtggccagccaggttgcgttgctaacggcatttatgccgggcctgatgctgtctggatttctgttcgagatcggctcgatgccgaaattcattcaggggatgacctatgcggttccagcccgctacttcatcccgcccctgaccagcgttttcgtggtcggcgatctttggccgatgttcgttcgcagcatcctggcgatgctgggtttcggcctcctgttcttcggcctcgccttccgagtgacgcgccggaggatcgcatga

SEQ ID NO: 343851 - DNA, 1731 bp, Pseudomonas aeruginosa
atgacagaggcagtcgcccacgctgtagatgtcaccaaacgcttcgcgcccaatgcagccccggcacttgatgccgtgagcatggaggtgatgggcggcgtgatgacgggcttggtcggccccgatggcgcgggcaagacaaccctgatccgtttgctcgccggattgctcgacccggatgaaggggaagttacccttcttggcgagcccgccatcgcggccgacaggtcggcgctaggctacatgccgcaacgcttcggactctacgaagacctgtcggttatcgagaacctttcgctctacgctgatcttcgcggtttacccccagggaaagaacgcacggagcgcttttcccaactcctgtctttcacggaccttgagcgattccgcccccggttggctggccgtctatcgggcggcatgaagcaaaagctgggcctggcctgcgcgctggtgcggccccctcgcgtgctgctgcttgatgagcctggcgttggcgtcgatcccgtggccaggcgggaactatgggcgatggtccgccagctcacgacggagggcatgggcgtcgtctggtccaccgcctatctcgacgaagccgagaagtgcgatacggtattcctgctgaacgaaggcaagctgctgttcagtggaccgccgaagcggctgacatcccgtgtcgaaggtcggacctatcgtctgtttggtccttccgaaagccggcggtctttactcgccagccttgtccttcgcgacgatgtaaaggacgccaccattcagggcgcttccgttcgcgtcctcatggacgaaggcgctgctgcgccgaccacagaacgattcggaatgtcgcagggcgaccgaatcgaagccgtgcagccgcgatttgaggatgcgttcattgacatccttggtggaggaccgaaaggcgtcagccaactcgccgcgagctacaagcccatcgaaaagtccgacgcgccggccatcgaggcgcgagggcttaccaaggtgtttgggacgttcacggcggcaggcgacatcacattctccgtgccgcaaggccggatattcggccttctcgggccgaacggcgcgggcaaatccacgaccttcaagatgctttgcgggcttctcacgccgacagcgggcgaaggccgcgttgccggccatgatcttcgcaccgccagcgcggaggcgcgtcagtctctcggctacatggcgcagaaattttccttgtatggcgatcttagcgtcaaacaaaatctggacttcttcgccggagcctatggcttgaaccgacgccagcgggccgaggccgttgcgcgcgtcatcgacattttccagcttgaacgtcatctgccggtgaacagcggaacattgccgctaggcttcaagcaacggctctcgcttgcctgcgccgtgctccatcaaccgcccgtgcttttcttggatgagccgacatcgggcgtggaccctatcacccgccgcgagttctggttgcacatcaacggcctcgtgcaacgcggcgtgacggtgctcgtcaccacccactttatggaagaagcggaatattgcgaccgcatagcgctgatctatcgcgcgcaggaaatcgcccaaggcacgcccgaagacctcaaaacccgcgcggctgaaatcagtggcggcacagaccttacgatggaggacgcttttattgcgctgatcgaggaaacggatcgaaagcgggaggccgcatga

SEQ ID NO: 343852 - DNA, 1008 bp, Pseudomonas aeruginosa
gtgccccgccgcatcatcatcctggcagtcatcatcgcgggcgtcgcagcggcgggatactacactcgcggcttcggcttcttggacaagcccaacgaggggctgatcctctatgggaatgtcgatattcgtcaggtgaatctcgggtttcgcgttgcgggtcgtatcgccgaaatgccgattgatgaaggtgcttcggtcgaggctggggcaactctggcccagcttgaccaacagccattcattgacgcgctggcgggtgcggaagcgcaggttgcgaccgctcgcgccgaactcgaaaaacggcgcaacgggaatcgaccccaggaaattgcccaggcggaggctgcggtcgccgtccgaagggcggacatggtgcgaacacgagaagccttccagcgtcgccgagcgctggttgcgaccggcgctgtatcccaatcggttttcgaggccgccgaggctgaatacctcgccgccgaggcgcagcttcgggcggcagaggaagcattggcgttgcttcgcgccggctctcgcgtcgaagacatcgcggcagcggaggcgcaactcgcggcggcgatagcagaacgcgatagggtgaaaaccaatctggccgacacgacgcttaaagcaccggacgctggcacgatcctcacgcgagcggccgagcccggtgccatcgtccaatccggcgcaactatcttcacgctcaccatcaatcggccgatccgggtgcgcgcctatgttgccgaacccgaccttgggcggattgcgcccggcatgaccgtgttcgtaaccactgacggcaaccccaaagtctatcgtggtgtcatcggcttcatttcaccaaccgccgaatttacgccgaggacggttcagaccgaacaactgcgcgccgacctcgtttatcgtttgaggatcaacgtcaccgatcccgatgaccgtctccgtcaaggtcagcccgtgaccgtgaggctccagcagagcccggacccaggggcgggccagtga

SEQ ID NO: 343853 - DNA, 687 bp, Pseudomonas aeruginosa
atgtcgggacgaaagatcgagcgcggcgatcaaactcgcgagaagctgcttatcgcagccgtggatgttttcgggcgtgtcggcttcgacggcgcgacgacccggatgctttgcgagaaggccggggcaaaccagcaggcaattgcctactacttcggaaacaaggacggcctttacctcgctgcggccacctccatcggggatggcatcaaggatcatatcgccccgctgcgaagcctcgtctttgcccgtgtcgaagaagcgcgctcgggaacgccacttggaacggatgaggcacgccgcctgctgaccgagatcattcagcggatggcggcgctattcgtgagcagccgttccgagccttgggcgcgcttcattatccgcgagcagatgcagccgactacggcctttcgttgcctctacgacgacttgatgggaccgctgctcaatatatgtgaccatctaattggaaccttgctcgacgaagactctgcttccgagcatgtgcgcctcagaaccctcgcattggttggaagcgtcctcatgttcaggatggggcgcgcttcggtcctcgccgcgctcaattgggagacgatagacgacaagggcctcgcggctgttgaggctttggtggtcgaacttgtcgcgtccattgcgcctgcctcctcgaatgtggggggcgcatag

SEQ ID NO: 343854 - DNA, 2052 bp, Pseudomonas aeruginosa
gtgagcgccgacgacgaaaaccgcttccgcccgaagcccggccgcatccgatccgacgcgccgaagggcggcaagaccaagagctttctaacccaggcgaagaagatcgctcgacagcacagcaccacgtcatccagatcgtcgccgcgcccaggcaagaccccgaccgccaagggcggcaagggagcgcgctcgactggaggaccgggcgtccggcgtggacgcggcgcggccttcgtgcgcgctcgcaccctgtcgggcggctggcgtcacagcgcgcccggaatgcgccgcgtcgtcgtcaagacccgctacgtcaaggaggcgggcaggaacggaagggcggccgcccatctgcgctacatccagcgcgacggcacatcgcgcgacggcgagcgcgggcagctctattcggcgaccgaggaccgcgccgatggcgctgccttccttgagcgcggccaggaggatcgccaccaattcagattcatcgtctcgccggaggacggcgcggacctgtcggacctgacagcctatacccgcgacctcatgcgccagatggaagccgaccttggcacgaaactcgattgggttgcggtcaatcaccacaacaccggccatccccatgtgcatgtcatcgtgcgcggcaaggatgacctgggcgagaaccttgtcatcaacggcgactatctcgccaacggcatccgcgagcgggcgagcgaattgaccacgctggagcttggccccgtcaccgagatcgagcagacccgcaagctgtcggccgagatcgaccaggaccgtttcacacgcatcgaccgggctatggtcgaggaagccgacgataggttcctcgaccttcgccaagagccggccgagccgcgccgccagttcaaccgggcgcttcgcctgcgccgtctcgccaagctggacaagatggggttggcgaccgagcacgcgccgggcgtttgggaattgagcgagcgcatggagccgaccttgcgcgagatgggcgagcgcggcgacatcatccgcaacatgcacaaggcgttgaaggccgatggcctggagcgcgacccgctgaccttccaaatccatgacgggccgcccgaaaagcccatcgtcggccgcgtcgtcgataagtatctgtccgacgagctgggcgagaacctgaccgtcgtggtggacgggatcgacggccggacccaccatgtcgccggcatcgacccggcccgcgtcgaggacgcgcggataggcagcgtcgtcgagatcggcccggccgaaacggcaagccgtccgtccgaccgaagcattgccgccatcgccgaggacggcatctaccggccgagccggcatctggagcaggccaagttcgaggggcgcgttccgggcggcgattatgaaggttatgttgatgctcatgtgcgccggctggaggcattgcgccgcgccggcatcgtcgagcggatcgacgccgaccaatggcgcatccccgaagatttcgagagccgcgccgccgcctacgacgccggccgcaaccggcaggccagcgttcgcgtcctttcggtgctcgaccttgaaaagcagatcggcgcggacggcgcgacctggctcgaccggcgcttggttacgcccgacgcaaccgaccttgcatcggccggcttcggccagcaggtgcgcgaggcgatggaccagcgccgcgagcatcacgtcgagcatggtgacgccacgcgcagccgggacggccgaatcttctatcggcgcaatcttctcgcgacgctgcgcgagcgcgaggttgccagcttcggcacggcgatggcggcgaacaagtcgctgccgttccgcgccgtcgccgatggcgaaaccgtcagcggcaagttcactggcaccgtgcagctaaccagcggcaagttcgccatcgtcgagaaagcgcacgagttcacccttgtcccatggcgacctgtcatcgaccgccagctcggccgtgaagtcgcgggcgtcgtgcagggcggttcggtgtcgtggcaattgggccggcagaagggtttggggctgtag

SEQ ID NO: 343855 - DNA, 579 bp, Pseudomonas aeruginosa
atgaagatcgcctatgccgacccgccttatatcggctgcgcacacctctaccgcgaccatcccgactatgcgggcgaagtcgatcatgcgcgcctgatagagcggctggatcgcaactatgacggctggattttgcacgccgccgcgacgccccgttccattgcgacgctcgccccatttgtcgagcggacgggcgcgcggtggatggcctgggtgaagggattcgccgcgttcaagcgcaatattcccgtcgcgtttgcgtgggagccggtcatcgtgaaggcggcgcgaaagcccgtcgtcagcaagcgcctggtgatgcgggattggattcaggagagcatcaccctgcgtcgcggcctcactggcgcgaagcccgaagcggtctgccattgggcgttcgagatggtcgccgcgcgccccgacgacacgctcgacgacctgtttccaggcagcggcgcggtcgccgaagcgtggcgcacatggcgtctcaaattcgcattgccggacgagccggcggcgcgggtcgctgcacccatcggtgtgcaggatcaggcagcggatggagcagaaccatga

SEQ ID NO: 343856 - DNA, 843 bp, Pseudomonas aeruginosa
gtgcgcgttccgatcatccctttgttcgcgggaacgcactcgcatcccttcgtcccgctcggcgacaagacggccggcgcgcgcagcgaaggtcaagggcggccaccggccggcgctttgcgcgcaccctttaccgtagcgagcacgctggcaggctggcgtcatagcggcgacaggaagccatggcgctatgccgtcctgttgctggccggcgcactatcagtctgcgccggatcgggcgtcgcggtcgcgcaatccgcgtcggtcgtgcgcccggttgccgtcgatccctatgccgcgcacatcaccgaggcgtcgcagcggttcggcatccccgagcactggattcgcgccgtgttgcgcgccgagagcgcgggcgacgtgcgcgcgatttcgtcggccggcgcgatgggattgatgcaggttatgcccgacacttgggcgggcctgcgtgcccgtcaccggctcggccgcgatccctatcagccccgcgacaacatcctcgcaggcacggcctatctgcgcgaaatgtgggatcgctacggcaatgtcggcgcgatgctcgcggcctacaacgccggccccggccgctacgacgagcaccgttcgaccggccgtccgctgccggccgaaacccgcgcctatgtcgccgcgctcgcgccgatcttcggcggcgcggctgcatctgaagcgccgtcatcggcaccgccaccgccgcccgactggcgcgacgcaccgctctttgtgctgcgcccgaacgacagccaatcgacggtcgcgccgtcatccgagacacaacccggcgacctgttcgctgccgtttcggggccggatcgccgatga

SEQ ID NO: 343857 - DNA, 333 bp, Pseudomonas aeruginosa
atgcccgccaatatctttgaacccaccgccaacggttacgccggccgcgtccggctgttcggcattgacgaggcaatcgcgctcgtcgccatcgagccgggcgacggcgagaacacgccggcctatcgcatccacctcgacgacgaggacggccccgagatcggcggggcgtggaaacgtgtcggcgaacgcgcgggggactacatcgccctggagatcgacagcccgcttttccctgcgctgtttcgcccggcgctgttccagaccgacgacgaggcacacacctttcggctcgcgtggaagcggccgaaggcgcgcgaggatcggagctaa

SEQ ID NO: 343858 - DNA, 546 bp, Pseudomonas aeruginosa
gtgacgcgccgccgctatctcgccgtcacggcgctggccgcgatgggcgttgccgtcgcaagcgccatcgagacgccgacgaaactcatttggaacgccacggccagcgcgccggtaggcttctacaccgtcgagccggccgaccggatcgaggtgcccgagctggtcgcggtcatgccgcccgaaccgctcgccgccttcatggtgcagcgcggctatgtcggacgcggcgtgccgttgttgaagcgcgtcgtcggccttccagggcagcgggtttgccgcgccggccgcacgatcacggttgacgggatcgagatgggcgaggcgctggagcgcgaccggatcggccgtgaactgcccgcctggcagggctgccgcgtcatcgcgcccggcgaaatcttcctcatgaattgggatgtccgcgacagcctggacggccgttacttcggacccatccccgcaagcttcgtcatcggccgagcggtcccgctctggaccgatgaggaaggcgtcggccgcttcgagtggcgcgcgccgacgcactga

SEQ ID NO: 343859 - DNA, 519 bp, Pseudomonas aeruginosa
atgacccgtcgcgcccatcgcagcgcgcacgaccgtccgctgccggacggacccgcgcccttcaccacgcttgtcgaattgactttcgagaaacgcaaggtcgagcactggatacgcttcggccgcaagagctacgaacagatcatcgaccgtcgccgaagcgtcgtcggcttcgcgccgaacaacatcttcgccttcgtccgctgggcggccggcgagcacggcacgatcatttcacgcatcgacatcgcgcgggccaccggtcggggcgagccgttccagacattgcccttcgtccggcctgggggcgacatcctgttacgcctggacggctggccgaaagtgcagcgcgcacttgccgtcatcgacgccgtggaggcgctgggcctcgacccggccgacgtgtcgccggactactggcgacacgcgcacaaccgcctagccgccaatctggagccgagcgactacacgccggaacgacatgcggcgtggattgggcgtcggaggatcgacccgtga

SEQ ID NO: 343860 - DNA, 1080 bp, Pseudomonas aeruginosa
atgttgcgcgaggacgaccatagccccgcgcagccggccgacgccagcgaacgcagccgactcgaccccttcgtggtcgcgaccggcgacgccgcaccgcgcgaccagcgcgatttgatggagcggccgttcttctccctggcgaagacgccgcgcaccaagccgattttctacaaagccgccgatgtcgaggtgcaggtgttcgggatgcccgagcacggcatggcgaccatatgggacgccgacgtgctgatatgggcggcctcgcagatcgtcgcggccgaaaacaacggcctcaccacgtcacgcttcgtccgcttcacgccttaccatctactgcgcgccatcgggcggccgaccggcaaccatcaatacctgctcctgaaagccgcgctcgcgcgactgcaatcgaccgtcatcgccactaccatccgcaacggcccgcattggcgtcgccggcaattttcatggatcaacgagtgggaggaaatgacgacgcgcgccggccgcgtcgagggcatggaatttgtcctgcccgaatggttctacaacagcgtcatcgaccgctcgttggtcctgaccatcgacccggcctatttccggctgacaggcggcatcgagcgttggctttaccgcgtcgcccgtaagcacgccggccgccagcgccatggctggctgttcgagtttgcgcaccttcatcagaaatccggcagcctcgcacggccgtccgatttcgcgctcgacttgcgccgcatcgcggcccgccagccgcttcctggctatcgactccagatcgagcgggaagacggccgtgagctgcttcgcatccgcccggtaaacctgtccacagtgcctgttgataacggtgtgaatgccatcggcacatcaggcgcacggggtatcggcacatcaggcgcaaccctatcggcagatcaggcgcatgaaccccagctaacgctttggcctgaaacgcgcaatccgaccgctaacttagagtctaacagagaatctaacttttcttctttgacgcgcgcacacgcgaggcgtggtgccggtgccgccgagcgaggcgaaccatga

SEQ ID NO: 343861 - DNA, 273 bp, Pseudomonas aeruginosa
atggccatccgccgcaatgcggacctgccgccgcgcctgcttcgcacacaggaagccgcgcgctttctcggcctgtccgtccgcacccttgagaagcatcgcacatacggcaccggcccgacctatcgcaagattggcggccgcgtcctctacaccgtccgcgaccttgaagcctggagcgcagtcggcacccgcaaatccacgcgcgacaagaacgccggcacggtttttcccgcgcgcccgctcacgcccaaagagctgggcgattgctga

SEQ ID NO: 343862 - DNA, 288 bp, Pseudomonas aeruginosa
atgcgagtgcctgtcgaactcgatcccgatgtggacgacgaagcgccagcgggaaacgacataacgccttatgacgaacggcattacgtcacctatttgcgccttctcgacgcgaaggccgaaggggcggactggatggaagtcgcgcgaatcgtgctgcatcgcgatccggtcggcgatgaagcgcggacgcggcaatgctgggaaagccaccttgcccgcgcccaatggctttcacgcgaaggctatcggcgaatcttggaacaggcggtcgcggccggacgttga

SEQ ID NO: 343863 - DNA, 474 bp, Pseudomonas aeruginosa
gtgacgctggcgcacctgtccgacctcgacctacggcacgcggcggatgggtggcatggcatctggaatgtggatggcgtcgcgcatcaattctggctgccccaggccgtgcccgacgtagcggccttctatgccgtatcccttccgatggattctttcatggagcttcgcgcccatgccgcccgccgactttggcggtccctcaatgggcgagcgcccggcgcggacttccgcaccatgccggcgcagctccgcaagtttcatatcctgtccctgcgcgcgctcgacgcccgcttgcgaggcgaaagctatcgcaccatcgcggaagtcctgcttggctttcgcgggaccaaggaggattgggaagccgacccccgcaagaaccaggcccgccgattggtcgcgcacggcctgagaatgatgaggggcggctaccgcctattgctgcactatccgatcaaacggcccgcttag

SEQ ID NO: 343864 - DNA, 216 bp, Pseudomonas aeruginosa
atgcttagcattgattggcgtgcgccggcggcttacgggcacgcgaaagctattccccccgccggtttcgcctgggagtatcttcgtcgccatgaggactatcatcgcgacttccaaacaatatcccaggtgaaggagccagccggcgaccagcttgatggattctcgcagcgttggggtttgcgatttcccgtgcgatcccgaaacgccgcctga

SEQ ID NO: 343865 - DNA, 381 bp, Pseudomonas aeruginosa
atgatttatatgcgaaatatcacgattacgacagcgaaatcagcgacttacttggagaatgtgggggaatatgccggcatcgagagcgtggcgcggatgggtgctttcatcgccgagcatggcgcgctaggcgctggattgctggagcagttcataggcgacatcgaccaggccgagagcaccttgcaggactgctatcacggccagttcaccagccttgcggactatatggaggagctgaccgccgagagcgtcacgatccccgaagccctacgctactatgtcgattgggaggcaatggcccgcgacgccgaaatgggcggcgagttcttcacgatagaaaccgctcgtgacgaggtgcatattttttccaacaggtga

SEQ ID NO: 343866 - DNA, 1356 bp, Pseudomonas aeruginosa
atggatcacctggagggtgcgggcttggcgcggggagatcgggttgatttcgaccgccgtgtgcgtctggagttccgtggtgcgcagatcagttcagacggtggcctgctggtgatgcgcgagcttgatgacgtgctcggcctgtccaatctggcgtcggaggcgctgcgagacagccgcaccgggaagaacacgctccatcggcttgacggattgttccggcaatcggtgttcggacgactggccggatacgaggatgtgaacgatgccgaccgcttggccctcgatcccgtgatgcgtcaggtcgttggcggcagggccgtcgaggcgcaagctgcttcggcatcgcagatgggacggttcgagaccgagacgctggctctggccgcgaaccgggcggcgctggccgatctgaacggccaatggatcgaccggtttcatgaccgcaacgggttgaaatacatcgtgctggacatggacagctcggtcagccccacccacggcgatcaggaaggtgctgcctggaacgggcatttcgactgcacctgctatcaccccatcttcttgttcaaccagtttggcatgctggagcgctgcgccctgcgtaacggcaatgtccacagcgccgatggctggcgggatgtccttgatcccgtcattgcccgatatgctggccgcgaccttggtggacgcttcttccgggccgacgctgcctacgcgatccccgcgatctatatgcggctggaagaagccaggttcttctacgccatccgtctgcccgccaacgccgtcttgcgcgagaagatcgcgcatcggctgacacggcccgtgggacggccttcgctgaccaaggtcaaacggttcttcgaggacttcgagtatcaggcggcgtcctgggacaagccgcgccgcgtcatcgccaagatcgaatggcatccgggcgagctgttccccaaagtcggcttcatcgtcaccaacctgccgatggagccagactgggtggtgaggttctacaaccagcgcggcaccgcagagcagcacatcaaggaaggcaaatatgcctttcgctggacgcggctgtcatgccggaagttccggcacaacgaggtgcggctgcaactgcacgcgctggcctacaacctggcaaccttcctgcgctgcatcgaactgcccgaggccatggcggactggtcgttgaccagcctgcaactcaagctgatcaagatcggcgcccgcgtcgtccgccacgcccgcgccattaccttccagttggccgaggtcgccgtcaccggcccgatggtgcgggccgtccttgccgccatccgccgtcttcgaacgcctccgtcatgcgcatga

SEQ ID NO: 343867 - DNA, 738 bp, Pseudomonas aeruginosa
atggtccatgccgccgtcagcaaggtcggccgcctgctcgacggcccagacacgatcatcgccgctctgtgcgacgcggtcggtcccgacggtacggtcctcgcctatgccgattgggaagcacgctatgaagatctggtcgacgaggaaggcagggtgctgcccgaatggcgcgaccatatcccaccgtttgatccgcaacgttcacgcgctatccgcgacaacggcgtgttgcctgagttcttgcggacgacgcccggagcattacgcagcggcaatcctggcgcctcgctcgtcgcgctaggcgcgaaggcggagtggttcaccgccgaccactcgctcgactatggctatggcgagggttcgccgctggcgaagctggtagaagccggcggcaaggtgctgatgctcggcgcgccgctcgatacgctgaccctgctgcatcacgccgaacatctggctgatatccccggcaagcgcatccggcggatcgaggtgccgttcgccacgccgtccggcgcgcaatggcgcatgatcgaggagttcgacaccggagacccgatcgtcgaagggctggatgaagactatttcgcgggcatcgtggcggaattcctggccggcggccaaggtcggcaggggctggtcgggaccgcgccgtccgtattggtagaggccaaggcaatcactgccttcggggtgaactggctcgaagcgaggttcggaaagccttcatcctga

SEQ ID NO: 343868 - DNA, 447 bp, Pseudomonas aeruginosa
atgaccagcgcaaccgacagcaatccccgcatctatgtcgcctgcctcgcagcctacaacaacggctatctgcatggtgcctggatcgacgcggatcaggacgccgacgagatcagggacgagattgccgcgatgcttgcgcgctcgccgatcaagggcgcggaggattatgccatccacgactatgaaggttttgagggcgtcattatcaaggaatcggcgatgacccagcgcaatagcttcccgatgccgttcatggtgccgctcgaagaggccgcggcgcgcatcgtcgacggcttcgcccgcggcaatttcgagatcgccttcccgcgccgcctcgcctggctgatgaaggggatgcggctgctgccttacccggcctatttctgggcgatgcgcaagctggccggcgagcatcgcggcgggcgccgtgacggggcggtgtag

SEQ ID NO: 343869 - DNA, 426 bp, Pseudomonas aeruginosa
atggccgtcgtaatgataatgagcgttgtattgatcgcaatgctttgcgtcgcagcctatacgctcgcggtctatgcgctgcccttcatgctcggattgacggctgcgcagttcgcctatcagaccggctccggcttgatcggcgcaggcttggtcgggttggtcgcggccggtgcagccttcggcgtcctggcgcttctctttgactcgctacgctccccgatcctgcgcctcgctgtggcgctgatcttcgctgcacccgctgccgtggccggctatgcgctggtccacggcgtcaccaaggaatcggtcccgtccgaaatctggcggcaaatcttctgcatcatcggtggcggctttgtcgggatttcggccttgctgcgactggcagcaccttcggccagcggacccacgcccgttcgctaa

SEQ ID NO: 343870 - DNA, 1062 bp, Pseudomonas aeruginosa
  misc_feature (977)..(1023): n is a, c, g, or t
atgaaaaactcactgtcgagcaagttggttttccctcggggcggagccgacggtgagctgggtgattcggcccgaatcactctgccaagggtcgacctcgtcgccgacggcgaacggggtgatgcggcccgcatcacttcgccaggtcctggcctcggcgccgacggcaagctgggtggttccactggaatcactctgccagggatccacttcggtaccggcggcaagatgggtgtttcgggccgaaacacttcgccaggaaccaacctcggcgccgacggtgagctgggtgttgcggcccgcaacactctgctaggaccaggccacggcgccgacggcaagctgggtggtgcggcccgcaccacttcgccaggaccaggactcggtgccgccggcaagctgggtggttccactggaatcagtctgccagggatccacttcggtaccggcgacaagatgggtgtttcgggccgaaacacttcaccaggaaccaacctcggcgccgacggtgagctgggtgattcggcccgaatcactcagtcaggtcctgtcctaggcaccggcggcgaactgggtggttccactggaaccacttcaccaggaactgacttcggcgccggcggcgagtggagtggttccactggaaccacttcaccaggaactgacttcggcgccggcggcgagtggagtggttccactggaaccacttcaccaggaactgacttcggcgccggcggcgagctgggtggttccactggaaccacttcaccaggaactgacttcggcgccggcggcgagtggagtggttccactggaaccacttcaccaggaactgacttcggcgccggcggcgagtggagtggttccactggaaccacttcaccaggaactgacttcggcgccggcggcgagtggagtggttccactggaaccacttcaccaggaactgacttcggcgccggcggcgagctgggtgnnnnnnnnnnnnnnnnnnnnnnnnnnnnnnnnnnnnnnnnnnnnnnnactgggtggttccactggaaccacttcaccaggaactga

SEQ ID NO: 343871 - DNA, 930 bp, Pseudomonas aeruginosa
atggcattagtgggtaggcgggatggccgcaatttcggctacggcaggcagttaagctacgcggggccgcaagcgctgaaggacatgttcggcggaggccattacggcacggtgaaggcgcacagtgatcggtggcaggcattcgtgagatggtgccgctccgaacaggggcccggtatcaatgatgcgcggcagattaatcggaaagtattggccgactatgccgtgtatctgcgcgaaatggttagacgcggtgagctcgccgtcagcaccgcacaaaaccggttatccagcgttaacaggaccatggcggcgcttcgcggtgatcagtgcgtgaagttgccaagtccgagcaaggcgttgggcatgcagcgcaccggggttcgccagtcagtgccgcagggccaagaccgcgagcaggtgaagcagatcgttgaggcgctttgcagcgaacatcagcaacgcgccgccgcgatcgttctgttggcgcgagccaccggcatgcgtttgcgtgaggctatcttggctgacctgccacggcttaaccatgaggctgaagtctgcggcaagatcaacatccaggacggtaccaaaggtggccgcgctggggcctcggcgccacgttggattgcggtgagcgacaatgttcgagatgcgcttgagtttgcacgtctagtgtcgcctgcaggttgccgcaacctgattgcgccacacgaaagctacctgaatcttcttcaagaaagcatccgcccggctcgggacatcctgcatacacacaacctcaaaggtttccatgagctacgagcggcgtacgcatgtgagcgctatgagcaaatcactcaacaccgcgcgcctataaacggaggtgaatgttgcaaggtagatggaaccttgatcgtgaagctcggaggcaaatcagctacgagctag

SEQ ID NO: 343872 - DNA, 996 bp, Pseudomonas aeruginosa
atgagcattgaccggttttcggaatttaagtcgatagatgcagcgtacaagcactctgcagatgtaattagtgctttgagggaagatcttgaatcggcactatcaggaagcggttttaaagataggttgactatagttacaactggctctttcggtcgaggtgaggcgtcggcagagtcagatctggatctgttcatattctttgactctgacaagtctgaagatagcttgtatgaggaaaagcaatccatacagggtgtagtcgataagtatataaaaaaatctgctggggatactgggacattcggctcggaagcagtcgtgaatttcagtgaaatgttgcagaatcttggtggagacaaagatttcaatattttgctgactcggcgtatgttgtttttgcttgaaggtacttggttgtacggagaggagcgatttaaatcgtatagaacagacctgttaaataagtatataaaggcgggagatccagaaaagcaaatatcccgatttctcctcaatgatataattcgttattatagaacgattgctactgatttcgaatttaaagtttctgaaaacagtaagtcgtgggggcttcggaacgttaaactccgtttttcacgcaagcttttatattttggtggcgtgatctccgtggccgagacagcttttgtcgcgcaggcaaataaaaatcaattgatcgcagaaattttggataaaactgtacttgagagagttcaagatttaggtgccaacaatcctcatactcctgaaattctcaatatataccaagatttcttggcgacaattggatgccccaaaaacagagaggctctggaggcggtgacaaagggtaatcgtacggattctgaattattcttacagatgcgagagaaaagtaaagaattctctaaggtcttggataattggctaaaatcacagtatccggataataaaagtgtccctcaccctattcataatgctttaattttttaa

SEQ ID NO: 343873 - DNA, 1044 bp, Pseudomonas aeruginosa
atgtggccggcggccacagacgaccctgataccatttactattggattaactcagtagtaaatgatgatgtcatgtctcttattttacaatccaaagctttcaaaagactgtatgatatatcttttcttggtgcgctagattacacgcatccaggcactgaaaaaatctcaaaaaaaaatagaagtcgtgctgaacactctttgcatgtggcggcactcgctgcctatgttgcagaaaagcgcaattatgcaccggaattaaagaggcatttgataattgcggcgcttttacatgatgtagggcatgcgccactctcgcatagtgctgagccactaataaaaaagaaaatagggtatgggcaccatgaagccggcgagcagataatcgacggcaaacaacagcttggcaaagaacttagcctgaatcttaaaaagcactgcgacttgagctttattcactcattgttgaatatgaaagcctcccaggaagatggcggtgatcttttttatagccctataaatatagatacaattgacggaattactcgttcgcatacttattttactgggttttcctcagctcattcaacgctagctattgcgtgtgcttcgtttatcagtggcccgtcgaaagatcacagaattttagacgacttctggatgatgaaggaacgggtttattcaggtttgattaatgatgaaattggccttgtatccgacaagacgagcgagattttctttctggagtcgtcagtttgcttgagtgaaagcgacctgtacaaaagcgaaaaaagttggcagcagacacataagtctttatttgctcgcttgaacagtatcttgaaaaagaaatctgcgccaagttggttttcaaacgctcaagtaagctttgttcatagaaagtattttgtattgcctgatcgagatgataatactcgctatggctgtaagaaagagaagaagatcaagagttttgatataaaaatcgagcctgatagcaggcagcactcaataaagttaaatggaattatcaatgagcattga

SEQ ID NO: 343874 - DNA, 390 bp, Pseudomonas aeruginosa
gtgaacgagctgctgcagcgcctatccggcaccgccggctggtcgccggtacagatcagcgccgacatcgatgtcacgttcggaggtcgactgtacggcctgctgtccgagtccgaacgctggcggtgcgacgcgacgctggccctgaccatcgcgacgatctccggcctgcgcttggcgctgctggatcgcttcgacgtgctggatatccctgcgcgcactcagcaggcgatgaagctgttccagagcctggccgccggcggcgagatcgacacgctgatcgtcgccggcacgctcaaggaaccgatggcgaagacgccggcctggctacaagcggtctgggtcgacgccgggcaactcgccgaccagcagcaacaggctgctgcctga

SEQ ID NO: 343875 - DNA, 444 bp, Pseudomonas aeruginosa
ttgcacttcgaacgcgagcgcagcgccatcggcttcgccgccgaatggctggagcgcccgttgccgctggccgacccggtgacccaccgggagatgctggaacagtgccggcggcagaacatcgacctggccgcgcgtcgtgcctggctggacaaggtccgggcgatcctcgccgagcgcttgcaggacccgcccggcctggaggaactggccaggcgcctgaactgttcgtcgcgcagcctgcgccggcaccttcagcagcagcgcaccagctaccagcaattgctcgacgagttgcgcttcgcccgcgccaaggagttgttgcagagcggcgacatgccgatctaccggatcgccgaggaactcggcttcagcgagaccgccagcctgcgccatgccttccagcgctggagcggccagccgccgagccatttccgcgcctga

SEQ ID NO: 343876 - DNA, 1395 bp, Pseudomonas aeruginosa
gtggcaaaactgacggcgaagcaactggaagcgctcacctcggccgacgatggcaagacactgcgtgaagacggcggtctggtcgcaaaggttcgcgctggcgtacgcggcatcactgtcatgtttcgctacgagttcaaactggatggcaccaagcgcgatcatcgcctgggtagctggcccaagaagtcgctggcgcagattcgggccgaacgcgacgaagtgaaagcgacagccgccaaagggatcgaccccaccgctgcccgtaaggctgccaagatcgaagcccaggccgccatcgccgcgaccattgccgaagctgaacgtcaggccgcagaaaacaagacagtcgccgacctctttgaggagtggatgcgtgatggcgtatcacgccaggacggtaacgccgaactgcgccgcagcttcaccaaggacgtgctgccgctcattggcaagaagcctctgcgcaccctgactgagaaagacttgctcaacgtcctacgctcagtaaaagcccgcggcttgaaccgcaccgttgtgatccgcagcaaggacatcggccaaatgctgcgctggggagagaaacgtaagccatggcgcactctcatggcagaaggcaacccggccgacctggtagaggtcaacaaactgctcgaccacgactacgaggaacagcgtgatcgcctgctctctcctgacgaaatccgcgagctacgcgacatcttcgcccgccttgagcgcgactacggcgccctccctgcgggccagaaatactccggcatccgcccggtcaatccgcgcgtacaatgcgccgtctggatctgcctgagcaccctctgccgtatcggcgagctgctcaaatcagaatggcgctatgtggatctggaaaaaggcacctggttcatcccagccgaagcaaccaagggccataaaggcaagcgccaggatcaccacgtctttctttcagcctttgcccttgagcagttcaagcggctgcataaagaaaccagccatacaccgttctgcttccctagcaaggatggcaatagccatggcgataccaaaacagtcagcaaactaatcggtgatcgacagtgccgcttcaagaaccgcagcaaacctcttaccggccgtcaccatgacgattcactggtgctgagcaagggcaccaaaggtgaatggaccccgcacgacttgcgccgcacgggtgcaaccatgatgcaggaactaggcatcactctagagatcattgatcgttgccaaaaccacttgctgggtggatccaaggtacgccggcactatttgcatcacgactacgcgaaagagaaaacggaggcttggcggactctcggggagaaattagaaacaatcctaagtacatcctcgaccacctaa

SEQ ID NO: 343877 - DNA, 471 bp, Pseudomonas aeruginosa
atgtatgcgactcgtctcccctgcctgtacggcctgaagaagcggctcgtatccctgcatcgctatgaagtactccaacatccggtcgctgatgaaatagaagcgctccttatcgagccctcggtcgtcagcatcgacatcaaggcgaccgtagagataagccatttcatcctggtcgtcaccaccgcgttcgttgagcggctctctatcgagaggccgcccattgaactggacgtgcaaggatttatggcatgttcggcaaagagtgattccgttgcccagctcgtacttaccatccggaaaagtggcacgacgaaaaatatgatgcgcctggataccttgcgaagactcgcaatgcacgcatcgatagccatctcgcatccggacgaagcgcccccacagagtcaagcaccaccgcatcgaacgctccgcattgacagcccgatccaatgcaactctcgcagcctctaa

SEQ ID NO: 343878 - DNA, 363 bp, Pseudomonas aeruginosa
atgtactggatcgagatctgcaccgacggcagctacgtgatggatggccaagaatttccccttctgtccgagggtatcgaagagcttgagagcaacgacggcgagcgttccggcaacgattgggtgaagtactccaccccgttcgagcttgaaaccgagcacggtgttttcgtttgggaagtccagctcattgagtatctcgagccaggtgtcgtcagtctattgggttatcagatcaccgaatatccggctcatgtcttcctgaaagacgaagtcatgttccgcatccaggatggatgggcttacccgacagaaccgacactcgacttgaaacctcgagtgactaaaatgcgcctcgcttga

SEQ ID NO: 343879 - DNA, 828 bp, Pseudomonas aeruginosa
atgcgtgaagagcttgtcgagatggcgtactttgaaacttactactacgcgaacattgttcataacgttcttgataacccgatgggatatcttcgtaacctgaataactggcacgaagatcgggagattggattatttttacagcctttccctaaatggagcgtattgcacgagtttgcgcagttcattattgaagagctcatgtatgagaggattggcgacgtcgcttccacggctgctctgagcaattcaaggagccagttgtgggtcgatcaagcacttaagcaccatggtatccagatccctagattccaaaattggttaaaagaaaaatctgttctgctggaagatgcaacggaagatcatattttcgattaccaccaggatcttcatctaacgggggaacttgatgagctgctcacccagctttctaacgaggtattctttattctcttcggcaacagggctctgcttgccaagctaaatgcctatgtgtcaggcgtagttcagggtatagagaaggctgacttggagcctgagcactctgcgctattggtgaaggatggcgtaccaacccgtgctcatatccctgagtgggtaagaagagctgtatttttccgtgatcgcggaatgtgtgcgtcatgtaacaaagacctgagcgggttggtgacaatagctaccccaaaacatttcgaccatatcgttccccttgcggagggagggattaacgatgtaacgaacatgcagcttctctgtgatgcgtgcaacctcgtcaaaggccgaaagctggttaaaacatctagtagatacgaagcgtggtacacgtga

SEQ ID NO: 343880 - DNA, 765 bp, Pseudomonas aeruginosa
atgcgagagctactggcagcggtgtccgcgttggtttccatagtctcctatgaccgcgtagcggctttggcggcgaaggtcagaggaatgcaagtcgcgaaggcaggcgatctgagggcgggaccagtgtccgcgaaggccgacaatgtgctcaaggggctggtcggagcttggaaggcgtcgaccatcagtggcgagacgctggctgcaatgctcctggccgctgcgcatgcgtttcgtcatgcggagagtcgacagagggtcgaactggtgtggactgggccgacgaccgaactcgttcctgctcggcgaaccgagcaggctttgatacaggtgatcgatgccgctcagcaacggttgttcatcaccagttacgtcgcgtacgacatcgagtcgatcgccagggctctgaagtcagcggcagagcgtggcgtgaagatcgagtttctgatggagctctcgagcgctcagggtggcaaggtcagcgtcgaccctatcggtaacctgaagaagatcgtccccgatgcgcttttctacgcctggaaagacaaaggtgctgcgttcgtcaatggcagcgtgcacgcgaaggtcgcggtggcggatggagtgtattgcttcatcaccagtgccaacctgactggatacgcgatggaccagaacatggaggctggggtattgatatctggcacttctttgcccgagcagcttcatcgacatctggaggcgttggcgattacaggtgtggtcatgccttttggtggatga

SEQ ID NO: 343881 - DNA, 1857 bp, Pseudomonas aeruginosa
atggcgcacgaaaagacccccgttggctcggtacgacccagtcaactgctgtggacctacggtcctggtgccctcgtcgacttgccgaatctgtcggtcgtgacttccggtatcgacgtctgggaaaaggatcgttgccacctggtgatcgagaatcgcctgctcgccgcagtgcaaaaagcactcggtcctcaggtcgcatcgttacgaatgccgccgttcaccaagagtgaatcggtggatcctttctctgcagaagccagcgtcggggttcctgttcgtccttttcctcgctggttgcgatgtgtgaagtgcgggcttctttctccctatgacagtggtttgttcgagctcaaggaaagcaggtatcgccccgaggcaacacgtttcgttcatcagggctgccgaggatccaaaggggatcaacccgccaaggatgcagatgccgtcccggcacgttttcttttggcttgtaagaatggacatctggacgacttcccttggcagtggttcgtccacagtgggcctagcgattgcaaaggcacgctgcgtttcttcgaaagtggcgcttccttacagactgagaacctttgggtcaaatgcgatacgtgcggtgcatcgcggaatatggctcatgccttcgggcagctcggtaaggagaacctgccaggctgtcgtggacggcatcctcatttggatcagttcgagccggattgcgatgccgagccacgggccgtgctgttgggggcgaccaacagctggtttccagtctccttgtctgccttggcgatacctcaggcaaaggacggcctggcgcagttgttggaggatggttggagcttcttcagcgatctggagtcgctcgatgaggttcccctgaccatcaagctgttgaagaagactagttcattgcctggaatcgaccagtattccgcagaggacatttgggcaggcattgaggctcatagttctggagatggcgagagtgtcaccgaggctgacatcaaaggccccgagtggcgggtgctgatcgacccggtgccagtgaatgactatccgcacttcttgtccgaggcagtggccgttcctcagggtttccaaggcaagatcgccagggtattgctgttgaagcgtctgcgcgaggtgaatgccttgctcggcttcacgcgagtcgaggcgcctgacgactcgggcggcggtggggctggaccgatccaggcaccgctgtcacgtgcaaagcccgattgggttcccgcgaatcaggtgcacggtgagggcatcttcattcagttcgacgagcagtcgatagctgagtgggagcagacagccgacgttcaggctgccgacatgaggctgcgtggagggcacaaaggttggagaaactcccgccatctctgtcctccggatgacggttatccaggtgcccgctacgtgatgctgcacactctggcgcatctgctgatccgagagttggcgttggagtgtggatacaacgcggccagcatcagagagcggatctatgccgaggtgaatgaggatggcagccagtgcggctttatcatctacacggccgctgcggactctgatggtaccttgggtggattggtcgaactgggcaagcccgagaacctggagcgcctactggttcaggctttgcggcgtgcgcgcatttgctcctccgatcccctgtgcgcggagcatgatccccggaaagaccgtagtttgcatgcagcagcgtgccatgcctgctccttcgtcgcggagacatcgtgcgagcgtggcaaccgttatctcgaccggacgatggtcgtgccgactttcgagaatgccaaagcggcattcttcccggatgcttga

SEQ ID NO: 343882 - DNA, 4035 bp, Pseudomonas aeruginosa
atgagcatggaagagatagtgcagaacagcaccccagaggcttggatagtcgtcgatcgtggcttggtgcgtgacgttcgtttagccgacaaggtcgtctatctaaaaggaagccatcccgcgttgcgcgagggggcctggatactggttttgaacccagccggtggcatcgtgcgtgtcggccatgtcttgcgtgtccgagtcgatgcggaaggcacttcactgtacttcgacaatgtcaagacggtcgagccagtggtagggatcggcagcaccggtttgctgcctccgtccgctggaagcgtcgtacgtgctccgtggaccgatttcgcagaggctatccctcgtgcattgggtgtcacgctcgccgacattccgctgatcgagaacgaggcctatgttcgcgaactgctgcagttcgcgatcatggatgaccttctagggccagccggcgggccggaggagctcatcgtcgatatgagcgttcgcgatcggtacctcgtcggcaagctcgcgccgatggagaactccgagcgcggtgaggatgtggctcccccggaaaaaaatgaggaggacgagcctgcggatctggagccgaaggcccagtcgaacaaggtcgactctccccaaaagattggtggcggtgactctgaagccgaggatgaggtggatacggcctcgaaccagtcgctcgcgccgtcgagtttggggttcactttttgcgtcgacggcggtgcggaatgtctcgaggtggtggtgagttgggggcgctatgagcgctttgagtccgatgatccggctcatgccaaggtggtcaagaaggcggtacgtgacgccgaggggcgggtgatcaataccaccgagcaggttctcaaagccaaagtctggcggcgcaagccttctggcgggacgtttcaattggcgctgaaggatggagtgatctctcccgtaattccggattcggcctgcccagaggtgcttatccagggtacggtgcgttcacccaacgataagggtgaacgcctggttacgctgtttctggtcaacagccagatagaaccgccagaaaatcgtgataccgcctgggtgttccagcccgaaatcctggtgcgggccaatgacgaaagttcggtgaaagatatattccgtcgccgtcccgctctggaggcagatgctgacgctgcggacgatgacgatttgcgcgagcgcttggcgctggagatgatctatcgcgatcgggtcgaattcgctgtcgggcatggcgtcgcagtgcatgccgtagctggcccagatgtggccagggcggtagaactgcgtacagcagtgatgccgcaatacgaagtgccggtcactgagacgccgggcttggatccgcaggaccggccagcgatgcgcagattggtcgacgaaggtctgctggatatgaagcggctggctgatctggagagaggcgagctcgtcgctgcgctcgggatattgaccgaggactattcggcatggatcgacgatcagcgtgcacgcatcgaaagcgatgcgtccggctatgcgcagcaggccgctgaggcgctgagccactgtgagtcgatcctggttcgtttgcatgagggcgtggggttgctggcgacggatgacaaagccttggcggctttccgtttcgctaaccgagcgatggcgatccagagagtgcatagcgcgtgtgcattgcagcgtcgccgcgggcgcgctgtggcgctggcggagttcgatgtaccgaagaaccgctcctggcgtcccttccagttggcctttctattgctatccgttccggggatgaccgatccgaagcatacggatcgcacccagcctctgcaggcctatgcggatctgctctggttccctacgggcggcggcaagaccgaggcctatttgggcgtggctgcattcaccatggcgattcgccgcctgcaagggaacttggggggctacgattcatctcgcggactggcagtgatcatgcgctacaccctgcgtttgttgactttgcagcagtttcagcgggctaccgcgttgatttgcgcgatggagcatattcgtcgtgagggtctcgccacgggcgacaagtcacttggcgagagcgcattcaccatcggcctttgggtcggcaacaaggtgacgccaggtaccacggaggatagccacaagttcatcgaggccattcgtaccccgggaagaaaccccaccggaatggcttcgccggcgcagctgacaggttgtccgtggtgcggaacggagatcgacccgaagagagatatcgaggtcgacaagatatctgggcgtacgacgatctattgcggcgacaagctgagtacctgtgacttctctcgtggtcgttcgagcaagcaggcacaccctggtttaccggtgatggtcgtggacgaggagatgtatcgtcgcccaccgtcgatgatgatcgccacggtggacaagttcgccatgatggcgtggcgtgggcaggttcggaacctgttcggtcgggtatcgaaggagtgttccagacacggaatgctctggcccggctcggattgcaataccggtcacagagctgtcgcggggcgagcagctgcgacggtcaaggcaatttctccggtgcggcctccggatctgatcatccaggacgagttccacctgatcagcggccccttgggaaccatggtcggcctctatgagagcacggtcgatgagctgtgtacctggctgctggacggtgaatcgatccgtccgaaggtgatcgcctccacggctaccgtgcgtaaggcgcagcagcaggtcaacaacgtcttcatgcgccaggtctcggtgtttccgcctcatggtctggacgtcgaggacaacttcttctcggtgcagcggcccatcgagcagaagccgggacgacgttacctaggtatctgctctccgggcagctctcggccggcgatgttgatccgagtctacacggcagcgctgaccgcggctcaagcgctgttcgatcggttcggcaaagccgccgatccttacatgaccatggttggctacttcaattcgttgcgtgagctgggtggtatgaagcgtctggccgaggacgacgtgcagactcgtgcgtaccgtgtgcaaatgagcatggtgcagcggcctggtctggcccagcgcagcgtcatgaatatccgcgagctgacttctcgggtttcgaaccaggacatccccaagtatctcgatcagctcgaagtgatgttcaagtccgaatgggatcccgagaaaggcaggtacgtgaccaggttggaggagggcgatacgcgtgccatcgacatcgtgttggcgaccaacatgctgtcggtcggtgtcgacgtcaatcgactgggcatcatggccgtcaacggtcagccgaaagggacggcagagtacatccaggcgaccagccgtgtagggcgtcaatttccggggctggtctgcactgtcctcacgtgggctcgcccacgcgatctctcgcattacgaaaccttcgagcattaccacgcgaccttctacaaacacgtcgaggcgcaatctgtcactccgttctcgccgcgtgcgatggatcgaggtctgactggggcgatgctgtcgctgatccgcgccaagagcgaggatttcgcgccgaacgagggcgcacagagtctcaagcaaccgaaccaggcggaaatgctggatgccatgagggtgctcgaaacgcgcgcagacaacatcgcggaggctcctgcgaagaagctcgctggcggcatgctcaagcagcgggcggatcagtgggtgaatgaggtgatgcagggtaaccgtatcttggcgtacgagaaacgtgggcccgagaaggatctgaccgttcccttgatcagggcacctggaacgcatacttgggataactggacggtgcccatgtctatgcgcgaagtcgagcctggcgttcgcttggtcatgaactcgtcgaggatcaaagacgaaatccagtggaaacctcgccccgctgcggctgataaggacgaatga

SEQ ID NO: 343883 - DNA, 1965 bp, Pseudomonas aeruginosa
atgacgaatgaagtcgtaccgacgttcgagatgaccgtcgacctcaacgtcctcgagcatctcggtatcaacctttatagcaacatcgccgccgtgctgaccgaagcggtggccaatgcatgggacgcggatgcatcgagcgtgcagattcgcgtcgctccgaacaatgagtggatcgagatcgaagatgacggcatcggcatgtctgtcgatgacctgaatggtaagtacctgcgcgtcggctatcgccgccgcgatgaggatacggagcatggatgcaagactgcgaagggccggcccgtgatggggcgcaagggactaggcaaattgtctttgttctctatcgccaacgtcatcgaagtgcagtctgccaaggatggggatgcacatggcttccgcatgagcgtgccgggtatccagcaggctgtgcaggaaaggcgtgcataccaccctgagcgtctggagcacggcacgctcacggcgacgcgaggcacgaaaatcgtgttgcgcgatatcaagcgtcagcggctcggcaaaggcgtcaccgcgttgcgcaagcgtcttgcccggcgtttttcgatcattgggcaagctcatggcttcgagatcaagatcgacggccagcccatcacggccgctgatcgaggcgacttacccaaggtccagttcctttggacgttcgagggttacgagccggaagccagcacagtttcccatgtcttggagcgcgaggcgctgccagctcggttcgaggcatggaattcgtcgtggcgtgtgagcggttggcttggcacagcacgtaagcccaaagacctcgacgacgatgaggcggggaacctgaatggcatcgtggtcttcgcacgaggccgcttgatccaggaaaacgtcatcgatcgactgaatgatgggaggctttatacgaagtacctcaccggtcagatcgaggcggattttctcgatgcggatgatcgccccgacatcgccaccagtgaccgtcagcgtgtgcaggaagatgacgagcgttacgtccagttgatcgcttttctcaagtctcgcttggggcagctcgagaaacgctggagtgagtggcgaagaaagcacgaggtcaaggaggcccaggagacgtctcccgcccttgcagaatggctggagtctcttcctgcagggtacaggaatagcgctgaaacgctgatctccaagctgagcgctctgccggtcgatgacgaggatgaccgcaagctcatgtatcggcacggcatcctggcattcgagcgaatgaagctgcgtggctcgaccgaagagttcgtaacgagtatcgagagtgccgacaggctcctggctgtgctcgctgaccgggattctctcgaagcctcgctctatcgggacatcgtgaaatcccgtctggatgctattcgggactttcaaagcatcatcgacgaagacgcgaaggaaagggtgcttcagaagtacctgttcgatcatctctggttgttggaccccgcatgggagcgcgccacgggtagttcgataatggagtcgcgtctaatgacggaaggcgttctgatcgaagatatgaccgaaaaagagcgcttgggccgtgtcgatatcgcctaccgcaccaatgctggcaagcatgtcatcgtcgagctgaagaaggtcggccgcaggatgggactgctcgaattggtcgaacaagggcagacctatgtcgacaaactgacgaagatcttgcgtgagcagaatcagaccagcccggatatcgaagtgatcttcgtgcttgggaagaccgtagccgaagaggcatccaacccggatcgactcaagtcgtcgatgacatcgatctcgccaggtagtcgcattgttcattacgacaccctgattcgtggagcgcaggaagggtattcggcctatatcgcccagagtaagtcgctcgacaagctggaagatatcgttaataggatttga

SEQ ID NO: 343884 - DNA, 1011 bp, Pseudomonas aeruginosa
atggtcgctgccagcttctatgagaaggccatccagatataccgcagcattccacgcagcctgcggacggtgcatcgaggagatgagcgtatcgccgagctgcatcggcatatgaacgacgctggcgaaaagtcgctggatgagcttggagaggtcaagactccagggcttgatatcaccgaactggtcgagaatgcgcgtaagtcggtttctgggaagtccgtaagggatgcgttgttttcgctcgcgaacgtctaccagggggctcgtgtagatcaaattcgcagcgccgcagaaaagatccttcagcagagtttttttcgtcgtttgttcggcagtacacacatgtcgcgcgatggtcgcgtcatcgccaaacagccggcggccggattcgagaatgctccgaccagtgacgatcccgcgttgtgggcacagatggttcacgattatcagatcctgatcaatatcgtcgtccatggcgatatatggcctgcccacgaagtgttgctgcaagagcatcgtttgcgtgaagaggacttcattggtctggcgagtcagtccccaatcgtgccgccaggccgagagcgcctattcggcaaggcgctctacgctggctttgaccgcgacttcaccgtgtccatgcatctgttagcgccccagatagagcacatggttcgtttccatctgaaaaacgcaggggtgaagaccaccaatctcgacattgatggcattgagaacgagaacggcctgagcacgttgatgggcctgccggaagctgaaaaggtcttcgggaaagacctgtccttcgagatcaaggcaatgttctgcgatgcattggggccgaacttgcgtaacgaggtggctcacggcctgctggatgatgactcgtttcagtcaatacactcaatttacgcgtggtggatggggttgaggcttgtcttcaacacattctggaatgcggcgcggaaggttgaaaatgatcggggtatggaggaagagaatgacgaatga

SEQ ID NO: 343885 - DNA, 3822 bp, Pseudomonas aeruginosa
atgaaccccctcgatattcacgatgaatggttgtcgctgatcgaggtctccggtcctttcctcgccacgccggtactgaaacgaatcttctccactggtctacctgctgtcgaacctcgcattcgacagtacctgcggcaggcttatgacgaatggtgcgaggcgcgtgacgacgacgatcccaggttcaccgaactgcatcgcgcctggattcacgaggtgctcgcccgcggcctggaatatgacgagtccgatggcggtgagctcctactgcgaggtgagcgcattccttcggagcagcgcgtcactctgccggaacacggggtcaccttggagcctgactatgtgttggtctcgggcggcagaagccagctgctcgtgcaaatctattcggcgggcacggacctccaggccgcgctgaaattggatggctggtccgccagtccagccgagcgcatggagcggctttgccgggccagcggctgtcgtcttggtttggtcaccgatggcgagcgctggatgctggtcgatgcacccgttggtgctgtatcgaccttcgccagttggtacgcacgtctctgggggcaagagcggctgacgctgcaagctttccttactctattaggcatccggcgtttcttcggcccggacgatgagactttgccctcgatgctggacgagtccctccagcatcaggaagaagtaaccgatgccttgggtgagcaggttcgtcgggcggtcgaggtgttgatccaggcactgggtaaggaagaccgtgagcagtcagggacgctgctgcaaggtgtcgagccgaccgagctctacgaagcgggtctgaccatcatgatgcgtctggtgttcctgctgtcggccgaggagcggggactcttgctgatgggagaggaggcgtacgaaagcaactacgccatttccactctacgtatgcagctgcgccaggaaaccgaggaggtactggagcggcgcaacgatgcctggtcacggttgctcgcgacatttcgcgcggtgtacggcggcatcgagcatgaaatgctacgccttccggcactgggtggttcgctgttcgacccggatcgtttccctttcctcgaggggcgctccaagggctccgattggaaggtcgacttcgcgcgaccactaccgatagataaccgcaccgtgctgctcctgctggaggcgatccagcagtacgaggggcggacgctttcctaccgagctctggatgtggaacagatcggttacgtctacgaaggcttgctggagcggactgtcggacgaaccgagcgggtaacagtggaacttgccggtggcaagggggcgaagaagaccctctatgctctggaggagctcgaagctttgcaccagagggggggcgaggtgttggccgaggcgctctccggtgcggatgcgatcaagcgtggcgaaggagcgatccgcaaggatctggaacgctcggtcgatgctgcccaagccaaccgtttgctcaccgcttgcgctggagacgaaggcctgcgtgaacgtgctttgccattcctcaacctgctgcgtaccgatccttggggatacccgctgatttaccctgagggggcgttcatcgtcaccacgggcagtgatcggcgcgagacgggaacgcactacacgccgaaatcgctcactgaagccatcgtcgacgagacgttgacaccgatcgtctacacggggcaggcagagggagcaccgcgagaaaaatgggtgctgaagtcgcccaccgaactgctggatctgaagatctgcgaccctgccatggggtcgggcgcattcctggtgcaggcctgccgctggttggcggatcgcctcgtcgaggcttggtcacaggtcgaggcctcgggccaaaccgtgagtgtggatggtgaagtcctcgatgcaggagcggccaaggagcatctgcctcgcgacagcgaagcgcaaacattgatcgcccgccgcctcatcgccgagcgttgtctgtacggcgtcgatttgaaccctttggccgtcgagctggccaaactctcgatctggctagtgacgctggctaagggacgtccctttggcttccttgatcacaacctgcgttgcggtaatagcctgctgggcattcatcgactagatcagctcaccgaactctcaatgacgcccggcggcaaagggcagcagcgcttgttcgggcagaacattgagcgcgccgtgcaagaagcgatcaagttgcggcagcagctgcgtgccatgccgattcgcgacattcatgatgtcgaggccatggctagattggatgcggacgctcgtttggcgctggaagtccccgagcgaatcgcggatgcgctgatagttgagttattggcgtcaagcggtaatgcagcagccgttgaaactgcgattgcatccttggctatccaggcgggtctggctgtggacggtgatattgatgcaatcaaggcattaaccaagcgtacaaaattcgctttgtccgccagtttgccacccaacaaagaaattcgcaggccatttcattggcctctcgaatttccggaggtctatgcagccgcgcgggcgggattctctgccgttgtaggaaatcccccttggggaagtgccaccgatcctattcaaaaacaatggatggacatggcctatgaatctattggcgactatgaatttgcgattgctttttcagaacaagcaacccggctagtttgtcacgatggagttgcaggccttgtccttcctaacaccgttcttttgaacgagtcggctcatcaaatcagaaaacgactcactctctcctcatggctactctggatcgcagatctaacagatcatcaaattttcagaggcgcgtcggttcgctgttgtgtaattattttcaagaaatccatctccgagaatcatataactcaattttcacgtacaccgggcttccatctttgcccgtcaagaaaaatacggcaggaaaaatttgcattgcgcacacattgggcgaatcttgatgcggatgaagtagccattccgcccggcgcattgaaaattgaggatttgttttttgtaaagcaaggctacaagccatacgacaagcacgcgcttttaaagcgcatgagtgaggatgacgcgaagcgcatcgttgaagagaagccatggcatgctgagagtcagaaggatgattcttatgtgccggagctgcgcggtcgagacgtttcaccatatgccgtttcatggagcggcctttgggccagttatgggccatgggtatcaaactacttagatcctgagtggttctcaaatgagcgcgtcctcgttcgggaaattgtaggaaaaccaccaagattgataattgcttcacggcattctgactttgctgttcacaatccaagcattatttgcataaagccaaaatcgaaggacagtgagcgtcttcttgtgtttcttgagatttacttgaatagcgcacttgccacagcgttcatatctcaaatttcgtcaaaggcagcaaaaggaatgtttccaaaggttctggttaaagagctaaaggaacttccgtttccgccaccgcagataattgacgatcaaaccattcaggactctgttgcactacaagcccagattcgatctgagtcagaccttggtttagccgatacatttgttgagaacgtttttcgattgattccagcagagggcgactcgactgcgcagccgaacgcttcgaatccgctagcggctaaacgggggcgtcgatcaagagttgctccatccaattccatggctgatttgtttggcggagaaaacgcatga

SEQ ID NO: 343886 - DNA, 3126 bp, Pseudomonas aeruginosa
atgactgcaactgcggaagacagcaactaccgcaatatcccggaaccaggccagctagtcgaagttagacgccggcagtgggtagtggctgaggtggacgcttcgaagttgggtagcgtgcaacagcatgctgtcacgctggcttccatcgatgaggatgctctcggcgaagaactccaggtgatttgggaaatcgagccgggcgcacatgtcatcgaacgcgctggcttgccagccatcaccgggctggacgactccgatactctggaagcctttctcgatgccgtgcgttggggagccgctaccaatgccgatcgtggttttctccaagcaccgtttcgcagcggtgtgagccttcaggacttccagttggatccgctggtccgtgcgatcgacatggcgcgcgtcaatctgctgattgcggatgacgtgggtctcggtaagaccattgaggccggcctggttatccaggagatgctgctgcgtcatcgcgtccgtactgtactgatcgtttgccccgcgtcgctgcaagaaaagtggcgtgtcgagatgatggaaaagttcggtttggaattccggatcgtcgacagcacctacatcaaggagatacgacgcgagcgcggaatacatgccaatccatggacctcgttcccgcgtctgatcacgtcgatggattgggccaaggccggcgatggtttgcgtgcattccgcgatatcctgccagcgcatgtcagctatccacgcaagttcgacatgctggtcgtcgacgaggcacacaacgtcgcgccgtcagcgagtgctcaatatgctatcgaaagtcagcgtactcgtctcattcgcaccatcgccccgtatttccagcaccatctattcctgactgcgacgccgcataacggctacaccgaatccttcacttcgctgttggagctgctagatgatcagcgcttcgcccgcaacatcatgcctgaaccgaagcagctatctcaggtgatgattcgccgcctcaaaagcgagatcatcgataaggacgggaacctgatctacgcgcagcgcaaactcgaagcattgcccatcgactacaccgccaaagaaagagaggcccatcgcaagctgggagcattctgtgccagtagggaagcagcggatgaggagttgggcggcgtgaccggcgcatccttcgtcaaccagctactacgcaagcgcttgttctcgtcgccggctgccttcgcgtcgaccctggaaaagcatgtcgcgaccttggaaagtggcggagctagtaaggggcggacggatttgtccgagcgaattttgctcaaggctatccagcgtgccgaagaggattacgccaacgactcagacgtcgaggtcgcgcagcaagaggccgtcgaggaagccacgcgccactcacgcccgctgaacgcagcggagcgtatcttgcttgatgagctcagacactgggcccagcaggcgatgaatcaagccgactccaaggccaaagcgttgcttgattggatcgatcggcatctgaagaccgatggatcctggaatggtaaacgagtgattctcttcaccgagtaccgcaccacgctcgactggctacatcagattctggcgactcatgatttgggtggcgatcgcctgatgatcttgcatggcggcatggatcacgacgatcgagaacaagtgaaggcggcattccaggccgctccagacatttcccccgtgcgcatcctgctggccaccgacgccgcttccgaaggtatcgacctgcagaaccactgtaactacctcattcacctggagatcccgtacaaccccaacgtcatggagcagcgtaacggtcgtatcgaccgccatggccagcgtgagaaagaagtggtgatttggcacccggtcgatgctcgccaagaccaggatgctgtcggtggccaccaggacgatatcctgcgtgccttgcgcaagctcgactccatgcgtgccgatatgggcagcgtgaacccagtgatcgcaccgcagatgtctgggctcatcgaaggagcgctgcgtgatctggatacccgactggcggacgcgaagatcgcccaggcccgcagcttcgttcgggctgaaaaagacctcgctaaccgaatagccaagctacatgagaagttggtcgagactcgagagggcttccacctctcccccgagcacatcctgaaggcggtcgaaaccggcttggcgttggccgagaaaccggctctcaaaccgctgacgctggcgggaatcgcgccaggtaaagtcttcgagctgccgcccctagggggcgcctgggagcgttgtcgcgaagggctggagcatccattcaccggcaagacccgcccggtgacattcgatcatgaagtcgccaatgggcgagatgacctggtgctcatccatctcaatcatcgcttggtgcagatgtgtctgcgtttgctgcgtgccgaggtttgggcgcaggaagacaacaagcgcttgcaccgagtgacggtgcgaacgttgcctgacgagcgtctcgaggcgccggcggtcgtggtcgtgtcgcgcttggtgatcactggcggcaatcaccatcgtctacacgaggaactgacgttggctgggggctatctgcgtgaacatggcttcaagcgcgaagaaggcgtcacccgaatacaagcctggttggacgacgcgcagccgtgtcggctcaatgactcggtcttcaccatgttgcgctctcgcttctccactgcggaagaggcgatccagcaatccctcggagcacgctcacgcaatcgtctcgagtatttgggcaacaccctggaaacgcgaaagaacaaagaaaaagaagacattctcgccgtgctggatgagctggatagcgccattcgcagggaactaggtaaggatgagttgcccgaacagttcaatttgttcagcgaagatgagcgcactcaggttcgccgtgacagctccgccttgcaggcgcgtcttgcgcgcattccagccgagcgggagcaggaagccagcgccatcgaggcacgctatgccgaaccccaggatcgcaccttcccggtagccgtcattttcatcatacctgcatcgctagcccagggaggccgcgtatga

SEQ ID NO: 343887 - DNA, 1329 bp, Pseudomonas aeruginosa
atggcgtttaaggacaaggcggagctgcgtgcgtttctggagatggaggcaggatcaatatctcacttgccgtcttcgtctcggcgtggggagccctccgccagcgctgaggagtacgctcgagcactcaaagaaatcgagccccgcatctctgacggccaacgtcgcatgctaacgggccacgctatagccccagagcagactctgaccatgacgcagctggccgcactgatggggcaggtcaattttcaatctgccaatagtcagtacggtcgcctcggtggaatgctagttgcgtctcttggtgttccaaaacctaagtggctggtctatgccattgcgagcttcgatgacaatccggagtccgggaaaaggcgtgcgcgtatgcatcctgagctgtcccaagcgcttctgcagttggggtggataacgcagcaggatttcggtggcgcgattaccggccaaccaggcaaagggcaggggccggtttccggagttcaccaagtctcgctcagggctcaggatgttattgcagcactggagggtgcaggttttagtcggcccgaacagtccggtctcaaggtggtgcgtctgtcgcatccagctctgactatgcctgtgttcgtcaagcagagcgccagtgagacgccgctcgtgctacacccgaaatatgaagagcatctctctagctggctgagcatccagggtgtggagaaaggccaagcgccttactaccacaatagcaatcttcgcggattccctaaacggagaaatacgggagccacggatatcagctacggcattgatttagggtttctgggcttaggtgcgctcgatgagttcatcaggcagcttctagaccagacgggagctgtggatggcgcgccaacaacgccgaagcctttattgccacagtgcttctcagaggaattgcctctgaccgacactgagcgggaggctttgatcaaggcgcgaattggccaaaacggttatcgcgaggcgcttttggcgtattggggtggctgcgcggttaccgactgttgcgtacctgagctactacgcgcttcgcatataaagccttggcgtgctgccagctctagtgagcggctggatccgttcaacggccttctgctgactccgaacctcgacctggcattcgatcaaggcctcatcagtttcgatgaggacgggctcatcctgcttagcagcgatttggatcctgccagcattaaggcacttcacctcacgccccaactttgcttgcgccagctcgagacgcgtcatcgcggctatctagcttggcatcgtgagcatttattcagagcctga

SEQ ID NO: 343888 - DNA, 648 bp, Pseudomonas aeruginosa
atgaacaagccggccacggttaaagcgctggaagatctagggcgtatcaggctttccacccacttctttatgcgcgatttcctctactcggaaatcagtcaaattgagggtattccaaacatccccgactttcctgaccgtgctatcgaagcaggtcgggggctttgtgagcatctgctggagccgttgcagaaaaaattcggccggatagtcattcgctcggcttatcgatcgcctttggtgaatggcaagggggcagagaatggtaaccaatacagctgcgccgcaaacgagaagaattacgcctcgcacatttgggattatcccgatacagagggctatctaggcgccacggcttgcattgtggtgcctgccttgctgccctggtacgagcaaacaagcgactggactccgctggcctggtggattcatgacaatctgccgtacgccagtcaattttggtttccaaagctcgctgccttcaatctgcgctggagcgcaaacccggcgacgctcccaagcatcaatacctatgttctcaatccgcatactggggaccggactgcgctagtcaaggacggtgtagctagatgcagccttgaagagcgcaagctcatcgttggtccatggttggccagcctcaaataa

SEQ ID NO: 343889 - DNA, 645 bp, Pseudomonas aeruginosa
atggatgactacatcaggaaggttcatcggctacggaaagctgttagggagtgggtgcaagttgaaagcgccacttcggatcaagatgcaacggccgtatccgaagagctagcggccattgcctctgaggatcctaaggttcgagcggccctcgataagcttaaaggtcgagaccgagttggcgtgatgggagagggggccgcacttctcggcggcgctggcgcgggagcagcattggccggaagtgctgccggcatggcaggcgctaccacattgctcggctctacaagcctagcgagcctgctaggaggtgtgttcgttacgaccactccgattggctgggtggtcgggtctgctgcagtggcgggagccgctggctacggcattgcaaaactcattcggtcaggcagtaagcaggatcagctaaggggtgagctgtctggtcgtctagctactaggctgattgagtcacctcgggatattgctgatagcgagcttgaggtgctgctagccagcgctctcagagtaggggcgatcgcgccagcttctggtgagaagatgcgagctctgattcatgccggatcgctagcccctgatttggcattgcagcgtgttagggacattttgaactcccaccacgaatga

SEQ ID NO: 343890 - DNA, 678 bp, Pseudomonas aeruginosa
atgtcgagcagctgcagcgcaagatccaactgttgcagttgccctttggccacggttgctaacgtgtcggaggcgaaaggggcgctgatgaacgttgacgcgactagcagtcacttgaatagagagccgcgagccttgaatcaatcgtggcttgagggcaaattgacactattaggatgttgggagggagttatgcagcaactgactgcggcgcagggagcattcgagttgacgttgctcaacgccgagtgcgccagagataaatttgatgatctggtcatcgagggattgagcctcggtattccggcagagatcatgactcgtcttgaggcgatctggtctaccacaaggcaaattgctggagaggtaatcactgtcggcaggatcgttgtgaggcagattctggcattcatcaaggcccatcctggaattgccatcggcgtggccataggggctgctatcggaggcataaccgcagcgattcctttcattggtcctctgctcgcgccaattacaaccagcgctgcagtgctgatgggggcagctgttggggcgaccgttgattcgggaagtccctcttcagatcctttggtagcggcgatccagcttgcccgcaaattctttgagttcatccaatcggtctttctggcagtcagagactattactccgaggtttga

SEQ ID NO: 343891 - DNA, 615 bp, Pseudomonas aeruginosa
atggaccgagaacacgcgaaccaaactgctgctcgctactacaagcacctcagggacttctgcgaccttcagagccagctcaaaccctttttcgccggcacattcataggcgaaatcatcgatgcggtttcagagtgcgtagacgaggcggaaagcgccaacactctgtgcggctttctcccagaaggtaacaccttcgacgaacaagactggctcacctcacaaatccgccgcgatgggcaacgcaagcgctttcgtagcctgcaagagatcccagagcacttgcgagagcacttcggtgtagacgaccaagacttccgtgagtatgcggatcagctacgagacgagtgctacgacggctacaacctactcctcgagcaacagtcgaatattgacgagcattttgagcggcagcatcttcacgaaatctatgactacgtggatgtagaagggcttcctctctacgcgaaagatgccatctgccaggttttcgaacacatgctcgtcttatggggtaagtacgaggcgctagctcgcaccctcacgaaattggtttccctagccgacgataacgatcccgacccagaccttaccaaggcagcactcttcggctga

SEQ ID NO: 343892 - DNA, 897 bp, Pseudomonas aeruginosa
atggagtactattcgcacatacttctactttgcgacccttttctgcgagagtcagccgccatggagcgggctagagcacttgccgccgcttgcggcggccatctacatctagccattctggatgacttaccaatcggaatggggggaattgacagcactctacaaatacgcgctagagaagagacgagaaagcggcaagagaagtggctgaccagcaaagccgacagcatgcaagcctggggcatcaagacatcggttcaggctgcgtggactgaagatgcagtgaaagaacttcttgaaattgtgataaataaaaatgtcgatcttataataaaagacactctactcgagaaaagcttgcatcgtgcctttataacaccactagactggaagattctgcgccactgtaaagtagcaacacatttagttagctcgaccgaccaccctcttccgcagaaagtagctgccgcactcgacttatcaaagagcacgtccgaaagtgatgaattaaataatcgcatcatgacatcagcaaaacaactcgcccttcaaagcaatgctgaacttcacattcttcatgcgcacaacttaagcacggacttcttagtttatgcggccagcccagtgccatggacgcccgtgctacaagataaaaaaaacggaatatccacagcaagaatgaagagaatcgcagaaaaatacggagtccctagccaatatcaacatcttataattggctctgcaaaacaagtgatagctgactttacatcaaagcacggaatagatgtagttgtaatgggcgccatacaccatcctgggatagagagaataatcggcagcacaacggagcaagcgttatacaaagtaaaaaccagcattcttgccgtccaagcctag

SEQ ID NO: 343893 - DNA, 1041 bp, Pseudomonas aeruginosa
atggagggggttcgtgttgttctgtctaggttgcatgagattttacttttgacttctcctgctgccggtgttgatgtgttttcatgtgtcatggagggcgtgagtcaggctgttcaagttatatgtttggcatacgatgattttcgaattgataattctagagctgaggatctgtgtcgtctttttgttatttctaaagattctggggtggagaaagaacgccagaaatcagcattgctcagttgggagaacaagctgatttgcgatgttttacttggtgctccagttgcatctatttcttttttgagtaagtcggattttggtatttggtttctgcataaaggggttctttgtttcgacggggtaagagaggttgacgaaatactttttcagtttggcagattggactctgttgtgtctgaggctatagggaggggggatctcggcaccggatttctattggatgtccgagatgggtgtagtgtaattcgttttctcttggatagtatgtttgatcaagttataagtctagagtctgggcgagatgttctgacacgactccttaatcgaagatgccttcaaagtgtcatgttgcgagaacttaattatttgcgccgcaatgagtctttcttgtcagtgttaactatagatatagatagcttcaaatttataaatgatagctacggccatgcagtgggggacgaagttataaagcgtgtcgccaccttggtttctgagagcgttcgtggtggggattatgtgttccggctaggaggggaagagttcttggtcgtgctggttgaggcgtctgaaatcccggctcgtagagttgcagagaaaatttgcagaagagtacagaaagaaattatttctataaatgatgggcggagcatttctgtgactgtcagtattggcgtcgcagagtacgatggtcatccagattatacacgtctacttaaggcttctgatgcagcgctctatgtggcaaagagtaacggtcgtaaccaggttgtggtcagctcaagtcttcatgtgaactaa

SEQ ID NO: 343894 - DNA, 1611 bp, Pseudomonas aeruginosa
atgtccatcagaaacattcgcgtctcgactcgtatcagcctgggcttcaccgggctagtgctgctgctgatggtggtcggcggtggctcgctgctacagatgcagcgtatgaacacgagttcggcggaggttcatgacaattggctgccgagtattctcgccttggatgagctaaatggcgcctccatgcgcgtgcgaatttcgacgttgcgcgcggcggtccgcctggaggccgatgctctgccgcgcatcgagcgggaacgggccggcctggctgaggcccaggagcgctaccgcaagttgatttccaactccgaagaacagcagatctacgagcgcttcgcggctaaccagcagacctacatcgaaacccagaatcagttgctggagctgctgaaaaacgccaagagagaggaggccgacaacctgatcggccagatgagcagccgagcgacgagcatcgccagcgacctggaagcactaacgaagctgaacagcgatggcgctaccagcgcggccatgaccagcaagaccgcctatgagaacgcgaagcttatggtctggctgatcctggctggcactgtggcccttgccattggcctggccgtgctgctctcgcgcagcatcgtgcggccgctggcacaggcggtgcaggtggcacgtacggtggcctcgggcaacctcagcgagcatatccaggtggagggccgcgatgaggcgagccagttgctggaagcgctgcgcagcatgcaacagggcctgcgcaagaccatcagcaccatctccgattcctcggcgcaactggcctcggcctcggaagagttgcatgcggtgaccgacgattctaaccgcgggttgttgcagcagaaccaggaaatcgaacaggcggcaaccgcctgcaatgagatgagcgtggcggtggatggcgtggcgcataacgccgccaacaccctggaggcttctcgccacgccgaccgcaccgccaagaacggccgcgagcaggtgcagcagacggtgcagtcgatcaatgccctggccagcgatgtgaccggcagtgccgagcgcgtggagctcctagcgcggcagatgcaggatgtcggcaaggtgctggatgtgatccgcgccatcgccgaacagaccaacctgctggcgctcaacgctgccatcgaggcggcgcgggccggcgaacagggccgtggcttcgccgtggtggccgatgaggtgcggcttctggcgcagcgcactcagcaatcgacccaggagattgagcagatggtcggcgccctgcaacaggaagccgccagcaccgtgcagaccatgcaggatagcaccaccctggcccagtccaccgtgcagctggcggaggccgccagcgcctgcctggacgatatcaccgacaccatcgcggctatcaatgagcagaacgtgctgatcgccagcgctgccgaggagcaggccgcggtggcccacgaggtcgagcgcaacctgaccaacatccgcgacctctcggcgcaaaccgcagctggcgccagccagacgagcgcctccagccaggatctctcgcgcctggcggtggatctgcactcggtggtggcgtcgttccgcctgtaa

SEQ ID NO: 343895 - DNA, 858 bp, Pseudomonas aeruginosa
atgcgacaaagacgtgaacgcacccagaaggaaaacgagctgcaatccgcaatcatcggcgctttgggggcttactgccgcgacaaaaggatccgctgcagccaccttgagtactttgcaaaccaacagggcgatggggtaaatcgagtttgcgcggatttccttgcgacgctggatgactcaacactcctgctcgccgaaacgaaggtgcaggaagggggggagctgatcagatttgaggaggagcaatacaaggagaatctgagcttcgaaagatgtggttttcccattatctacgtttacaacacggcatccctaatgccgtattacgaaaagcctcagccctacgacttcccagagatgacactggcagccaccaactactcagagccctcaatgctgcccgacaaatatccggccatggaacagcattacagcttgttggagtggctaaagcaggtgccagttggaggagacaacacgacaagattcgcccggattttcgccgctatacgttcagaaggcctgcttactaatgggctgatgatgctgatttacggaacaagctccgtgaagcttttggatcaaccaaccgccaatgatttggatcagttaattgatacgctaacgatcggcgccaccggtaggttcttaaacccaaagcagcaaaagcagttggagcgttttctcgccgaagaggccaatgcgttcaacagctggatcaacttctctgaccctcaaaacggtacccagccattgctccctccagtgtcttcatcgtcgccagtcactgatggaccaggccacggcgccagaacgaagcgaagcaatagtggatacgatgacttcaagctgtaa

SEQ ID NO: 343896 - DNA, 1446 bp, Pseudomonas aeruginosa
atggacgagcttcgtatactcattggccggcttggttggccgtcgacgtctacacggtggtggaccatgcaggagctggcagccctgctaggtgagtcgagctcgagagctgaaaccgagaccgcgttgctccagctgctgagctcacgcaaacttgaggccgaagcggtcgaggtcctgtgtatcttctggatggcggcacacgcatacgactactcacccactcccaagctggctgggagcatcccgaggttatccatcctttcggacctgctactagaaagccttggtctgttgagagaaggcgacgacagcgagttggaggaggttcccgaggaatttgagatcccccaggattttgatggcgtgcaaggcatagatctgccccggattttccgcacttctatgcgcgagctcgataagcatactcggctgcctttcgttcggcagatggcctttgagtggacgtcgaaccgcgccgcctatccagaagctccgttccaaggagacccctggcacttcttaaggcccatgggcgagggtttcatcggacagctctcctcacggacggcccttcgtgccatctccgcctaccttcggacgctggcggttgccgaggatttgtggggcatgccaacggaactggcggaagaaaaggcacttttggcattgcctgtccatccgaccttagctttgctgagacctcagcgcccgacttggttccccgcgacaactgacttcgacggtgattcagaggcgattgaaacatcgttacgagccctgcttggccgtatacatacagcgcggccgggtgacgaactgctcgcgttcagctcaccaatcgtgatgtcaatggagcggtgcgttgaggtttcgattatcagatggtcgcaagcggcgggcagcaccaccaccgatgcggaattggctgcgcatttggcgagcttctggtcccacgggcggatgctgcgcagcgtggccccagagccactgagcacgacgaccctcttggcaccggccgatcttgacggactgataatagatgagcagtgcaaggcctggccgcttgctgcgccgctcggcctcgaccgtttaggctatcttcagcacgatctatatccggggcggcttttccttccaacgctacctggctccgacctggctgaactcatcccttgtggcggggagttggaggtcaaagtggacgagcaggtcatcgcggacctctgttattggaatacaggctggggagtcgcgcgcccgatgcagttcggtggcaactgcggtacagcactcacttcacgaggcacgagctaccgggaaggggttgcctcaacggaaggagcggtgcgctcattctatctttggcaggtgagaacactgcaccgagacaacaccttcgacaggtttagccaaacgctgacgatgggcgctatgttcgtctag

SEQ ID NO: 343897 - DNA, 4422 bp, Pseudomonas aeruginosa
atgtctgaagacatcaagaacaccgcgatcaccgccgcaggttacatctaccagaaccgtcaaggcctcagagtcctctgcgattggcttgacgcgccggctcgttacacccgggtaaagttagagtgcgacgacgaggctgtcgcgccgacggggctggatgacatcgttgtcgagcgtgcagatggcctggttgatcttcagcaggtcaagttcaccccggctccaaactcccatccgctctgttgggattggatgctggaaaagaccggcaagacggcgcgatcgaggtcgatgctgcgcaagtggttcgatgccttcaaggcgttggaatcgacgcgtattggtgtgctttcgctgatgaccaaccggcggccggatgccgatatcgaagcttgcctggaatgcggcaagatctcctttgccaagattgccgagcccaggcgttctcaagtcattgcggaacttggtgatgaacaaggctgcgaggcgttcttcagccaactgcatattcttcacagcgacaaggggttcgacacgctggagcaagaggtcgatgcacgacttcgcaagcacggcactcctgagggcattgccaccctcaagaacgtagcgttgaactgggcaacgcggaaaaacttcccgccccctaacggttggatcacgctggagcaggtccgcaccatcctgcgctcgacgccaccggcgcctttgcctgaggacttcgttgtcccactgggctacgaggtgcctgatgagacgttccattcggagtttgtccgtgacgccatcggtgctaccgggagtgcgatcgtgctcacagggccgccgggccgtggaaagagtacctacctgagcgcgttgtgcgacacgctcgcggaacgggacatccccacagtccgacatcattacttcctctcgacgacggagcgggggcgcgaccgggtgaacagctatgtggtcgagcagtccatcgaagcgcaggtcaaacggtttcatcccgatgttcaggtaccagcgggcgacctgcgctcgctccttgaagcgtgtgcctctcactacaaaaaactggccaagccgttcgttctcgtcctggatgggctagaccacgtctggcgtattaacgccgaggacaagcggccgctggacgatgtgttctcccaactgatcccatgcccggacaacatggtactcctcgtcggcactcaacctgtggacgacgcccagttgccgacagacctgcttgccttcgcgcccaaggctgagtggcgtacgctgccggcgatgtctgagaacgcagtcctgtcctatttgcgcagggcgcttcaggagggcaggcttacgactgaattcgagggcgaggatggttcggaagcgcacctgcaggaggctgcaaccgcgcttcgcacaaagaccaatggccatcctctgcatgtcatctatgccgtcgcggagcttgagcatgcccgtcgcagcctgtcgaagtgggatgtcgagcagttgaagggcgacttgagtcaggatgcaaagttctactacgcatcgctttgggaaagcctcctcccaagcctaaaggacacattgcggctcgtatgtgccttttcgttcttctggccgaagcctgcattcacagagattgcggcgaaagttggcgcggcggaaccggaggtctcgaaagtggagcatctgcttcattcttcagcagctggcctgaaggtttttcatgagagcctggcggtcttcgtgcgtacaaccgccggatacaccgaccgcatcaacgagctgatgccggcggtggcaagttggttggagaccactgcgcctacctcgctacgcgtgaactggctttggacggtccaggcgaggctaggtgaacccaaaaacctcatcgccggcctcacccgcgactggatcatgctccgcctggaggagggatatccagagtcgctctttgagacgctgttgtctgaggctctggtcgcagcgctggacatccacgagttcgctgaagcctatcgactggagcacctcaaagcacggatggttggtggcagccagtatcagatgcagaacgacgacgcggccaggctgatctcgttcacgttgatcctgaccgcagaggagggcgtcgtgcgcgaggctgtggcttccaggcatgaggcagacatcctgcggcttgccgcgctcgggttggccctgcgtgcacggggcgaccaagttgtcgccgaggcgtgcggtgaagaagcgcttcgtcgattcagaggcgtgagccgtttctccagcaggtactcgtcgggcgccggctctgatgagttccagttcctggtcgacgcatttgcgcggcttggtgccatcggatcggccccgacagcgctggcccggctggtgtccgagaacgggccggtcgtttggctgccgcgagtccagatgctggttgaggaaggcaatttggatgacttgatggcagccgctgcttcgctcgccccaggtgagagtaagagtctcatcagtgatgcgtgcgtccgcgcggcagcgaccgctggagtgagcatcgcagagcgcgatgacttcagcgagctcggccgaaccccgttagtcgctgccgtggaggcagccagcatgcgggcttccaagccgttgaacgcacctatccctaccgagtggctcaaaggcggctactacgagcgcaaggaagatctcgcgacgctcgcgcaccactggtttttcagcgccgttcagttgagcctgtgcatggctgcggaagggcagaccgcctttgagttcgtgcgggctcccgcctacgaagaccggaagaacatcaccgacttcctcaacgcactctctgtggctgcggcacaggttgcgcagcactggtggcggggggaattggtggacttccatgagttgttcaagttactcaaggcggtggagttcaggcgtttcaggcaaggccatgacgagagctctgcagccgaagacttccggaacgcgctgcatcgtattgcctgcgacatccgcctgggcagcgtcctactggaccacttcgacaatgtggccctgaccaaagaaaccatggaggcggccgggcagtacgtttggtttgacagcgagtccttccgaactcagtacgcggccggattgctgacgaggatgagtgacgatgcggcggcggccttcgtcgagtcccagcgtgtcctgcttgatgcagagatccgccatgaaaccagcgtacatcttcagacgccgctccagctctgtgccattgcgctagcccatgggttgagcaacagcgctcgtgagttgtgcaagcagacgtgggagttgaccactggctatgcgcatcgcaaggaccctacgctgaacaacactgtcgacgcaatcggctacttggtcgatgtcgcgccgaacgacgctcgccgattgctcggccgtattgcgccgcaggtccaccacgtcctggactacaccgacgggaagggcaccaggcatgtactgacggccgccgatcggctgcttgcgaagttgaagccgtccgctctggtgattaagtacgaggagcacacgcacacaggcgactggtcgcaagcagaagacagtttgcgggagtacgtggtgcaaggcatcaaggacggttggcccctggacgcgttaatgcgaaccggactgcatcctgcgatccatgacgtgctgagtagacttgcactggaaggcagctcaagcgctgcggagcgacttcgagtccttcgggagcacgccggttgggacattggcctgctgcagcgatcggagtatcccggcagcggtagcgagagcaagccttacacgggggatgtcacgacctttgcgccggaacaattcggcgacctgctcgacagcctatcggcgagctacaacgagcaagcgagacttcttcgcgactggtatcagcactgggacaaagcggggcagggaatgcgactgctcgcggcgctcgacggcttgcttctgtcagaaaagggttggcccaggggagtcctggtactgtctgacctggtctttcagacgaggcgcaagctaagtggcgtaaagtcggcatggaagtaccttgtccaggcgcacatccgaaacggggcttgggtcgggttcgcggagaaggaagagaaaaccctcagtagactcgatttggtcgtcaaacactatccgcagcgctgtgacgagttcgtggctgcgacgacctacggcatgttcggtgaccccgaactgccacgtgtggcgcccacagaagtgatggtctacttctacgcacgacaaaagcgaatcgcggaggccgtgaagtttgcggagacgatggtcaattgcgtcattgaagacacccgcaccctgccgttggagcggcctcgctgggcggctgagttgatctgctctacaggggcggaggcttga

SEQ ID NO: 343898 - DNA, 960 bp, Pseudomonas aeruginosa
atgagccgcaagccccttgccgatccactggtggaagaagcgattcaatggatggtgcgcctgcaatcgggagaaaccacggagcaggaacgtcgagcgctggaacactggctgagtacttcgccgcggcatgaggcggcgtttcagaagatttcccaggggctctcgccgctgcgtgaatcgccatggcgatcgcgctccggggatcagctgctcagcgccatgcgggcgccgtcagggcgtcgccagttcctgcgcgccagcctggcgcttgccggcctggcactcgccgcaggcgcgattctacgtgtggaacgcgcagggctggcgctgcccggcgatctctacaccggcaccggcgagcggcgctcctggaacctggaggacggcagccgcatcgatctgaacgcgcgcagcgtggttgccacctgtttcgaagagcatcagcgcggcgtgcggttacgtcagggcgaactgttgctgcgggtcgcgccggaccgtcggggagcttttcgattggccaccggcaacgggcaggtgctggtccagcgaggcagcctgatgctgcgcgaggaagcgcaagggacgcgcctggtcaccctcgacactcctgcgcagctgactctggggaatgccggtacccatgatcttcaggcgcaccgcagcgtcctcttcaatgagaacggcttgttggccaatgatgcgatgcagccatcggagagtgcctgggtggatggatggctggcggcgcatgatcgcccgctggcgtgggtcgtcgaggcaatcaagccctatcgccgcggaatagtcagcttagatgctgccattgcgggcgttcgcgtcagcgggctatacccgctggataacagtgacctgactctggagatgctcgagcgcagccttccggtgcgagtagtaaggcgcagcgaatactgggtcaggattgaagctcggggataa

SEQ ID NO: 343899 - DNA, 636 bp, Pseudomonas aeruginosa
atgcagattgatagccaaccggttcctcgcaggtcccgggtgcgtcgccacggcgcacgcctctttcaacgacaggcccactaccgcaccacacgttggcgtgagcagtccccaaaggcctcgattcatatggaccatgaagccctcaagcagaaagtattcggccagctgtttcagcagaactacgcctggctctgtgctcgcctgtcttatcgcaccggctgcgcccacagcgctcaggacatcgcctcggaaaccttcctgcgggtctggtcgcacaccgaccctagcgccatccgcgaaccccgtgccctgctcacgaccatcgcccagcgtctgatgtacgaaggctggcgccggcgcgagctggaaaaagcctacctgcaggtgttggccacgaccccggaggaaacccatccctcgccgcaggaacagtggatcctggtggaaagcctcctcgccatcgatcgcatgctcgatggcctgtcgcgccaggccaagtcggtattcgtctacagccagatcgacggcctgacctacagccagatcggtgaacgcctgggactctcgctcgggcgcgtgcaccaactgatggccgaggcgttgcgttgctgctaccaggagttggccggatga

SEQ ID NO: 343900 - DNA, 1542 bp, Pseudomonas aeruginosa
atgagcaaagcactgatcgacaaggcccttctgggcgtaattctgctggcgattttcgtcgtgcccagttcgatatccggcacggcgctggcgctgccggcgatcggcagtgatctgtcggcgccgctgaccggtcttcaatgggtggtcaacgccttcaacctcgccttcgcctgcttcaccctgacctggggagcgctggctgaccgcctggggcgccgccgttgcttcgtcatcggcgtcggcctgtacgtcctggcatcgctgttctcggcgctggcgttccaggcctgggtactggacctcgctcgggcgctggcgggaatcggggcggcagcgatcttctcctgcggtatcgcgattctctccacttacttcgagggtccggcgcgcctgcgtgcctttgccctgttcggcacggtggcggggttaggcgtgagcctggggccgaccatttccggcctgctgctggacagcgtcggctggagagccattttcgctgcccataccgtgacgctgggcctggtgctgctgggcagtccgttgatacccaaggatgtcgctcgccccggcgggcagcggtttgacgtgctcggcgccggcctgttcatcctggcactgctggcattgatgagcgctatcgtccagggctcgcagtggggctggcaaagccagggcatcggcttgctggtgctggcggctgcggtcctgctcggcctgttcacctggcaggagaggcgacatgtgcagccgatgcttgatctctcgctgcttgccaatgcccccttcgtcggtctcgccctggtgacggttgctgcatccttcggcttcgtcaccctgctgacgtacctgcccagctacctgtccggggtcttgcgcctggcgcctacccacgcgggcatggccatgctgctgctcaccgcgccgatgctggcctgtccgatcctggcaggcaaatgggtcggccgaggcgtctcagcggtggggatcctcaaggcaagcctgctggcgctcctggccgggttggtctctctggccctgctcagtcagccgggtgcgctgctcgcccatctggcggtgccgctgttgctggtcgggatcggcatggggctgtccgcggggctggtcgacggcttggcgctgaagacagtcccggagcagcaggctggcatggcggctggcctgcttaataccttccgactgggcagcgaggcggtggcggtggcgctctacggctcgctgctggcgaccttcctcggccagcaactggggcctcgtatcgccccgctggttgaagggcccggcagcctgaagggttggttggatgccaccgcggcgggaaacctcgatgggcctgccggcgcccccgagggtctgctgcagagtctgcaacccttgttgctggcgggctacgaccaggctttccatgacgtgctatgggtgctggctggcatcgtgctggccctgagccttgcggtggtatggctggtccgtccgctacgcgcgcaggaacgtcaggcgacgctggccggcgcgatctga

SEQ ID NO: 343901 - DNA, 1218 bp, Pseudomonas aeruginosa
atgaccatagcccttcacacacgtccgcccgtgctggtgtcgcagattcccaacctcgacgcggctgcgcagtaccgcattgccgaacccgctgcgggcctgccgcgaatcgtcctgcccagcgggcacctggcctatcacctgacgcgctacgagcacgtccagcagatactcaccgacgcacgagcgatccgcagcccgtgcaacgccgaggacggtgccagcttcctgccaaccatcacgcccccggaaatgctcctcaacaatgacgcgcccttccacagccgcctgcgcaaggtgatagccaaggacttcagcccggcgggtgtggccgaactgggcgagctcgtggcgagtgtcacccatcagcgcttggacgagctggcacgggcgggcgagggggccgacctgttcgggctggtgctggatgaaatacccgcgacggtggactgccgcctgctgggtatcgatctggctgaccgcgcctattaccggcccctgagccacaccatgcagatcgcctccgacgaggacgtcccggaactgctgcggcagttctgggaggtctatggctacctcacggacctggtcaccggcgtgcggccatccctgcccggcggcctgatccagcgtctggtcgcggggcgcggggacagcgagccgccgctcaatgacaaggagctcgtgggaatcctcattggcgtactggtgggcggcgaccagaacatcctcacggtcctgaccaaggtgctctatacgctgctcgccgcgcccggcctgtggcagtcgctggtcgacaacccggcgctgatcccctcggcggtggaagagctgctccggctgattccgctgggcaccatttccaccttcccgcgcctggccagcgaggacatcgacgggccgtggggcgtgatccccgccggcagcgccatctatgccgatgccttcgctgccaaccgcgatcccgaggctttcgccgacccattggtgatccgcctggatcgccagggaccgcgccacctgcagttcggttacggcatgcacaactgcatgggggcagcgctggctcgcctggagatcaccaccgtccttcaggtgctggtcgagcggctgccgcgtctgcgcctggcggtgcccgcccaggagctgccgtgggtccacggcatcatcctgcgacgtccgcagcacctgccggtgcgctggtccgccactcactga

SEQ ID NO: 343902 - DNA, 681 bp, Pseudomonas aeruginosa
atgagcgcacccaagttcgtctggttcgatttcggcggcgtgctctcgccgccgattccggaactcttcagccagtaccagcgcaagaccggcatcgccccggcggccctgcagcaagccatgcaggatgtcgccgacgatctgggactgccgatgctggcgcccattgagaacgccgtgctgagcgaggtcgagtggggcgcgcgattggccgaggcgctgcgccgcaacgacccttccctggacctctcccgggcacgtctggagcagttcggccagcagtggttcagtggtgtcgagcccaatcccgcgatgcgtgaggcggcgttgcaactcaaggcggcgggttaccgggtcggcatcctcaccaacaatgtggtcgagtgggaaccttactggcgtgagttggtggggctcgacacggtggtcgacctggtcgtcgattcttcccgcgagcgctgccgcaaaccggacgcccgcttcttcgacatcgctgcccggcgcgcaggactcgcccccgcgcagaacctgctgatcgacgacgtcgccgagaatatcgaagcggcctccgcgctcggctggcagacactgcactttcgcgacaaccccggtgcgctcagcgctcttgaggccttgacgggcatacctttgcgcgcgccgcaggaggcacttgcatcatga

SEQ ID NO: 343903 - DNA, 1020 bp, Pseudomonas aeruginosa
atgtccgatgtctctcattacgagaacaccgtaccgcgcagcatggtgcatcgcgccgcagtcagcgaagtgttcctgaccggtgccacacgtttcgacgatgtgagcttccagtgcgccgcgcagcttccgcgcacccatagctatttcagcgagcactctcacggtggcgagcactacgacatgctgttgttgctcgaagtattccgtcaggcctcgatctatatctcccacgccttcctcggcgtaagcccgcaggacaagttcctctacgttgacagcgatacccgcctggttcgtcgcgatctgctgcggatcggcagcaggcccgcctcggcgctgatcgacgtgcaggtggtcgaccactactggcgcgacaccgtgctgtcgggggtgaccctggacatgcaactgctgatcgacggtcaggtcgccgcgcgccacgagcgcatgagcatccgctggatgccctcgaccagctgggacaagttgcgtgcccggggcctggcaagcgttcccgccgatgcggacccacgagtacagcgccccgaaccgctggcgccgcggcgggtagggcggcactggttgaccaacgtggtgctggggcgtgacctggacgaacaggaggacggattctccgcgagcctgatcgtcgaccgcgacaacccggcgatcttcgaccacccgctggatcacatccccggcatgctgctgctcgaaggcttccgccaggtagcgctggtcgcggcacgtcgttatcgctccatcgaggccgatgcgttgctgctgtcgcagtgcaaggttgccttcacccgctttggcgagttcggcctggagacccgctaccgggtgcgctcggccgacctccggctgcaggaggacgggcagaccctgtcgttgccggtggaggtggtgcaggggggacaggtgatcgctcgcgcggaggttcacctggtgccgatcgcctcggcgctcccccaggaagtcagcgcagtgccgctgcgcgaagaggtggcctga

SEQ ID NO: 343904 - DNA, 2685 bp, Pseudomonas aeruginosa
atgctggacaaggggatcatccggaggggaattggcgcatgcacggtggccttcgccagtgcgctggtggcaggcggcgcatgggcgcaggagggaacacccgccgcacaggaacgcgtcacgcagttcaacctcgaggcgggaccgctggccgacacactgctggatatttcacggctgaccgggcagccgatctccttcgaccaagccctggtacagggttacaacagtcctgccattcgcggcgccttgagccgcgaccaggcactcaatgccgcgctccagggcagcggcctggacttctcgcgcatcgccggtggtgcggtcctggtgcatcgtcgggaagtaccgcaagcgagcgttccggccgcggttgcgccgcagctcaagaccgtcaccgtcatcggcagccgtcgcaccgacctcgcggcgctggacgcaccagccccggtggacattctcaccgcccaacagatccaggcggtcggtagcaccaacctcgcgaaggtcctggaaaccctggtgccttcggtcaattttccgcagatcaacggcactgacggcgtctcttcgcaacgcccggccaccctgcgcgggctcgctgccgaccaggtcctggtactggtcaacggcaagcgacgccatgcctcggccttcgtgaacaccaaggcgaccctgggccgcggctcacaatcggtggacctgtcgaccatccaggtgagttccatcgagcgaatcgaagttctgcgcgatggcgcctcggcgcagtacggctcggacgccatcgccggggtgatcaacatcgtgttgcgccaggacgaccacggcggcgacctgcagggcagcgtcggccagtacagtaagggtgacggcttcacccgaagcgtcagcggcctgaaggggttcagcctgccgggcgacggttttctcacgctcagcgccgagggctcccggcaagaacgcacctccgtcggcggtagcgacagccgtcgcttctaccccgccggcgatccgcgcgaggccagcgccgaccgggactggcgctacggatcgccgggtctgggtgacttcaagatcggcgccaactccagcttctcgctcaacgatcaggtggaggcttacggtttcgccacttaccaggaccgtaccacccactcccaggcgttgttccgccgtccggtggacgccaacaacctgcccgccgtctaccccgatggcttcctgccgctgctggatgtgcgctcacgcgatggcgccgccaccgcagggctgaagttcgatgacgacacgctgggcaacttcgacctcagcgctacctacgggcagaaccgtattcagtacaacgtcggcgacagcctcaacgccagcttcggggccgcaagcccacacgacttcgacgccggcaccctggtcaacgagcagaccaacgtttcgctcgaccacgtgaagaacttcagcgtcggctacgccgagcagccgctggtgttttccagcggcctgacgtggcgcaaggaagagtacgaagtcatcgccggcgagccggcctcctggcaacacggcggtgccaatgccaaggctgccggcgctcaggggttcccggggattcaggacagcgacgagggccgctactcccgccatgtgttcgggggttaccttggcctggagcaacagcttacggaccagctgcaactgggcgtcgccgggcgcagcgagcactacgacgatttcggcaccaccaccacgggcaagttctcggcacgcttcgacttcactccccgcgtcgccgtgcgcggcacgctcagcagcgggttccgggctccgactctggggcagatcggcacatcggcgaccaccaccgacttccacccgggtgatccgatcgcctaccaggtcggcaccatcagcgtggaccgcccagtcacccgcgccctgggggcgaccgatctcaagcccgagaagtccaccaacctgtcgctgggcctggtcctgcggccggtggataacgcttcgctgacgctcgatgcctacgccattcgcatcaaggaccgcatcgcactgtcggagaccctcagcggcccgcaggtccgcagcatcctgaacgccgcaggctacggctcctacaccggagtcagcttcttcaccaatgcgctggacaccaagacccatggtcttgatctcaacggcaactaccgcttcgacctgcccaacgccgccaccctgaccttcaacggaggactgaactggagcaagacccaggtcacccacgtcaaggcaaaccccgctgaactgagcggaaccggcgtggtgctgatcaaccgcgaggcgctcagctacgtcgagagcgccagcccggagagcaagctcgtacttgcgctggattaccgccagggtgcatggcagctggagaccagcgccatccgctacggcaagtacaccctgaactccaacaacggcgagcaatacgaccagactttcggcgcccaatgggtggccaatgccagcctggcctacaacctcacctcggcgctcaagctcagcgtcggcggcaacaacatcttcgattcctaccccgacaagttactgaccagcaaccgttccgccggcggggtcgtgatgtacccgaacatcgcccccgccggcgccgaaggcgccttctactacgtgaaagccgattacgccttctga

SEQ ID NO: 343905 - DNA, 669 bp, Pseudomonas aeruginosa
atgagcactactcccatcgacccgatcgccctcttccagcagttcgaacaggacgtcgcgacatcgctgcgcctgctcctcgacagccaggcactgcgtcccggcgccgccggcaacctgagcctgcgcctgcccggccaggagcgcctgctgatcgccgccttcaacggtgatcagccaggctccgcgctggcgctggactttgacctgagcaacgcccagggaacccccagcgataacctgcgcgaagtggcggccctgcatgtggccatctaccgcgaacgaccgcgcgccacggcagtcatccatacccactcgccattcctctcggcattcgccatcgcccgccgcccgctgccggcccacaccaacgccctgctgttcggcatcgatgaagaccaggcgatccccgtcgccgaatggggcccgcgctatgccagcgaacccgtggtcgccgcgctgcgcgagcacccctggacacccgccgtactgctggccaaccacggtccgttcgcctggacggagggtggcgtactggccgccacgcgtctgctggtcaacctggaagaatccgcgtacctgagcttcctcgccgagcagctggggggagcgcgcaccttccccgctggcgcggcaaagcaggttcgccagggttggaacaaccaatga

SEQ ID NO: 343906 - DNA, 864 bp, Pseudomonas aeruginosa
atgaaaacgcagtcgcgggtcgcgtcctgcctgctgcgcactgcgttggccggcagtcttgccctgctggccggccaggtatcgggcgagccgctgctggagcgggccatcgaacgcggcacgctcaacgtctgcaccgccgacgaattccctccgttcaaacgctacgacagccacggccaggccagcggcctgatctacgacctgatcgtcgacctgcagcaccgcctcagtacccagaccgggcagccgttgaagctggagctggtgcaggtcacgccactcaatcgcctgctgttcctcaaccagggacgctgcgagttgctggtgacttcactgctggacaccccggcgcgacgacgcgaagtggacttcgcggcccccggctactacagctccgcagccactgtcttcgctgcgaagcacacatccatcgacagctgggaagccctgcgaggaaagaccctgtgcgcaccgctgaccagtgtctgggtacgcccctacgaggcgcgctacggcatcgagttcatttcgttcagtggcttgccggagatgcgcaaggcacttctcgacggccgctgcgtgggcgccctgggtgatgacgtgctgtaccgcgcgctggcaggcgagccgcaatggcaggacttcgaagtgaagctacccgggcaggacccggccccctggggtatcgcccttcgcaaggaccaaccgcagcttcgggacagtgtcggcgccatcgtccgcgactggcacgcctccggttacctgatcgacctcgagcaccgctatgggctgcccgccaacccttggctggccgagcagcaccagcgcttcgccacggccagcgtgcggagcgagccatga

SEQ ID NO: 343907 - DNA, 726 bp, Pseudomonas aeruginosa
atgatcgaaagcctcagcttctggttgggaaacccagagtggctgcacgtcctggacgatccgctggatcgccatcgctacctgctgggcttcgcacacaccttgactctggccgctggcagcgccctcctcgccttgttcctcggcctggctggcgccctcctgcatagctcgcgcggacgacctatgcgcctgctggtcgatgcctatgtcgaaacgatgcgcaactcgccgttgctggtgcagctgttcctgctctatttcggggtgggatccctcctgcctcaggacgccggcggacagccgctgctgggccgcacgggctgtgcgatcatcgccatcgggctgcattacggtgcctaccaggtggaggcactgcgcagcgcactgatctcggttcccgcaaccaccctggaggccgcaagagcgctgggcctgagtgagcgcgatgtacgtcgtcacgtgctcctgccgcaggcgctgcgcctggcgttgcctgagctgggaaacgtaacggttcaggtcgtcaaggctaccgcggtggcctatgcgattgccgtaccggagcttctctacgcctccaatcgcatctgggccgataacggcaacatcgcgcagatgatgcccgtgctgctgatcagctacctgctgctggtgctgggcgtgaccgcactccagcgctggttcgaacaccgcctgcggataccaggcgaggtgggcgcatga

SEQ ID NO: 343908 - DNA, 288 bp, Pseudomonas aeruginosa
atgaaggcactgcttgccacctctcgccccgcctcccgagtcccttggggtcgcctcaccattgcgctgccgttgaccctgggcactggcttgctcatctggcactaccgcgatccgctacagctgctcgtgcaatggactccgctgctgcttggcggcgccgcgatgaacctgctcatgggcgtggtcgccatgctgctggccagcctggtcggatgcgtgctgggcatactgcagctggcgcccggtatcggcggtcggctggcggcggtgatcgtgcgcgggtga

SEQ ID NO: 343909 - DNA, 474 bp, Pseudomonas aeruginosa
atgttctacgccgcctacctgctgccctatgagctgcacgtcgcaggtcgctggctgcaactgcccgattggctcaaggccagcgccggcctcgcattgccggcctgcggttacgtcgctgagttcgttcgcggcgccctgctggccatccccgccaaccagtgggacgccgccgccgcgctgtcgctgagccggttccagcggctgcgctgggtgatcctgccgcaggctgtgcgtggccttctcgcgccagccatgaacctgttctgcaccctgctgatggctacctcgctggccaacctgctgggcgtggaggagctgctcacccgcctgcagatgctgctcaacagccagacccgaccggacctgctgctgccggcatacctctatgccttcctggcctttttcatctgcgtgtatcccctttcccgctatgcgcgccgcctggagcggcgctggagccaaccacgatga

SEQ ID NO: 343910 - DNA, 732 bp, Pseudomonas aeruginosa
atgaacgatgtccggatcactgtccgcgatctccacaaacgctatgccgaccactgggtgctgcagggcatctccttccaggtgcgtcgcgccgagatcgcctgcctcatcggcccgtccggctcgggcaagtcgaccctgctgcgaaccctcaacggtcttgcctcgttcgactccggcagcatcgatgtctgtggcctcgcagtgggtcgcggcgccgatccgcgtcagctgcgacgccacgtgggcatggtgttccagagctacaacctgttcccgcacctgagcgtgctgcagaacatcacgctggcgccgattcgcgtccatggcgaggcaccggcaagcgcccaggcgcgggcccgcgacctgctcgcccaggtcaacctgcacggcaaggagcacgcctatccggcgcaactctccggcggccagcagcagcgcgtggccatcgcccgaagcctggcgatgcgcccacaggtcatgctgttcgacgaggtgacggcggcactggatccggaaaccgtcggcgaggtccaggcgaccatccgttccgtggcggacagcggcatgacctgtctgatcgtcacccacgagatgcgtttcgcccggcagatagccgacacgatctatttcaccgacggcggccggatcgtcgagcagggtccaccggaacacctgctccacagccccagcgatccgcgaacccaacgctttctagagcgggtgctctga

SEQ ID NO: 343911 - DNA, 1224 bp, Pseudomonas aeruginosa
atgtccggacctcagcgccaggactggcggcccgacaccctgctcacccacttgggccgcgatccggccagccacgaaggcacggtaaatacgccggtgtaccgtgcctcgaccttcctctgggaatctcccgaggtgctcgaggattaccggcgtcacggtcaggagccggactatcgcggtcacctctacggccgcaatggcaaccccaccaccgcggcgttcgaggacgcggtcgcggagctggaaggtggctttcgcgggctgatcatgccgtcggggctcgcagccatcgtcggcgcggtactggcggttgcgcgcagcggcgagcacgtgctggtgaccgccaactgttattggcatgcacggcaggtcttcgacaacctgctgccgcgctatggcatttcggtgacctacttcgaccccatgatcggcgaggaaatcgccgggctcatcggctcgaccacccgagccctctatctggaagcacccggctccaataccttcgaggtgcaggacgtgccggggctggcgggcatcgcccacgcccatgggctggccgtgctgctggacaatacctgggccacgccgctgttcttccgacctttcgagcatggcgtggacatttccatccacgccgccaccaagtacctggtggggcattccgacgccatgctcggggtgatagtgaccactcgcgactggttcatgccggtacgcaacctggtgcgcgaaatgggttacatcgccagcgccgacgacgccttcctcggcctgcgcggtctgcgcaccctgggagtgcgtctgcgccagcacgagcgctcggcgctcgccgtggcacgctggctggccactcgtcccgaagtgcagcgggtgcttcacccggcgctgccggggcatcccggccatgagttctggaagcgcgactttcgcggtgcctccggactcttcggcgtcgtgctcgccgcccagccgcaggaccgcgtggatgccttcctggcccgcctgcagctgttcgcccagggcgccagctggggcggctacgagagcctgatccgccagcaatccccgcgcagcagcacagccacggagcacctgttgcgcctccatgtcggcctcgaagacctggacgatctgctggccgacctggaacaggcgctgccccttcttcacccgcatgaagccgcctcgaaccccaacgcaacagacggacaaccggcctga

SEQ ID NO: 343912 - DNA, 1056 bp, Pseudomonas aeruginosa
atgagtcaatcgcccaccatcgaaaccctctacagcctctgccccctcccgatcgcctcgaatgtggcggtcgagttcggctggctcgacgaagaattgcagcgcgtcggcgctcgcccgcggtatctgcgctcgctcccggaaaaccagggctggctgggtcactttcgccatcatcacgacaacctgattcgcgatggcggcgcggtgcctccgttgtgggcccgagcggatcttgccgacaccctgctggtggcgacgactgccagccagcgtcctggccagatcctggtgcgagccgggtctggcctgcgccgagtggcgcagttggccggcagacgcatcggcgtggccgccagtacgaaccctgaacgcatcgacgtggccaacgcagtggccgaacagaccttgcagtacagcctcgaactggctgggatcgagcgcggccaggtggaagtcgtgcgcttcgagcaggatgaccccacgcatcttcgccccgccgaacgcccggccgggctctgggcacagctgcgggagcaccacagcggcgaacaggccgcacgcgcgctcgctgacggtaccgtcgatgctctggtggtgcagccctggcaggcggccgggttgacccgtgagggccgattcacctccattgaagatctcgacctttacccggactggaccttgaagaacatcaacggtccgcacgtcactgtcgtcaaccggcgcttcgcccaggagcacccgcggattgtcgtggcctttctcaaggccgccattcgcgcagggcgctggatcaatgccaatcctcaggcggctgccgagctcttcccacgcttcagtgtgctgggcagcgccgcgctggcgcgccagtggctggcggggcaggacctggtgcctcagctgagcccgcgcaacctcgccgccctggaattgaagaaggacttcctgcgccaacgcggctacctgcagaacgatttcagcgtcagcgaatgggccgacggcaggttcctcgcagaagccgcgcgcgagctcggcgagcatatctcccagccctga

SEQ ID NO: 343913 - DNA, 2313 bp, Pseudomonas aeruginosa
atgaaagctcaggcgattaaacggaagttaccagccccctgctccctgctcaggggtgtgcttctctgcggattacccttggctgcggcgcatgccgaggatggcgatgcccggttggaaaaggtcgaggtggtcggagctcgcgtgaccgaagcgagcctggctactggcgtcgaccacatcaccagtacgcagtccatttcccaccaggccttgctttctgcccccgcggggacatccggcctgaagatgctcgagtcgctggccggcttcaacgtgcaggtgaacgatcccctggggctctacgagttcggcaattcggtgttcgtccgcgcgttcaacttccagcagatcggcttctccatcgacggagtgccgctggggcgcagcgaccagttcggcggcagccccatctatcgctacgtggacaacgaaaacaccgagcgagtgacggcctccaccggcgccggcgacgtgtcccagccaggctacgcatcgctgggcccctacgtcgactatcaaaccctgatgcccgcaaccgaggccggcatcagcacctcctacagcctcggcagcgatgccctgcggcgtagcttcgtgaagctcgatagcggagaacacgagggattgtcggcgtacgtctcgcgctccaagatcgatggcgacctttggcgggggcccgggaccatcgatcgcgagcatgtcgaaaccaaggtccgatatcgctttggcgaaggtcacgagctcagcctgcgcagcatctacaacgacttctatgactacgactcgccctatgtcaccctggcccagtaccagggctcggccgcggaccccttcggccgctccgggcgggactttgcctatatcgactacctgccgcccttgccacagacaactcccggcgtcccctacagcaacagcgcttacaaccagtactacaagcaggcgatcaaccagcgacgcgacaacctgaccaccctgcgcgggagtttcgccctgacgccggacctgcgcagcattaccagcctctactacgagggaaagcgcggatacggggtatcgccggaggcctacgcgacctccgccaaactgcacaacgcggaggccggcagcgtaccggggttgtacgcgccgctcggcgtgcaatatggattgtcgaaaatcagcggccaccgctacgggctttcccaggcgctgcagtggcagcttggcgatcacttcctggaggctggcgcctgggtcgagaaagacgtgttcaaccgcctgcaggcgcgctacaacctcacggacggcagtcccgccgggcagccgctgctggatcaacccgtccatctgcagggcgacttcacctccacccgtgactccctgcagctcgacctgaaggacacctggtcgctgctcgatgatcgccttcgcctgcagtacggcttcaagcgcctggacctggactacgaaatggcaggctatcgcaacgccggcgattacattgccgggcgccagccgcgcctggcgacctcgtggaatgacgatttcctgccacaggcgggactggtctacgacctggatgggcgttcccagctattcgcctcctattcggagaacatggccctgcccaggggcgccgacgatgtctaccgagccgccagcccgaatgtcccggcaccggaagccgagcggtcgaagaactacgaagtcgggtatcgcttcaatcgaccgaccctgaacgcttcgctggcgctctacaggacggagttcgacaatcgcttgcaggccttcgcggctccagttcccggcagcagccaggcggagacctactaccagaacgtcgggcgggccgtggcatacggcagcgagctcagcggccaatggaagccaccgattcccggccaggggctggtcatcaacggcaacgtcacctacaacgtcgcccacttcaaggatgacgccggcggcctgaagctcagcggccactccctccccgacagcccgcgctggcttgctcaggccggcgcgacctacgagttctcgccgtgggcggtgggcaatctcaccgcgcgctacatcgactcgcggtacagcaacttcaccaacaccgagtcgatcggcggctacacgctgtacagcgcctatctcgatttcggcgggaaacagtgggcgggcgggccgttgaagagcgtcaagctgcgtttcaacgtcgacaaccttttcgacaagaactacctcggattcatcctcaccagtcctgacggtccggcgctgttccggccagggccgccccgcagtttccagaccaccctcagcgcggagttctga

SEQ ID NO: 343914 - DNA, 1248 bp, Pseudomonas aeruginosa
atgcagaatttccttcgtctgatcgttgtcgctctgctgctcaacggttccgcgcctggtgcccaggcgcaggaggaggtctcggcgcagacgctcgccttgcaccagcgacttctggtgctggacagccacctggacacccccatccagctctcccgacccggctggaacatcctgcaacgccacagcacgctcggcgacggcagccaggtcgacctgccccgcatgcaggaaggcggactcgatggcggcttctgggcgatctacacccctcagggcgcaaggaccgatgaggggcgcgcccaagcgagtgcctacggcctggcaacgcttacccggattcatgatctggtcgagcggcatcccgctgaattcggactggccaggacctccgcgcaggcccgcgcgattgccgaacagggccagcgcgtggttttcatcagcatggagaacgccgacccgctcagctcggaccccgcgctgctatgcacctactatcggggaggattgcgaatgctcgggctggtgcatttcgccaataacgacctggccgactcggcaaccgccctgcccgaatggcgtggcctcagccccagggggcgagagctggctcagcgggccgcacagcttggcttgctgctggatgtctcgcacgcctctgacgctgtcttcgaccagttgctggagctgtcccccgccccgctgatcgcttcccactccagcagtcgcgcggtcaatcgccatccgcgcaacctcgatgatgaaaggcttcgccgcctggcggccaagggtggagtcgttcaagtaaacacctacagcgactacctcatcccactgaaggcagaaccggagcgcgaacgtgcccgcctgcagttctacgcgcgctatcgcaacatggctgccctgagccctgagcaggttcagcaactttacgccgacatccgcgaggtggatcgcaagtaccagcatccgcgtgcggatttcgaggtgttcatgaagcacctgctgcacatcctccaggtggtcggaccggagcacgtcggcataggcgccgactgggatggtggcggcggtgtcacaggcctcgaggacgtcagtcaattgccaaggattacccagcggcttgtggacgcgggctactcagaacaggatctcgccaacatatggggcggcaatctgcttcgcgtcctcgaccaggcgcaaagggccgcgaatccagcagcagtagaaaattgtgcaggcggttag

SEQ ID NO: 343915 - DNA, 180 bp, Pseudomonas aeruginosa
atggggctgctgaagtttctaggtctgctgtttatgctggtcagcatcttcgccggcagcgcagctgcagtggcactgatggttcttgccgtgcgctgttggccattaatgctaatcatcgtaatgactctcgccgtatttcactttgcgtccaagcgcgcgcgtgcttctcggcgttag

SEQ ID NO: 343916 - DNA, 1110 bp, Pseudomonas aeruginosa
atgaagcttgtacttaatttcgatggttcagcccttaccgcaaacaatctccagcaggcaattacagctgcgggagccaacacaaccatcaatatcgacactgctcatgccgtcaacataaccacgctcctccaggtcatcggcatcgcgggaaatgccaagcacctgagcgccacattcaacggtgctcagttgacctcaaataatctgcagcaagcagtaaatgcatccggaagcaacaccaacatcgccgtcaataccgcacaggcggtaaacatcagcacgctgctttccataatatcgtccgtgggcaccaccaaacatttcagcgcggatttcaatggtgcccaactcaccgcaaataatttgcagcaggcggtaatcgccgcgcaatcaggcacaagcatcagtgtgaacacggctcaagcggcgaatattaccgccctgctcgaggtaataaatgatgcgggcaacagcaaggcatttagtgcaaacttcaacggagcccagctcactggcacaaacttgcagcaagctcttaccgccgccggcacaaatacttcgattggcgtaaataccgcccaagcgatcaacatcacaacttttctacagttactcagcatcgctggcaataccaagaaattcagtgccgatttcaatggcgctcaactgacttcgaacaatctccagcaagccgtcagcgcggcaggaaccaactcgggcatcagcgtcaacaccgcccaagcggcgaatatcacggccctcgttcaggccatacaaaatgcgggcaacaataagaacttcagcgcagacttcaacggcgcgcagttgacagcagataacctgcagcaagcgctgactgcagcggggactaagaccaagatcactgttaacactgctcaagcagtgaacatcaataccatgcttcaacttctctctattgccggggctagcaaactcttcagcgccacattcaacggcgcgcaattaacggcaaacaaccttcaacaagccgtcagcaaagctggggcgaacacgacgatcattgtcgcaagcgctcaaagcgcccccatcgctactctgctggatgtcatcggaactgcgggctaa

SEQ ID NO: 343917 - DNA, 420 bp, Pseudomonas aeruginosa
gtgagcaacgctcttccttctgccacaggcgacgcctcgtacctggccgctggcggcatcgatggtctgcgccacttggtcaacgacttctatcgactgatggatgagttgcctggagcagcccacctgcgccgcatgcacccggaaagcctggaacagtctcgcgacaaactgacctgcttcctcagtggctggctgggtggcccaaggctgtttagcgagaagtacggatccatctccataccgtccttccatgccaagtggccaatcaatgaagcccgcagcgccgcctggttgggctgcatggagcacgccatcgccctacagcctttctcgctgaagttcgccgattacctgctaactcaactgcgcgtgccggcgcaccgagtggtgcaggcaagccaagcgcagcacggctga

SEQ ID NO: 343918 - DNA, 312 bp, Pseudomonas aeruginosa
atgcaccgttcccaggcatatgtgatccggtcaaaaaacgctggtccgttctggctgacctttgacatcttttgccaagacgcagaaacctttcgcacgctgtgtgccgacccgcacctaaccgggcaagccatagccgcgatgatgcatagtgatcctgaacaggtccgcatcttccagatggcgccgctgaacgtgataaaaattagcctgccacggccagtggtccagggctcagtggccgatcgcgacatgcatggtgcgcaatgggggtatgtcctggccgaagagcttgcccgcgcaggcgtctga

SEQ ID NO: 343919 - DNA, 1368 bp, Pseudomonas aeruginosa
atgacaaaaagcatcaaagttctcgtccccaccggctgccttggcaccggagttcgagtggatctattcgaacaagccctgctggaaaagccagatgtgatcgcaatggacggcggctccaccgactccggtccgcactatttgggcaccggcaagaccaaatcctcggccgccgtgctcaaagccgaactgttggtgtacatgcgcgcccgtgccgagcttcgcgtgccgctgattatcggcagtagcggcacctgtggctccgacgccggcgtagacctgctgcgtgacgtctgcctcgaagtcgctaccgagctcggtcagaatgtgaaagtagcggccatctacagcgagcaagacgctctcacagtgacgcaagcattggaggatggccgcattctgccgctgaatccggcgcgccctgtcgatcaggcactcatcgagcgttgctcgcgtattgtggcggcgatgggggttgagcccttcatccatgcactggaggaaggtgcggacataatcattgccggtcgcgccaccgacaccgccgtgcttgcgtgtctacccatcatgcgtggcgccccagccgggccggcttggcatgctggcaaaaccctggagtgcggttccttgtgtactaccacaccaatggacgccatggtcatggcggaaattgatgatcaagggttcaccatcaccgccattggcagcaaggcaagcctcaccccacagtcagtgatggcgcatatgctctacgagaacagcaaccctaatgtgttggttgagccaggcggtgcgttgaacgtcgaggcggccacctacaccgccatcaccgacagatctgttcgcgttgaaggctccgtttgggagcctaacgaacgatacacagtgaagctggaaggagctgcacccgccggctatcagtctgttctactgagtgtgctgcgcggacctaagtacatctcgcgtttcgatgagtggttggcactactggatgaggccatgcgaaagcggatcgaaaaaaacctaaacatcggcccagcggactacaacctacagttccgtgccatcggcaagaatgccgcgttgggtgaattggagaatcatgcgggtaccccggtagagatcggagttatgggcattgtcaccagcccagaagagtcccgcacgcaggacatcctcgctttgctcaatccctacatgctgcatttccctttgcctgaagataaagacctgccgacccacgcctttccgttgtctccagcctcaatggatcgcggcctgatctatgagttcgtgcttaatcacgtaatggttgtgccagatgcgctgaagccatttcgtttcgatttcaccattgcaggagcctga

SEQ ID NO: 343920 - DNA, 1284 bp, Pseudomonas aeruginosa
atggcttgggttggtttcacaatggtctccgtgttcatgctgctgatcctcactcgacgactctcagccatcgttgcgctggtcctggtgccagtgatcttcggcctgctacttgggctcggagggcagatggggggaatgatcatggacggactgctcaaggtagcccccacagccatgatgctgatgttcgccattctctattttgcggtgatgttcgacgccggcctgtttgagccagcggtaaagcggatcgtacgctgggtcggcgatgacccgctgcgcattactttgggcacggcagcactggcatcgatcatctcgctggatggtgacggctcaaccaccgtgcttgtcgtggtcaccgccctcctgcctgtgtacctacgcctggggatgaatccgttgatcttggcggtgatgttgctgctgaccaatacggtgatcaacatcgtgccttgggggggaccgacgccgcgcgcagccagcgcgctgcacctggacgtgctggaggtattcctcggcctaatcccaaccatgctagccggcctggtatacgccttcgccgccgcctggtggcttggcaagcgcgagcgtaagcgtctcggctgggttcccaagcaagtacggaccgcaactccagtacaggatcgagcggttctcgccactcatcggcccaagctgttctgggccaacctagtgctgaccgttgccctggttgcttccatggttaccagcctcgggcctttaccggtgctgatgctggtggcgctagccttggcactagtgatcaattatccacgcctggcagatcagaaagcgcgcatcgccgctcactccgaaagtgtgctcaacgtgctggctctgattttcgctgctggagccttcaccgggattctcactggctcgggcatggttgagggaatgtctcaagcactgttgaacgtggtgcctgaaagtgccggtccctatatgagccttatcaccgcactggcggcgatgccttttactttcgtgatgtctaacgatgccttcttcttcggcattctgcccatccttggcggagccgctgcggagtacggggtggaccctatgcacattgcccgtgccgcgctgctggggcagccggtacacgctatgagcccattagtagctgccccctacctactggcgagcctgattcagcgcgacttcgctgagcttcagcgctgttgtctcggctgggctctggggagttcggcggtgctgatcctggcagcactgctcacgggcgcgatcatctag

SEQ ID NO: 343921 - DNA, 1188 bp, Pseudomonas aeruginosa
atggccaatcaagatgagctctatctctccgccgaggaggccgcgaagctactcggcgttaacctgccgacgctgtacgcctatgtgggtcgaaagaacattcgctcggtgaagatcgagggctcgcgcaagcgccggtattgggctgcggatatccagcgtctcgtcaaaggtggacgcaacggcgacaaaacgccgggcaagcgcggcgcagactcgcagagctccctaaccctgctcactgaggacggtttgttttaccgcgggcgaaatatcgacgagttggtggaaacggccacagtggaagaggttgcagaaatgttctggcaggtgccaggcgtcttcggcagttcattaccgcgcatgccagcaggtgtcgaacaattgctggagctctacgcccatacctcggtgatggagaaagccattgccttgtttcccctggtggagcgggaaaatcccaaagcatttgatctgtcgccggaaggctatgcacgcaccggtgccgacgtagtgcgcttgttcgctgcgctggtggtgggggcggccgcaccggatgcacgcccactacacgaattcatcgcatcggctcgcggcgccgaccagggcttcgccgacctgatcagacgcttgctgatcctgagcatcgaccacgaacttgttcactccacctacagcgtgcgggcagcagcaaaaaccggggtcacgccctactacgccaccatcgtcggccttgcagcgtcgcgtggtaggcgcatcgcttacggtcgcaatgaactggtcagccatttgctgagtgaggtgtgcaaggccaaggaccctgctgcgccgatacttcagtactacagccagggaggcgacataccgggtttcaataccaatgtgcatggcgtcgtcgatccgcgcgccataagcctcaagagcacgctggatgtgatgttcgctgacgatccggattacctgcgactgctcaaggccatgcaagtggcagaagaactggtgcagcggccagcagaatttattctgctagtcagcttcgttggtcgcaaactcaacctggagggtcaggagctggcactagcagccgttggccgcctgatcggctggatcgctcatgccagcgagcaatacaaccatcaaccggtaattcgccaccacgcccgctataccggcccccttcccgactga

SEQ ID NO: 343922 - DNA, 1779 bp, Pseudomonas aeruginosa
gtgaaacgaaccattaagcggcccggcatgcctggcgcagccgctctagcactggcgacggtgggctacatgactggcgcccaagcagtcagcttcaacatcggcgaagtagaaggacagttcgactcttcactgtccatcggagcgagttgggcggttcgctcgcccgacccagacttcattggcgttgccaatggtggacaaggcgagtcacgcaccactgacgatggacgcttgaacttcaagaagggcgagaccttctcgaagatcttcaagggcatccacgatctcgaactgaagtaccgcgacaccggtgtattcctgcgcggcaagtactggtacgacttcgagctgaaagacgaacaccgcctgctgtacgacattcgcgatgacaatcgcaaacgaggcgcgcaatcgtcaggcgcggagttgcttgatgccttcgtctatcacaactacgaccttggcgagcgccctggttctgtccgcgttggcaagcaggtggtcagctggggtggcagcgccttcatcggcggcggcatcaacagcatcaacccactcgatgctaatgccctgcggcgcccgggctcggagctaaaggagggcctactgccggtcaacatgatctatctgcagcaggctttggtcgatgatgtcagcgtggaggccttctaccagttggagtgggaccagacagtccccgacaactgcggcactttctttgccgggtcggacatcgtggctgatggttgcatcgatcgctacgtggtgcgcggcgccgacatcgagccgggtcagtccgacaacagcggcatcaacggtaacaccctctacttgccccgcggcggcgatagggatgcccgcgacagtggccaattcggcatcgccctgcgctggttcgtccccgagctgaacgacaccgagatcagtgcgtactatctcaattaccacagtcgtaccccggtgggcagttcggtcatcagcagcgcgcccaaccctttcgcagctcctggatttggcgccgccgatgcccagtatttcctcgagttcccggaagacattcgactgtacggactcagcttcaacaccacggtgggcactgcctcggtggaaggtgaactgagctatcggcctaatatgccgttggcctttgacgacctgacctacgcaaccttacgcctcgcgccgatagtcccgacgccaatcaagaactcgggcatacccggcgacgtgattcatggctacgaccgagtccccatgacccaggcgcaaatgagtgtcgtgcaaaccttcgaccaagtgctgggcgcaagccgcctgagcctcatcggtgaagtgggcttcaaccacctcaatggcatcaatgaaggggacttcggcgagttgcgcttcggtcgttcgagcgcctttggaactggcgagtatttcggtgcggacggaactgacctgtgcagaaccctgctcagtggccaaccgcaaaactgcaacgatgacggcttcttcacccgcaattcctggggttatcgcctgcgcgccggcctgacctacaacggcgtgatcggagggctcgacctcagccccagcctcgcctggtcgcacgacgtggacggctacggccccaacttcaacgagggcagcaaagccgtgagcatcggcctcagcgccaagtacctgtccaactacgaagccagcatcagttacaccgacttctttggcggcgattacaccaccaacggtgatcgggacttcatcagcgccagctttggcgtgacgttttga

SEQ ID NO: 343923 - DNA, 1359 bp, Pseudomonas aeruginosa
atgaaaaaacaatacctctcgcgctttgcgctctcgctctgcctgccattgctgatcaacccggcgttcgctgccgttgattccgcaaaagccagcgaactcgacaacaagctcacgccggttggagcagaacgcgccggtaacgccgccggcacaattcccgagtggacaggtggtctgccgcgtgacgcaggcaaagtcatcgacggtttccgggaagacccctttgctggcgaagcacctctgttcaccatcacctctcaaaacatcgatcaataccgagataagctgagtcccggtcaaatagcgatgtttactcggtacccctcgacctacaaaatcccggtttatccctctcaccgaagtgtggcctggcctcagaaagcctatgaagctgcgcaccggaacgccgaggccacccggacagtgcaaggcggcaacggcctggagaactacacgagtccgctagccttccccatcccgcagaatggtcttgaggtcatctggaaccacatcacccgttacaagggtggcagctttatccgtgaggcatcgacctacatgaccactccgggaggcgagtactcttggaaaaccgagcgtgaccgtctggcatatcccagtgagctactggactacagccccgaaacatcacaaaacatcctcttctatttcatttctcagaacgtcgcccctgcacgcgaagcaggtgggataacgctggttcatgaaactctggatcaggtcaaacagccacgcatggcgtggcagtacaacgccgggcaacgccgagttcggcgtgcaccgcaagttgcctacgacagccctggcccgggcaacatgcgcacgacggaccaggccgacatgttcagtggctctccggatcgctacgactggcagttgattggcaagcgcgaaatgtacgtgccctacaacagctatcgcctggctagccccgacatcaagcccgaagaactgattacccccgaccacctaaaccaggacaagacccgctatgaactccaccgggtctgggaaatcatcgccacgttgaagtctgggcaacgtcacatctactccaagcgccacctgtttattgacgaggacagctggactatcgtcgaggccgatcattacgactcccgagggaacctgtggcgagtttcggagaatcacattattccgctgtacgacgtacaggcgccgatctctgccggagagatgacctatgacctcctttccgggcgctatgtggcgaactacatgctcaaccagataaagaacccgttccagtttggcttcaagttcaaaacgaacgacttcgccccttcaaccctgcgcactatgggcattcgctga

SEQ ID NO: 343924 - DNA, 687 bp, Pseudomonas aeruginosa
atgaccactctgacgttcgctcaacctgtgttactggcagatcatttcgacgtacccgcagatacgactccttggctggcggctggtactagtgctgcctatgtaaagacgaatccggggatgacgccggcacgctatcgtgcctccttcaaaaccctgtcacatgccatggtccctgtgtctgcgtatggaaagaacctgtcgaagacctatgggttgtacgtgctggctttcggaggtgcgaaggatttgacgccctggatctatgtgggtaccacagtgcgtgaaagcgttctggcgcgcattcgcaagcatcgggtgaaagccactgggtctcatattggtagaggcgcgaatgtctcgggaggagtcaatcacactgcggggtggaggccgttcgcggagcggcgctatatcgagcacgctggcagacatgacctgtacacagacgttaggctcgttgtggggcagcttaatttgccgaacgtggacgatacgaagttgcgccagttcgaggctagtctttgcagcaatcaacatggcgtgctggatcagatcaaatccatgctgtggtcggttggggtagctaaggatgtttctctgctgacaggccggcatgacaaggcgcttgccaacagtggtatgcgtatcctgttctgggatggccagatgagcgtttttccctaa

SEQ ID NO: 343925 - DNA, 510 bp, Pseudomonas aeruginosa
gtgaaagcggtcttcaccgtgagccccagcagcccgaaccaggagcaactctttggtgctgtgcaccaggactgtctactgatcatcggcggcgccgctgagttcctcgacggcatgaaggatgtgaaggccgatccggaccagaacccgctggacctgaatggcggcgaccacgaaatggaggtcgacggcgcctggggcggcgagcagcagcccgacgatgatgtcgtggatgccgagttccaagagctgccgcaactcaccgtcgagcgcttcgccggccacaccctgggcgagatcgccatcggcgtcgccaccaagaaggacgtgttcgacgcggcctggctgcaatcgcgcttcgctctcaccaccgaggaagccgagcgcgtcgttctccaactgctggaccagggcgtcatcgtgctcgagcaggagaacgaggaatcccgcgagttgaacacttaccgcgtcgtcaagaagccggtggatatcgccctcgacctggagtga

SEQ ID NO: 343926 - DNA, 2064 bp, Pseudomonas aeruginosa
atgacttccctcaagaagccctccccgctcgacttcaaaacccagtacggcctggccctggacgacaccgatgacgcgatcgtcgcagactacttttgcggcggaggtggcgccggtacgggcttggaaatgggcctgggccgcccggtgaacgcggcaaaaaaccacagttctgccgcaattgccatgcacaccgccaatcacccccatgctcggcacttcatgacggacgtcttcgacggtgaccctgacgacgagtgccagggacgcccggtcggctggttccatatgagccccgactgtacccatcacagccaagcagccggcggccaacctcgcaaacgcgagattcgaaacctctcgtgggttgggctgaagtgggccggaaagaaaaaaccttgggtcatcagcctggagaacgtgaagcagatcctccagtggggccccctgatcgcgaaaagggacaggtccaccggtcgagtggtcaagctcgatggcagtgtggcggcaccaggcgaacacgttccagtccagcaacagttcctgattcccgaccccaaacgccgcggccaaacctggcgccggttcgttcacctgctggaggggatgggctaccaggtggaatggcgcgtcatcaaggcatgcgacttcggggcaccaaccagccgcgagcgcttattcatgatagctcggtccgatggccatcctatcgtctggcctgagccgacccacgccaagcacccgaaaaaagggcagcagaagtggaagaccgcagccgactgcatcgactggtcttaccccagcaagagtatcttcggccgcaagaaggccctggccgacgccacgctgcgccgggtggctaagggcgtgaagaagtttgtactcgacaacccacggccgttcatagtgccaatcgcgaactggtcgggcgaactggcccagtcggcccacgaaccgctccgtaccatcacctcctggcctcgcgggggcagtttcgccgtggccagcccaacactggtgcagaccggctacggtgagcgcgaagggcagcaaccgcgagcgccaggcctcgatcagccgcttggcaccgtcgtcgcaggcggcgtgaagcacgctctgtctagcgcggtgcttctcccggcaacgcatcaaggcgcagaccgagtcaacgatcccgctgagccgctgcccactgtgaccgcggcaaaccgcggcgaactgatgatagcgagccctttgatggtgggcgtcggtggccgcgccgggcagactgaaccgcgaccgggcgacgagccgatgtacaccatcacagcgaaggcagacaccgccattgcatcggcacacctggtcaagttccggttcaacagtgacggggcggacatcaccgagccaatgcctacgatcaccagcggaggcaacttcaaacgtccagcaggcgccgcacatgccttgggggtctgcactgccttcatcgaacaggccaactccggtttcaacaccaccttcggccggagcatggacgatccgatgagcacggtaaccaactcgggcagccagcagcgccttgtaacggccagccttgccacgttgcggcggaactgtgtaggtcgccccctcgacgagccgattccgactcttaccgccggcgccgagcatcacgccctcatcgagtacaagctgtcgcccgaacacgaggctggcgctctgcgcgtcgctgcgttcctgatgcgctatcacagcaccggcggtcaatgggcagaactggatcaccccgtgacggccgttaccaccaaggaccgcctggctctcgtgaccgtgttcgtaaaaggcaccccctacgtgatagtcgacatctgcttgcggatgctgcaaccgcccgaactgtaccgagcccagggatttccggccgactacatcatcgaccgcggcgctgacggcaagccgttcagcaaaaccgaacaggtgcatatgtgcggtaacagcgtcagcccgccgccgatggcagcgatcgcgcgagccaacgatccatggagggcgcggcagcgtcaggcggtggcggcgtga

SEQ ID NO: 343927 - DNA, 456 bp, Pseudomonas aeruginosa
gtgggcggtacgcccgtacggctgttctgcctgccgtattccggcgccagcgccatgacctacagccgctggcggcgcaagctgccggcctggctggcggtgcgtccggtggagttgccggggcgcggggcgcggatggccgagccgttgcagaccgacctggcgagcctggcgcagcaactggcgcgcgagctgcacgacgaggtccgccagggcccctacgcgatgctcgggcacagcctcggcgccttgctcgcctgcgaggtgctgtatgccttgcgcgagctgggttgcccgacgccgctggggttcttcgcctgcggcaccgcggcgccgtcgcgacgcgccgagtatgaccgcggtttcgccgaaccgaagagcgacgccgagctgatcgccgacctgcgcgacctgcaaggtacgccggaagaggtgctgggcaaccgcgagccctga

SEQ ID NO: 343928 - DNA, 1320 bp, Pseudomonas aeruginosa
atggctagcctccactcgctgcgccccgtcgcgcttgccctcggcctggtcctggccggctgcaaccaggggtcgcagaacgatccgcagcagcagaccggcgccaatccggcgcttccggaaccgaagcacttccttctgccgccgatgaaggtaccggaaggcgtgggctggtcgggagaggccaagccgacggtggcccagggcctgaagatcgagaagatcgccgatggcctgcaacaccctcgccagttgctggtcttgcccaacggcgatgtgctggtggtggaggccaactcgcccggcaccgcgccggtgaccacgccgaagcaactcatcgcggggatggtcaaggggaagtccggcaaggccggcaagggcggcaaccgcatcaccctgctgcgccgagccggcgctggaggccagtggcagaagtacgtgttcctggaagggctggactcgccgttcggcgtgcagcgggtgggggattacctgtatgtcgccaataccgggaacatcatgcgctaccgctacgtgccgggtgaaacccgggtcgccgacccggggatggagttcaccgacctgccggacaccatcaaccaccactggaccaaggcgctgctcgccagtcccgacgggcgcaagctctacgtgggcgtcggttcgaacagcaacatcaccgagaacggcgcggcgatcgaataccgtcgtgcggcgattctcgaggtggacgtcgccagccgcggcagccgcatctacgcctccggcctgcgcaacccgaccggcctgcagtgggaaccggtctccggcaagctgtggaccatcgtcaacgagcgcgacgagatcggcaacgacctggtcccggattacctgacctcggtacgggagggcggcttctacggctggccctacagctacttcggccagcacctggattcgcgggtgaagccgcagcgtcccgacctggtggcgaaggccatcgtccccgactacgcgctgggttcccacgtggctgcgctgggcctgttcttctacaccggcgacgagttgcccgagcgctatcgcaacggcgccttcgtcagcgagcacggcagttggaaccgctcgccggtcagcggcttccaggtggtccatgtgccgttcgccgacggcaagcccgccggtgcgccgcagccggtggtgaccgggttcgtctccgcggacgagaagcagttgttcggcgcgccggtggggttggcgcaggcggccgacggggcgttgctgatcgccgacgacgtcggcaacgcgatctggcgggtgagcgccgcgggcaccgactag

SEQ ID NO: 343929 - DNA, 1782 bp, Pseudomonas aeruginosa
atggccgtgtctgccgtcatcacccagcgcctggttgacctcgaccggcagctacagagcgccggtcaggggcagcgcacggcgctatgcaaagcagccgcggcagagctgggtctgtcgctggcatcgctgtaccgcaagctgaaggatgtacaggtgcgtgagcgcgcaccgcgtaagcggcgcaaggactcggggcagagccgcctggggcgtgacgaggcactggtgatcagcacggcgctgatccactcggcccgacataacgcgaagcgcctgtattccgttgctgatgcggtcgaggatcttcgcgccagcggcttgatccgtgcggagtctgtcgaccgacgcaccggagagatccgcccgatgtcgatcagcgcgatcagccgcgcgctgcacagctaccgcctgcatccgtcccagctattggcgccggagccggtcacagaactgcgcagcctgcatccgaaccacgtttggcagatcgatgcgtccctctgcgtcctctactacctgaagcctggggcgaacaagaaggctagcggcctgcaggtgatggatcgcaaggagttttacaagaacaagccagcgaacctggatcgcgtggccgctgaccgtgtgtggtcctacgagatcaccgatcactacaccggctggatctacgtccgttatgtgatgggcgccgagagtggcgagaacttctgcacggtgctgatcgaggccatgcaagagcgtggtggagccgacatgctccacggcgtgccacgcatcctgatgatggaccctggctcggccaacatctcggcgatgtcgaagaatctgtgctgctccctgggcatcgaggtcatcgtgcacgcgccaggcgcggcgcgggttacgggctcggtcgagaacgcccggaacatcatcgagcgcaagttcgagtcgaagctgaagttcgagccagtcaacgacctggacgaactcaacgcccaggcgaagaagtggcgcgcccacttcaatgcgacggcggtacacagccggcataggcgcaccaggtcagaactctggatgaccatccgggctgaccaactgatcaaggcgcccacggttgagctgtgccgggaacttgcagtgaggtcaccagagtctcggaaggtcacggccaaacttcgtgtctccttcggtgggtgcgagtacgacatttcggtagtcccggacgtgaacgtgaacgaccgcgtgcttatcacccgcaacccctggcgcgaagatgcagtgcaactggtcacggtcaacgagctgggccgtcaggtcttctacgtccttcccaaggtcgagaaggatgagggcggctacgcgaccacttcaccggtgatcgggcagacgttcagccgtcaggctgagactccggcgcagaaggcccgcaaagctgttgaccaactggcctatggcgtcgaaagcgaaacggaagtgcaggctgcgcgcaaggccaaggccgttccgttcggcggtgccttgaagcccttccaacatatcgacgacacccaactgcccaccttcatgcctcgacgcggcacggaacacagcttggtagcccccatcgtggaggttccgctccttccgcatgtcgaggcggccaaacgtctacgcgcgcagttgggtgaagcctggaccacggactcgatggcctggctcaagaagacccaccccgaaggcgtgccggaagaccagctcgacgccatcgccaaccagttgcgcaagccggcccggcctggcctgcgcgtcgtaggaggcaactga

SEQ ID NO: 343930 - DNA, 990 bp, Pseudomonas aeruginosa
atggctaagctaacagttgaaaagattctgcttagctacgatgtccccttgatcgcgctcgccagagcgaacaacggagataaatatttaggcgttaactacgacgacggcgaaacagcattcaaattttatttctccaggataaaaactgaacaccttaagcaactgtatgctgaaaaaattgatgttcactatgccgtgaccaagctacataaaggaaagtatcagcttggagaagtttggggtactgtcggagaagaattcaaaacgaaaagcgcagaagagctacccgccgatgctctaccagagccgggaatgtttattcctggccatgctgaagaaagcttaaacagcgatttcaaagtagtagatatagatggtcgctgggaaatcagcgacttgagacgcttttccgacttggtacaggattgctattcgttcggctttgctcttctcggcgcaactggccaagcggccacaaaaaaaataaatgcactttttcacaagcatccgtggagaggtggctttagctctgtaaacttcttcaaagaactgtatagaaacatcccaaaccaagatagggctgcgatacgtaaaatcgattacgcgtcaccaggggaaataagattttatatgaacggagatgtcgcagactctatccgcgaactagtgaacgagatcaatgacaaagatagcccggctcgcgaggcttacaaaaaagcatatggtcaccttcagaacctaggctggcttagcaagtcagatacagatatcaagctatcggaccaagatatcattgatcttgttgaattactggacgatacgtgtgaggcgttcggattagacgactgcgctgcgcatattctggagctggcgagcatggatccactgtcagccataaaaattgttctggcatactacagacgacttcaaggtttagcggactacgtggcgacaggaaaggcccaagacattttccacgatgcataa

SEQ ID NO: 343931 - DNA, 330 bp, Pseudomonas aeruginosa
atgaagctgcaggcgtggcgaaagactgcaggtgcagcgatttccggcaggtgcagccgaaaggtgcaggtggtgcaggtgctggggttggtgttcgcgctggcggggtgcgccgcccggcaggaagccgagccgcgcacggtgcgcgtagatgtgccggtggcggtgccttgccgagtgccgccggtggaggtgccggcctgggcaaccgctgggctgaagaagagcgacgatatccagaccaaggtccgtgcgttgctcgccgaacgcttgcagcggatcggttacgaggcgcagctcttggctgcgaaccgggcctgtcagaattag

SEQ ID NO: 343932 - DNA, 1131 bp, Pseudomonas aeruginosa
gtgcgcctccagtacgtcctggggtgtggcgaccagcgtcaggcacatcaccgtatcctcgggcatctggtcgaacagcgcgttcatggcatcgccgcctttgcgcgtctcaccggtcagatggccggtcgccggcggcgtgcgcagacgatccatcacgatcacccgatgcggcatgccatcgaagaaccacaggccgttgggcacgtccgaacgtggctggccgaagaacaggcgctgcgcgaagtcggtgccgctggcgagttcgatctcgccctcctcccgctcttccgggtagcgggtcagcgcgtagaagcgttcccgatcttcggcagtggcgccgagcaaagtcggattcgggttgaaccagcgcagcagccaggcgtggatgtccgccgcgccgagacgccgggctttcacgccggcattcgccagcccgccgacgaggcggtcgcagatcgtcgtcagcgcctgctcgggcgactggccgcgccgcgaggccggggccgcggacgtgctgcggtagacgaccatgcgcacgcgccggacctggccgcgccaaggcaggcgcgtcacggcagtatcctcgaacaggccacccggcttggcgatggcccgcaggtgatgggcgaagaaacgcaggtagaagtcgctgaatgcgctgccttgcgcacgcggctgcagatagttcgccagggagcgcagatagttgtcccagttggcctcgtcctgggcgtagagctgcaccacccaggggttgtcgtccaactcgtcgaaggagtcctgcagggcgttctccagcgcatcgcgcgcctgccacagccaggccatctcgcggccctcggtgccgaccggcgccagctcgaagaaggccgccaccgactggccatcttccagcaacatgcacttgctgccgggcaggtactcgacccagggcagcaagtccgcgaacgacggcgcgacgccatagagcgcatcgtggtcggcctgggtggccggcctgcgccggccccggccgagcgcgctgcccggctcggcgacaccctgtgccaccaaggccgccacgtgccgtgcccaggcatcatcggtcgcatccacggcgtcagcaggcgatgcgtcgggcttgcgtga

SEQ ID NO: 343933 - DNA, 243 bp, Pseudomonas aeruginosa
atggtcagcgccatcagcatgaccagcgcgccgaccgccatcagcgccagcaggccgcggtcgacccacacgctgtggtcgcgggtatgcaggaagctgcgcgcgaactggcagccgaacagcgccgccgaaccgatcaggaatggcgtggcggcgttcgcccaccaggggctgtcgggccagaagtactcgatgccggcgccgttcaccgagacctggtacagcccgaacgaagcgatatag

SEQ ID NO: 343934 - DNA, 2166 bp, Pseudomonas aeruginosa
atgactgataaatttgatgaggcgcgggacgcagttaggcgacttgactggaaagcgtttagaaggtggttagatgctaatccaacagcctctgaaaagttttcagagactctgcagattatctggcaatcggactccatggtgagacgaagatctggtgatgacggcatcaagagagaccgttttcttgagaagctcagtgactatttcacagaccgcggagtctcgacagccgccgactcaatatcggagatgcgtactgaacttttgaaaattgaccgcggctatgtagaaatccactcagttgtacctaaattggactcagctaagttcaccccagagcagcggatatcagctgcctttgctgctctagacattgtgcttcgccaagtgctggatgattttgatcgaaaaatagacgccacgaatggagtattggatgtcggtcgcaacctaaaggctctgaaccatgaggtatacgacccaaactcaattactcatggccttacattagccgccggtgatgtcgttatgctggaggcataccagcagggatggttcgacacagcaggttgtattgcgctccctaatttagagcccgctgaggatggctccgctgatgcagtaatggcgaatctgtggaacgctaatacgtggcgaacctggaagaacatagatgaaagagtaagatttcttgatggaagtcttactcaaatctctgaagatctagacaactggaaggctaaagttttggcagaaggtggcccaaagatcgaaagtgatcttgatgtcgctttcgagttccaacccgataagaaccatgagacgtttgaggttttggctaacgagagattcgacactttttcagaacaaaacctattcaagctttaccgagtagcaagtcccgataagctggtcgaccaatccggcgattttgtggagttacctccaaccggctatgtatccactgacgagatacataccacacttatgtttagccaattcactaagctagacatctcaaaagcaaactcagacacgctctcaattcctgaaattcttcgggggtatgcagtcctaaagaaccatatagtgcttttggaacgtgaacaacatacatatttccccctaaccacttatgacaacttacatgcagaactgatgcgctgcggtttgactgcacatgcagccgactcattcattgggcgcgcaacgttccaacgatccagccgtgacttatatgatcagccgttagtgaaaacaacgaacaacagattctacatattcggagcctcgttgttacttgctgatctcacaaaaattctattctcaagcttggcaaattttggcactagctttgaagaaaagggggaaatgtatgagcaagcaaccatcgaaatgcttcgcggacatggtttcaatgctcgaaaccttaaggtcagcagaggaaacaagaaagagcatgagttcgattatgatgttgcttttacctgggaagactacgtatttttcctagagtgtaagaacagaggattgccaatgagcaaccctattgcaacctatcacttcaacaattcaatatctggacacatagcacaagtaaagcgactgcaacaagggctcatagattatccggacattctagaaaaggactttcctgaagccgtgggcaaaaaggcgatattttgcttagtaaatgccatgccatttgcaactggagagatccatggcatttacatggtagatgattcgatcctatcaagattcttcagctcaccaacttttggagtgaccgctggtcagcttgatggaaaaggcccccagaagcgcactgatctgatgaggatttggactgggtcaaaacccacgccacaggactttatctcctatcttgcgaggccaccacagcttgttctagcaaaggaaaactatgaactcgcaccaagcatttgccctttatcgttaagtgcctgcgtgaaaatttctgattatcgacgtaaagacttaaactcacatgagatttctaaactttttaagtctgggctgtcagctccaaaacgcaagcagccccaagcaggtgttaaaaaaaataaaactagcgataaatccaaaagaaagaaggctattaaggcatccaggaaagcccgggccaataataaaggttaa

SEQ ID NO: 343935 - DNA, 4578 bp, Pseudomonas aeruginosa
atgagtattgcaggcatacgctcgaaccgcggcgatggctaccaaaccttggtggcatttgattgggcattggtagttctatctgacaaaaattatcaatggcttgaagttgattctatagcgcacctagtcgacgatgtggttattgggaaaaccgatggcacgctgatcgcttgtcaatgcaagaaaaatcaaatcgatttccagtcatggtcgatagctgatctcgagggtgaattaaaaaaagccgccagactacttaagcagaatacaagcactgaagtttacttctattcacgcaacaattttggaaagcttggcaagctgaaagaacacagcacgacgcagcacgatgcgagtacctataaatccagtttaagcaaagaaaatcagacaacaaatactaccctatcgaaattgctcgaaactaccgccccaggcctttcaacttacgaattcctttgccgcaccgagtttgaaaccagcggcactttggatcgcatgcaaagtcaactacgagaacgtttgcgtagcatagctagcaacccagatgcggcattcaacgccctctgggttcatctagatcaattgggggcacgcatgagcggcgatggctcatccgcaaacgctcagcatcgatttaccaaaaatgatctcgaagctattcttcacaaggcaggagcgctgttggttcctcccgtgaatattgcggaggtacgcgcatcattttccaatacttcagccatcggcagatcatggcggcgtgatgtggcaggtcagcggatgcctaacccggtggtgaacgaactgctggccgccatcaatgccaggaaacgggccatattactcactggtttgcctggttcgggaaaaacctgtgtgatgcttgaagtacaggaaaccttggagagacacgcccaattccgttcagatgttgtgccgctcttcatccagtcgcgcgaatttgctgatctggcaacttcgcaggatcgacaagcttttgggctgcctgagcagtgggtaaaccaagcggcacgtatggcggaaagcgcgcaggtggttgtaataatcgactctctggatgtgctatctatcgcccgagatcatcgcgtactcacctattttctggctcaaatagaccgcctcctattaattccaaatgtgagtgtaattaccgcttgccgcgactttgacaggcagtacgaccgtcgaattgcggaaaggaagtgggattgcgaattcaagtgcccgcccttggactgggacggcgacattgtacctttaattgaaaggctggggattgcatccaccaatattgatgccgttacacgagagctaattcgaaacccccgggaactggtattgtttgtcgagttagcacaacgagagggtggtttcagtgtcgtaaccagccaagctttggcacagcgttatctcgatgtaattgtgcgagccaatgcctcacttggtgactctgcaatacaagcaattgaggtcatcggcacagaaatgctcgaatcacgcagcctggtcgtacctcatcagcgcttttcttcctcgcaggaaatgctacgggcactatatagccttaacgtcttgcaagagacacaagatggcaagctgaccttcggtcatcagaccctgcttgacgttttagtcatcagtggcgccttgcgtagcggcgttacgctgaatcaattcatacaaagtttgcccccagttccgtttgttcgcccaagcatccgtagcttcgtcgcacagttagctctgggtgagcgacgtgaattcagaaaacaaacacggacggtgttgactggcaacgcagctttccatatccgacgtttggttgccgagtctttttccgaacaagtacctttcgatgatgattggcccttgctgcgtgaattgcgggaaaaacaccgtgatgtttttcaggcaatctatgcatcagccaaagcaattgagtggcatcatttttggcttaaatatctagtacccgttttgaaggcggagcgggatgccgaaggtttcgccgggcatacctatcacatcgcgcgatggaagaatgaagatacacaaggtatcttatcattctggcacgaggcaatttccctggactggattgatagcaatcgaatcaccggacagcttccgttttacctatctgaaattacattagagaacttggcactggttgtgccattgctccagcggctgctcaatactccgagtcccaatcacagcttcctggggcgctccatcgctcgctgcgtagaagcgggggtcgtaggagacgacctgctttggcgccatatgataaatggcgttagcgaaagtgaccttctggaatatcggttcgaaaaaaaattacattgccatgcacatgagtttggcgaccgtgatgaaaattttgtccgccaacgtatggagaaatccattgccttactagatctagctgtggcgtcgattgaggaatggagcgatatacgtaaatctcaccacggagaaacgcgcataggttaccgatatggttttctgagtaaaacctcgtacgaaaagacgcacagccagcaagatatgcaccacgtagacagcatgaatattctacttgatgcaatagaatcttcaattttccaccatgcaaaagcgcattcaaactggtggcaagaaaaccgagagcggttgtgcttcaatcacgagggagccttgctctactttgccgtgcaggcttgcactgcgacacccgaagccaatattgatctgataggccgtatgctatgcgataagaacatgctcgaatttgagcttgattacgaattaggcactttaatccagtcgacattcaagcttcttgacgagacaacacaagacgctgtaatgacaaccatattaaccacttgggataaacactcctctaaggactccgagaatttttgggcatttaaaaaacgtgccgacttaataatcgcaatcccttgccacctgcgttcgcctgaggcgcaattgttaattgatgaatatgagaagaaggctggcgtattttatcgccagccgtatattcgctcacggggtggttacgtcagttccccattctcattcgaagtattcctgcaggccagtgatagcggagttttgcgtctgctagtacactacaacggttatgcagactggcacgggactgattttctggtcggcggcgaacgcgaagttggtaggcaacttcaagaggcctcatctcgccaacccactcgatttttagggttcttgtcaagctactggacggatattcccgcaaagtttcgcgatgacattatggatggcgtcgccacatacttggcttatcgctatggaaacctgcaagctaaccaaaattggttaccgatcgaagaaccagaggcccctgccttggctagtcatcttctcgatgaactggaaaggcatcggtatcactggcagctccgacgtccagcagctaaagcattggaagcctgcgccaatgtcgtcaaaaacctgaaagatgccgaacggctggtatttttgaccatagcctttgagaggctcgaggaagctgatccaattaagggtgataacgttagtttgatctctcagggaatcaacatgataaaaggagacgtgactgaggctttgatgattttggctagtgatgctcaagaactcggaggcaagctaccagaactcctacaacccacattacgtcgttttgcaggagataaacatcctgccattcgcgccgtagcccttcgacggctgccttatttgcaaagcaggaatctcgaactgggctgggaactatttcatgttgccatgcgggatgcagatggcctttggcaaatcgccgaaccctgtctctattatgcctatcaccatcacttcatgatagttaaacctttgctcgcacgtcttcaccttgaaggcagaggcaaagacttggaaacttgggggcgtatttcggctttgtgcagcttgacacagcacatcgatttctccgaatttatagagaacttgaacgctctcgataatacggaagcttggctgggggcagcaactgtctggacaaacattgaaaatattaaacagcatcgagaagaatgctttgcgggcctgagtgctggattgagtgcgggcggcacacatgcattgattattgctcgaaaaattgagcgtattttcggagatcagacacctccggtttctgtgccaatagagcttattcaaagctgtttttatatattcgaaaacgatagcgataatgaaagcaagcaccatcgacttttcggctttcatgaatggctaaatgcaattgctcacagtaatccagagcaagcactggccgtagctaagatctatctgacttacgtcaaaagctgtaaaccatatctttatgaccacaaaaacagcctcacccaattgatgactcgactctttgctgaagcagaagaacgagaagagtccgacggaggcatgatgttaagaagtgtagtggatatacaagacacgctactttcgctgggggtcaatggtgtaatagattggctgaaatctgccgaacgcccctga

SEQ ID NO: 343936 - DNA, 1266 bp, Pseudomonas aeruginosa
atgcctctcaccgatactcagtgccgaaccgcgaaacccaaggaaaagccatacaagctcacggacggaaacggcttgtacctggaggtgaagcccaacggcgtcaaagcctggcgctatcggttcgagctgagcgatggcgacgccaaaaaggaaagcgtcttcgcgattggcgactacgtgatcggtccgaaagcagaatcccccgagcaagcccaagaacggcgaaatggccgacgattcacgctttctgaagcacgcgatgagcgcgtaaaagcacgcgcgcttgtcatacaagggatcaatccagcccatcaccgtcaacaagagcgaatcaagaaagcccacgagcgagcaatcacttttgaggctgtcgctaaggagtggctgacactgaaggactgggaggaaatcaccaaatccaagcggctcaaaatgctggagcggaccgtcttcccaaggatcggtgaaataccgattaaatcaatcacccctgctcacatccttgaggttctgaagggtgtagcccaggaaaacggtccgtcggtcgcagctgaagccaaacggactatgtctggcgtcttcgaactggcaatcgccactctccgcgccagcaacgaccccgtacaccctgttcgaaaagcattgcccgcaaacaaaacacagcacaagcgagcactctcgacagaggaaattggccaacttttgcgagacgttgaatcccacggcgggcgccatgaaaccctctgcgctttccgcctaatgtggctgacgctgtgcaggccaaacgaagctgtggaagcccaatggtcggaatttgacttggacaaggccatctggcgcattcctgcggagcggatgaaaaagcgaaaggaacacacaattccgctccccaagcaggcattagagatgctgcagacccttcggagcatcaccggtaagtacattcatgtctttccgcacagagatgtgcgcacccgaccaatggtgtctgcatcgttccgccagatgctcaacgtcttgggctggggcggaaaatacagccctcacgccacacgtacgacaggcagcaccaggctcaatgagctgggattttcagcagactggatcgaaaagcagttggcacataccgaacagaatgcagttcggcgcacctacaaccacgcagagtatctagccgaccgaaccaagatgatgcagcagtgggcggacatgctggacacctggaagaacattgagaaagagactttaagcgtaagcgcctaa

SEQ ID NO: 343937 - DNA, 615 bp, Pseudomonas aeruginosa
atgttcaaaaaaccatcagatatccattcgtgcctcaccgacgaatccgttgatcgcattggcttcctgattgctcaggttcgctcagaaaacctcgatacggccaatgatcgtgacaccggatggagcctgggctgccgcgcttacacttggtgttgctcggaaattatcgagttggccaaggctgaatcctgggtcaccatagttaaccctactttgaaattcattttcaaaatagggagcgtcgagatcagtttctataaaggaacagctagcaagccaaagaaaaatatctatagccgagctcaggcttaccctgagcttcgtcaactgtctctgctttccaacatgatggttcccgagaaactagtttgggcttatgcagtcgaaactgatatcgaagggcttactactggaattgaattcttcggaatgagcgaatcgggagaagtaatttcttcgcgcactattcctctgcacaaagtcccggcgctgccatctatcattaacggcacagagaacgcgcccaaggatcttaaacctgctcctgtctcgcttccaagaccgaaggacgagaaagcagcagagaacgatgagccacggaaagatgagtaa

SEQ ID NO: 343938 - DNA, 1125 bp, Pseudomonas aeruginosa
atgagtaaaagagagtttttcttcggagataatttacgcattgcccgacttatgtcgggcatttctttgaatgatctgggagaaaaagttggcacgacgcggcaatatattcaccaactcgaaaccacagacaagacaccttctcaggaccttataagagccttggcattcgagttaaatgttgaagaagacttcttctccctctcgctaggaaatcttgtaaaagaagaagagtgtcacttcagaagacagaaaagcactctagtatcatccagaagagagtgcaccgcctgggcgactcttctttacaaacttactgaagcccttgaaaagtatcttgagcttcctaaagtgaacttcccccagcgcgaagccaaaaacttttttgatgttgaaaaagccgcaatggagtgcaggcagtactggggactcggcaatggccccataacaaatatggtacgggtagtcgaaaacgctggggcagttgtatctagctttggtgacgtatcagaaaaggtagatgctttatcactacaccggggtcgaccgattatactgataaaccctcaaaaatcagcacctagaattaggatggatatcgcacatgaagcggctcacatagttctacacgacggagttgagacaggcgatagagaaacagaaggccaggcggactattttgcaagccatttcctacttccgaaccaggccctgattcaaggctataaaagcagaagcagaaccaggatagactggcaagcaataatatctttgaagctaaagtggggaattagcattcgagcaataatttacagactcaatcaagcagaaataatatccccctctcagtacagaaccgcgaacatccacctaagcaaaaatgggtggacaaaatctgaagaatacgacaatgaaattgcgaccgagtcaccagaactgcttcccacgggaatttccattctaggaagttcatacggaaaaaacttcggcggcttacttaccgaattaaagataagcaaagaatttctttcaaaactaacccaatccgaaaaaataattcaagaaatcttcaaaaacgactctttgccagacaacataacaaacatcgccgcctatagaaaatag

SEQ ID NO: 343939 - DNA, 264 bp, Pseudomonas aeruginosa
atgtcattgcagtgccctcgctgtatctctctcaagatcgcatctctgattcccgccattaagatcttcgccctggtcggcactgtcagtggcgttgcgcgcggtgcatccacagcccttgccggcggtcagaccggatcggcggctggcaccagcactggccctttgggtatcaccctgggttcgctatccggcgcctttctcggcggcctagcttgtggcgtcggcgattgtgcgctcggcgcccagctcgcgaccagttag

SEQ ID NO: 343940 - DNA, 324 bp, Pseudomonas aeruginosa
atgaactgtcccgtgtgtagctctgtgcgcatcgcaaaaaaggacctcggcaaaagagccggaggggtcatcggctccattggtggcgctgccagcggggtctccagcgttctcgccggcggcgaagccggcgctgccatcggcgctatcggtggccctctgggcattgccctgggcggcctcactggcgccatcctgggagggcttgtcggcggtgccaccggcgcaatggccggcgccgcgattggctcacagatcgatgagcgtgtgctgaacaactaccaatgcctggagtgcggccacgagttcagccttgctgactga

SEQ ID NO: 343941 - DNA, 387 bp, Pseudomonas aeruginosa
atgggctggttgttctcatctcgtacccggtcagagctgatccaggatctgactcaatctgaagaccatgcgcacgccagcgttcgcgttgtcgcccataccttgcggggcaatgtgctgtggtcggtcgctgaagtaacggcaaagaccgaaggggttcatcctaacctcgctcccggtgattccatgcattacatccgctgcgacctgctgcaacgcagtggcggcgagtgggggtacaaagccatggatgaatcagcggcgccttgctactacagctgcccgctgcgctatctcgacatggccaagccactctcgcccgagtggcgcgagaaggttcgtgcctatcacacacagcgacgtcagtcggcaatctcttcggcttga

SEQ ID NO: 343942 - DNA, 183 bp, Pseudomonas aeruginosa
atgaacctggtgcgtttcattggtttgctgttcgcgtttatcggtgtgttggccagctgcgcagccgccatagccctgctagtgctcatgctgcgtttctggcccctgctgttggtcatcgtgctggcactcgttctgttccgccaactcctccaggaagtcggcgtccgcatctccgcctga

SEQ ID NO: 343943 - DNA, 180 bp, Pseudomonas aeruginosa
atgacagccatgttcaaggccggagaaaccgccggcacctacattgccgacaccccgctcactgaagacgacatcctcgcaatggccaggcagctggcctgccaccgaatgcgaaaaggccaagccctccagcaccccaaggacgtattcagctatctgcagatccttctgcaggagtaa

SEQ ID NO: 343944 - DNA, 939 bp, Pseudomonas aeruginosa
gtgcagtcctctgagcgtttgaaaggtatcgatgtcttcgtctgtgtggctgaccaaggaagcttcgctgccgccgcagattgcctgagtctcacaagctcggcggtgagcaaaagcatcgcgcgactcgaagcgcgcctgggcttgcgcctcttcgagcgcactaccaggcggcttgccctaaccgacgcgggaaatgccttctaccgcacctgctcgagagtactggccgatctcgaagagtccgagctgtcgctccacgcggactacgtcgaagcacggggacgtgtgcggatcgatttgccggccgcctatggtcgtctgcatgtaatgcctgcgctgctcgactacttgcgccaccatcccctcctgacgccgcacatctccttcactgacaccttcgtcgaccccgttgccgaaggtatcgacatcctggtgcgcattggcggttcggacgtgtggccggaggaactggggcaccgctatatcggcacccagcgcttcattttctgcgcggcaccgtcgtacctggaagcgcgcggcaccccactggccgagagcgacctcgatagccatgacatcgtcgtctatgggcataccgatggcgcgggcagtcactggcacttggctggcgcacaacctggcgagcgggagcggcgagagatgcccgcgcggatgaccatcggtgatggcgaggccgtggttctcgcggttgcccagggttatggcatcgcccagctgcccacctggctggtcaagcacaagcaggccaacggcgaagtggtggaagtacttccgaacttggcgaccgatggcttgccgatgaacctggtgtggctgaaaaagcgggaagcgctgcccaaggtcagcgtgctgctgaaggtgctggcaagcacgctgcggcacgacgggcaccaattggtatcgaacaattcatga

SEQ ID NO: 343945 - DNA, 1191 bp, Pseudomonas aeruginosa
atgagcgcacacgaaccaaccccgctcgatgtagtacctgctcgtcgcgcccgcatcgggatcttgattctggccatttcggccttcgtgatcgtcaccaccgaattcttaatcgtcgggctcctgccgagcctatctcgcgatctgggcatttcgatttcgacagcagggcagctagtgacgctgttcgccttcaccgtgatgctcgccgggccgccgctcaccgccgccctcgcacacctggaccgccgcaagctgtttgccggcatcctgctgctgtttgcggcctcgaatgccctggcagccgcggcgcctaacctctgggtgctagccatcgcccgcttcctaccagcattggcactgccgctgttttggggaacggctagcgaaaccgctgcgagcctggtcagtcccgcacaccaggggcaggcggtagcgcgcgtctacctgggtatctccgccgccctgctgctgggcattccgttgggcaccctggctgccaacgccatcggctggcgcggcgctttctgggctctggcgaccctgtcgctcctgatggcagtggccctgctcctgtggatgccaccggtggcgcgtacggcccgggtcaacttcgcccgccaggcgcgcattttttgtgaaccgtttttcctcgccaacgtggcactgtcggttgtggtcttcaccgccatgtttgttgcatacacgtacctcgccgacattctcgaacgcattgccggcgtggcgccggcgcatgtcggctggtggctgatgggcttcggcgccatcggtctaatcggcaactggatcggcggccgcgcagtcagtcactcgccgctcaaggcaacggcgctgttcctggttattcttgcgctgggtatggccgcggtggcgccattcgccaactggccagttgcgctgtggggtgcgcttgccctctggggcattgccaacacagccctgtaccctatctgccaggtacgcgtgatgagctcggtggagcactcacaggcactggccggaaccacgaacgtgtccgcggccaatgctggtatcgggctcggcgcattgctaggtgggctggccatcccagagctggggctagcgtcgatcggctatgtagcggcagctgtggcgctggtcgccgtgttgctagtacctattacggctcgtatgcgggctcgcccctga

SEQ ID NO: 343946 - DNA, 450 bp, Pseudomonas aeruginosa
atgcgcaagaaaatcctcctggtttcattagtaggctgggcaacagccagcaccacattcgccggaacgtttgagtggaccagtggctggggtcagggcgtaacggagcaccttgtcgatgatggcaatggcaacggcctgaacatctcctgctccagcgatgacgaccaagctgtcagggcctacgcaagcatcgcaggccacgagtactcctccgagagcgacgagggcttcgatgtcatcgtcgacggcgtcacctacagcaaccccttcttcaccgactgccacgcctgcggtgccaacttcccaggcttctgggcggcacttcgcaaggccaacaacctgcaaatcactgcccacggcaagaccgtcaagctgccgaccaagcatctgagccgcgagctgttaccactcaacaacaaagagaactcgtgcaagtcggcctggtag

SEQ ID NO: 343947 - DNA, 312 bp, Pseudomonas aeruginosa
atgcgcattgtacgcgaggaaatcttcggccccgtgctgaccatcatcccctacgaggacgaagccgatgcgatcgccattgccaacgacacgcgctatggcctgagcgccctggtgctgggcacgaacccggaaagctgcgagcgcgtggcgcgccagatcgatgcgggccgcgtgctggtcaacaccctggcccatgagccacgcgcgcccttcggcggcttcaagctctcggggctggggcgcgagatgggccgctggggcatgagcgcctacctggagcccaagaccttgctgaccagcgcgggttga

SEQ ID NO: 343948 - DNA, 330 bp, Pseudomonas aeruginosa
atgaagcgcgtgacgctggagttgggcggcaagtcgccaaccgtggtgctcaacgatgcggacttcgccgccgtcatgccgctcgtgctgatggccgggttcatgaacagcggccaagcctgcatcgcgggcacgcgcatcctcgtgccgcgcagccgcctggcagagttcgagcaggtggcgaaggaggcggtctcgcacatccggtctggcgacccgcgcaatgccgacaccgacatcggcccgatggtgagccgcaagcaatgggagcgggtacagagctacatccgcatcgggcaggaagaaggcgccacgctgctggcaggctga

SEQ ID NO: 343949 - DNA, 150 bp, Pseudomonas aeruginosa
atgtttgcgcatttgagtgagggcaccaatgacctggtaaatgcgcgcgccttctacaatcttgttcttcctaaactgggctgcgtctgttttgaatccatgaagaatgccgcggtctgggaggcgcaggttctcgtttcgtggtcctga

SEQ ID NO: 343950 - DNA, 846 bp, Pseudomonas aeruginosa
atgattcgtattaacgataaattatcaaagatcctgggtgataacacagccgactcgcgcagagacaactggctatggctctacctgtccgacatcagagccgccagatacaacgtcatggccctagaccaaagaaccatgcgagacaccattgcaaataccatttcatcggccaaactcaacatccagataatattaagccacgccagaagaagaataatttcagaaaaccttatgacatgggtaacagaaaacgaacgacagcatgaatggataaaatcgaagctattcatcaaacataactacagctatctcaccccagaaaacctaaagggccgagaacaaatcctagcactcattgatatctgggatatcgatttaaaacaaagcaccattgaaagcctaaaaagagactggattgaacaacttaaaaaggacaagcaactagactggataaaagaagaagacgaactcgaggcatgcacctatatctgggactggatgcttaagaacaaacgaaatctaacgggaggatatacacaaccaatgaaccaccagagtgcactagtattctttgactccattcacatgacggagctagagaaaaaactgtgcatcagttcagccaaaaaaatctggcgccaaaaaatcagccgaaacactcgaaaggatagaagtcagaaaaatttcaacctaactgaaaaagccattagacgacttgaagaactcagcaagagatacgaactttcgcaaacccagatcatagaaatattattaatgatggaacaagaaaaagggctttacatagcagagagaattcgaatcctgcgaggaattgactcttaa

SEQ ID NO: 343951 - DNA, 201 bp, Pseudomonas aeruginosa
atgaggataatccgcctgaaagaggtcatggatcttactggtcttgcccgatccactgtttacaagtacatcgctgctagcgagttccctgtcccggtgtctttaggtgagcgatgtgttggctggcttgaaagcgagatccatgactggattctcgccagggtcgctgagcgtgataaggctttaggtctgatttcttga

SEQ ID NO: 343952 - DNA, 657 bp, Pseudomonas aeruginosa
atgctgcgtcatcctcagaacaccaatctgcatattcacactgatcccttcttcgaaggtcttcccgtaatgatcgagaaagggccattcatttctgaatacctagcaaccctgaagagcactatcgacctagcacttgggcagtatcctaggctcctggccttcaaggcagacttacgccttcctgcgggcatcgacctgcctgagtacgcctacactaacgacgtcatcagagagttctggggctcgttcaaggcgaagattgagcacaaccgggacatggctcgtaagcagaatccctacgcccatggctgcaaggttcgctacgtatgggcgagagaggtgggagcaaaggggcgcccgcattaccacctgctgatcctgcttaatcgggatgcgttctacaccgtgggtaggctgcagtcagagaactccaacatgatcagtcgattggaggaggcttgggcgagcgccttggggctgcagctcaatcagatgagtgggttggtagagattcctgataacgccacgtatagggttgatcgcgatgatgcagatgcattggccagcctgtttcatcgcgctagctacctctgcaaggtcgctaccaagagttttggggatggacagcatgggttccgaggcagtcgggggtaa

SEQ ID NO: 343953 - DNA, 264 bp, Pseudomonas aeruginosa
atgaacgaaatgcaaaatactgttcaagtttatcgcaatgaacaatcgatgacatcatgcgtaacgctgcccatacctgacgacgtgccggtggagcatcccaaggtgcaggaactgcgcgatctggttctgtggtcggaaggccaggtgtggtgctcgccggagcgacatggcgccatgtctgcggtgttcaaggcgcagatcgactggattcccctggcgctcggcgccgtgcgcccacccagggcaagacgctcgctgtga

SEQ ID NO: 343954 - DNA, 1713 bp, Pseudomonas aeruginosa
gtgaccccggtgctgtggcgcctgctgcgcacctatcgctggcggctggcggcggccatggggttgcaggccctggccgggctctgctcgctgttgccctggatgcttctcgcctggctcgccgagccgctggcgcgcggccaggcgcagccggccctgctggccctggtgctgctggcggtgctggcctggctgggctgccaggcgctggccgcgcacctggcccaccgggtcgacgcggacctctgcaacgacctgcgcctgcgcctgctggcgcacctgcaacggctgccgctggactggttcggtcgccagggcccggacggcgtggcgcgcctcgtggagcaggacgtgcgggccctgcaccaactgatcgcgcacgctcccaacgatctcagcaacctgttggtggtgccgctcgtcgcgttgctctggctggcctggctgcacccctggctgctgctgttctgcctgctgccgctggtgctggccgccgccggcttcctgctgctgcgctcggcgcgctatcgcgacctggtgctgcggcgcaacgccgcgctggaaaggctctcggcggactatggcgaattcgcccacaacctgctgctggcccgacagtaccccggcgccggcatacaacagggcgccgaggcgtcggcggcggccttcggcgaagcgttcggcgcctgggtgaagcgggtcggccacctcgccgcgctggtctacgtgcagttgtcgacgccctggctgctggcctgggtcctgttcggcgcgctggccctggatgccctcggcgtgccgctggcgctcggccaggcctgtgccttcctgctcctgctgcgggccctggccgccccggtgcaggcgctcggccacggcggcgacgcgctactgggcgcgcgcgccgccgccgagcgcctgcagcaggtgttcgaccatgcgccgctggccgagggccgctcgacccgcgagccggtcgatggcgcggtggcgctgcacggcctgggccatgcctatgaaggcgtggaggtcctggccgatatcgatctggagctggaggatggcagcctggtggccctggtcggtccctcgggctccggcaagagcaccctgctgcacctgctggcgcgctacatggacgcgcagcgcggcgaactggaggttggcggcctggcactgaaggacatgcccgatgccgtgcgccatcggcatatcgcgctggtcggccagcaggcggcggcgctggagatatccctggccgacaacatcgccctgttccgccccgatgccgatctccaggagatccgccaggcggcccgtgacgcctgcctcgacgagcgcatcatggccctgccgcgtggctacgacagcgtgccgggacgcgacctgcaactgtccggcggcgaactgcaacgactggccctggcccgtgcgctgctatcgccggcgcgcctgttgctgctcgacgagccaacctcggcgctggatccgcagaccgcccggcaggtcctgcgcaacctgcgcgaacgcggcggtggccggacccgggtgatcgtcgcccatcgtctggccgaagtcagcaatgccgacctgatcctggtgctggtcgctggccgtctggtcgaacgcggcgagcacgcggcgctgttggcggcggacggcgcctatgcgcgcttgtggcgtgaacagaacggcgcggaggtggcggcatga

SEQ ID NO: 343955 - DNA, 894 bp, Pseudomonas aeruginosa
atgccaaactttgctaaggcctgtatagatagattgttttcatggttcgagagttttgtatcctcagagggttcggacagtttgaatgttcgtcctttgttttggctttttatatcgggggcttttttagtcttttcagtgttggttatggatttggtttttacattttctgatccttcagatggctggcatggtacgttcggagatttctttggcggtgttgttaatcctattttgacttttctcactttctttgggttattaattactattgtgctgcaaaaggctgagttgcgggagactcgtaaagagttggctaagtctgcctccgctttggatgaacaggtaaagcaattcgctcggcaaggaaatgttgcggggttctataagcttgttgataatcacatgtctatagtttcttcaattgatcttgtgaataaggatggtgttaggacctttggtcgtgattgtattcgtgtttttaggaataggcttgaacaaaagtttcgcgataaggttcagtttggcccggacaaaacctttcaatctatattcaaggaggatgcgaaaaatcctgaggctgtgaaaagagtattcaaatcattttgggaggacgatggggaggagttacaaccttacatggctagtgtgaggataactttatcttatttagaatcccagttgagttatgattctcactttgtgaggatgtatcgggccttgtttactagttctgagctggccttgatattttactatgctttggttgttgatgatgaagagcttagtcgtcaattaagcgtgacgtcattctgtataaatctagatccttcttttctgttgctgacggagcataatagttggctttctgaatgccgaataccaacaccttaa

SEQ ID NO: 343956 - DNA, 3132 bp, Pseudomonas aeruginosa
atgagcaatttcgccgaactgggcatcaaggtcgattcgagcccggccgccaaggcggccgaggacctcgacaagctggtcgactccgccgaccaggccgaacaggccatcgacaacctgtccgacgccagcaagggcctcgagcaggccaccaagggagtatcgcgcgcggaggagaacgctgcccgcagtgtcgacaaggcggccggtgcgcgtgaacgccaggctgctgccagccggaaggtatacgacagtgccgctggcgagatatccatcatcagtcagttggagcgggcgctctccggcaacgtcgccaacatcgatgatctgattcgcgccgagagcttgctcgagcgggcgcgcaaggccggcctgaccacgctgcaggacgaggcgcaatatcaggatcgcctgggtgcggcctatgaccggttgcagaaggcggaaaccaaggaggccgccgagaagcagcgcctggttgcggcgcagaaccggcagatcgaagcgatgcaacgcacggtcaacagcatcgatccggtgaccgctgcgttggccaggcttgagaagcaggaggccgcgttgcgtgggctgcgcgccgccggcgggctggatgacgccggattggccgccggcctggagaagatcgcggcgaagcggcgggacatcgaagggaccggcggcgcgatcaacaagctcgggctgaccagcaaggaagcgcgcgagaacgtgctgcagttgggtaacgccctctcaaccggtaactggcgggtcgccgcccacaacatcgccgagatcggtgtgaacgccggcggcgccgcgtctggcgtggctggtgtcttggcaccaattgggttgctggcagcggcgatcggtggcttgagcgtcgcttatcttgctggacagcgccaagctgatgatttcaacaaggcgatcatcagcactggcaatgcctctggactgacagctcagcaactgaccgacatgctcggccgacttggcaaaagcggaaacttctcagaggcgtctgaggcccttctggcgctggttcggtcagggcggcaagtaggaagcgctttcgaggatgtcgcgcgcgcggctacggagatgtctgccgtaaccgggcggagcgctgaggacatcgcaactgaactggcgggtgccaagggtaaggttgcggatttggcggctgaatacaaccgccagtaccacttcatgaacgtcgacaccttcgctcaaatcgaagctctggagcggcaggggcgttcaatggatgccctgaagctgcttgcagggacgctggcctcggagatgagtgctcgaaaccgagagattgaggcgtcgacccgcggaatagtaaaagcctgggacgatgcgacgaaagctgtaaaacggtattggcaggagctgaaaagccggaccgctgcagatccggagacattcaagcttcaggttttgcagggccaactggaggactcacggaagctcccggattccacgctgaaccggaagaacattgagttcctcgaaaaagagattgccttgcttcagaagcggatcagcgtccgtgaggaagggcgacgggctcaggcagaaggtcaagaggaccaagatagcttcatccaggctagcaaggacctgaatgctcagcttgataacgtatcgcctgcgaagaagcgggcagcagccattcgcgagctcaatgcgcagtttcttgagctgctgaaatcatcggaacggcttggtaagaggagccctctgctcgagggggttcagtacgatgggcgttctttctctggcggttcgtacgaccaactgcgcaaggggattgaggagcgcctgaaggacccgaaggcggccaggtcttctcaatttcgtgatgatgctgctacccagtacctgttgcgtctgcgcgagcagcagggagccctggagcagcaacttggtaccagcgagaaactgtccgtttcgcagcgtgagatggcgaagtgggagcagcagattgcggacctgaaggtgaaatctgtcctgactgccgatcaaaagtctctcttggctagggaggcggaggttcgcgcgcagcttcagaagaacgtggcgctcgaggccgaggcgaggaagaaggaggaaatcgccaggatcgacgcgtaccgcgcaaaccttgaggggcgcctgcgttcagtgcagcaggggtacgaactgcagatcgctggccttggtgcgggcgatgaagagcgccggcgcattcaggaccgtttaaagctggagcaggactaccagagccagagcgccaagctgcaggaacaacgcaaccgcggcgaaaccaacggcggcatcagccagagccagtacgaaaaggaactcgctgctctggacgattatcaccgtaaggcgctggccaagcagaacgactacttccatcaagtcgatgagactcagaaggattggtcattgggagccagatcggcgttcaagacctatctggagagtgctcgggacgtggcgggccaaaccaagagcctgttcaccagcgcgttcagcagcatggaggactcaatcgccaacttcgccacgaccggcaagttgtcgttctccgacttcgccaagagcatcctggccgacatggcgcggattgcaacgcgcgccgctgcctcgcaggccctttcgtccctcttcggcggattcttcggcggtggtaacgctgccgcgcagtctggtgtcgacaatctggtgagcaacagcgggctgttcgccaacggtggtgcgttcgccggcggggtgcagatgttcgccactggcggggccttcaccaacagcgtggtcagcacgccaaccgcgttcggcatgagcggcggacgtatgggtgtgatgggcgaagcggggccagaggccgtgatgccgctgaccagaacctcgtccggggccctcggtgtgcgcgctatgggcggcagtagctcgcagatcaacgtcgaggtgaacattgcctcggatggttcggccaacgtctccagcagccagcctggcctggaccagttcggtcgcgacatcgggacgttcgtcgagcagaagtaccgacaactcctggcgcgtgatctgcggcgtgacggtgcgatcggccgcgccatcaacgggtag

SEQ ID NO: 343957 - DNA, 600 bp, Pseudomonas aeruginosa
atgtcctcactgcttttctatacggattcagaagaggccattgtggctaccgacacccttgtcaccgagcttgatgggacatttctccactacaccaggaaggccattcctatccccgcacgccgcatgatcatcgcggggactggactggagctctttataacgcaatggttcaccttcgtgaatgaacaggactccgtcgctgacatagattcgttcgacaaagatgttccgcaagttctcaaggccatttggcgtgaagttgagcgacatctcacctcccctcataactacacagcaacgatttaccacttcgggttttccggaaaggagggtgagattcatggctacaagtactcttccgagaatggatttacgtccgagagcctgatgtacggcctgggcataaagcctgatctgatgaacaaggaagggatcgacttcacgaccttccctgattgcgcccggcagatcatgttggcccagatcaagcaggaggcgctcaagtcaaggggcgcagcagtttacatcgggggcaagatcgatctattgcacctaacgcgagatggtgtcgcccagtacgactggggagatatttga

SEQ ID NO: 343958 - DNA, 354 bp, Pseudomonas aeruginosa
atgaagaagttgatcggggtggccgcgctgatggcgatggcggggtgtgcaagtgtcaacgaaacgaggagcaatccgcctcttgtagacataacctcgaccaagccgccgattcgtgtggccgaatgcatccgtgatcagtggcagagaattacagtgcttggagctagtttcgcggtcaacctccaatctaccggtgacgtttactcggttattgccgatctgcagatgccaactcatttggcggacgtttcaccggacggggatggatcgcatgtgaagtaccacttctatcggacttggcaatcacccatcgacaaattcccagatgctgtcagggcatgcgcccgatag

SEQ ID NO: 343959 - DNA, 912 bp, Pseudomonas aeruginosa
atgctgggcggaatctttgatgttttttctaggcgagaaggaaaggtttctaagaaacccttaacaaaagagtttaggcatagattagtaatgctgctaaaggagatacttggcagtaattttaattttttcttggaagacttgcagaatcgattggcatacttgcatgggcgccctattttaatggaatcgcttcgtccagactcgatcgtaagcgatatattaagctttctgttttcatgtagtgatgaacactttttagacgcgattgagtacttgtttcagttgccgaactaccaggaactatccatgtcggaagaggtggtggtagagcagattaacgaatttctatcgattgacaatttaccgtattacgtaacaaaaaaagtatggatagattataaggggaccgataggttcgggaatgaatcaaaattcagtaagctaggggagcccgttagagtagtatgtaaggagagtgagattctacatcagaacgcaattatccccacgctaagccttttaaggggagaggggctgaataatgttaactcggagtttcttggtgcgttaaaagactataggtatggcaattatagggatgcactaaccaaaagcaacagcgctcttgagagcatgatgaaggtaatttgctcaaaaaggaaatacaaatactctgagcatgatgcatccaacaagcttcttaaaacgattatagaaaattctgaccttgattcgttttgggagcagccaattcagataatctcaaccatcagaaatcgttacagttcatcccacggggccggcactaaatcaaaagaagcttcagagaatatctgtaattttgtaataaatatgacggcctctgtaatgatttttttggatgaaaaattcctgaagagcaagagataa

SEQ ID NO: 343960 - DNA, 729 bp, Pseudomonas aeruginosa
atgtccatttcaatatttaacctaattaattttttaaactttaaagctgggcgatcccttcgggccgggctctattcgctagcgaaccaagccaaccacgtgcgtttgtctcggcccattcgggtaacggtccctatcgcaacgtcgtcgccaacggccaaggggaacccttccccttggaacccgcagagcaacaccaagggctctgcccttgtcatcccgctcttgccgccgagggctcgggagcgcggggcggagaagctgccccacactccccagcggaggctgtttcaggggggaggcgttcaagggtgcgctgcgcccgtgcttccgttcgccggaacggtgaagctgttccgacgagccgggagcgcggcccttgaccggatcggccacggtgcgggcggcctggatcaggcagagcaggagcagcgctttcagggtcttagcgagcatgggtcagccctccagatggaatgcttcgcgcacgggcacaaagggcgtgggtttcccgctgtcgtacacaacgtgccagtacttcggcggacgccgggacgggtcgtgtttcgcgcagaaggaacggggacggcagagccagcggccaccctccagatagggcagcccagggggccggcagtccggacacggcgacgggttgtgcaatgggatgacctgccttgcggaccagcacacagagcaggcgcagtccggggcgtgggtttgacgtag

SEQ ID NO: 343961 - DNA, 870 bp, Pseudomonas aeruginosa
atgggtaaaatagacggtcagcaactcgacttggccatccccatgaccgacacagacgttttccatttcgacgacagtcgaccccatttcgatgggctgtgccgcaagaatggcatcacttactggtacgcacgagacttcatggaaatgctcggctatcagaccttttccagcttcaacaaagcggtacagaaggcgattgctgcgtgcaccacgttgggcatcgatgtgatggaaaatttccagcaggtggaccgcgaaatcaacggcaaatcagagcgcgattacaagctatcgcgtttcgcttgctatctaacggccatgaacggcgataccaagaagcccgaggttgctcgtgcacaagcgtattttgcagcagtggctgaaaccttcaagcgttacatcgaagctgctgaggacgtagagcgcgttttgattcgcgacgagatctcgcaacacgagaaagctctaagcaacgtagcgaaggatgcaggcgtcacggagtaccacttcttccagaacgctggctatcggggcctctacaatatgaacctcaaagacctgaaggactacaaggggctctctggaaaggatgcgggtcgctcgctcttggacttcatgggcaaacaggagttggctgcgaatctgttccgtgtaactcaaacggaagccaaacttgccaatgaagggatcagaggccaaaaggcagcagagcgagcagcggaatcagttggccgtaaagtccgcgagaccatgattgagatcagtggtgacacaccagaaagccttccgcttgcaagggatatcaagcaagtcaaaggagatcttaaggcatcaagccgagagttcaaaaagctggacaagaattga

SEQ ID NO: 343962 - DNA, 309 bp, Pseudomonas aeruginosa
atggaacccacgtcaatcggcgcaggcgcactgttcgccaagtacagcgtcgccattgccggattcgcgggggccatcctctccttgtcgttcctgcgcggccttacccgtaagcaggcaggggcggcggtggtgaccggcttcttgtcgtcgatcttcaccacccagctcgtggtggcctacttcggcctccccaacgacgcagagtcgaagaacggggtggccttcctgatcggcctactcgccatgaacatcatccccgccgtaaaggccgctgcggagcgcattctcgcaaccaagggtgcctga

SEQ ID NO: 343963 - DNA, 186 bp, Pseudomonas aeruginosa
atgtccgatatcaaaattggtgatgttgttcagctgaagagtggcggcccggcgatgactgtgcaggacatcggcgattacagcagtcgcggcattgatcacggagcgcattgcgtgtggtttgacaacaaagacgctccgcagcagggcgtctatgcgattgccgcactgaagcctgtcgactga

SEQ ID NO: 343964 - DNA, 600 bp, Pseudomonas aeruginosa
atggcgctgaacaagaagcggcgcctgttcgtcgaagagtacctggtcgacctcaacgcaacgcaggcagccatccgcgccgggtacgccccgaagcgcgcggctgaaatgggctacgaactgctccgcgtgcccgaggtggccgaagcgatcgcccaggccatggccgagcggtcgaagcgcacggaggtctctgccgactacgtcgtccgtcgcttgcgcgagatcgacgaaatggacgtcctggacatccacgaggacgacggaagcttcaagcctatccgcgaatggcccaaggtctggcgccagttcctttccggcatcgaggtcgccgagctgttcgaaggccgaggagatgaccgccgcatcgccggcgtgctccgcaaggtcaagtggccggacaagctccgcaacctggagctgctgagccggcacgtcggcaccgagtcggccgcgctggatctggagttgaagcgcctggacgtggcgaagaagcgtgccgagctgaagctgctggagaatcccgaggacgatgcgccgccgaccagcgtcgcggtgaccatcatcgacgcgagggtgcgtgatgccgacgctgaatag

SEQ ID NO: 343965 - DNA, 1020 bp, Pseudomonas aeruginosa
atgatcgaactgcaccacgcgcctttgagcagtggggcggtggtctgtatcgaggctgacggcacagttgcttgggaaaccccgcgcaagatgctggtccgtggctcccatgactcgaccatccatatccggagcgtaggcggggacgggcagggcaacgcgactcatctgtacatcgacggcaacccaagcaagtggttgcaaggacataaccttgttggttcctgtgatcttgttgccctcgtctgggatgcttttcaacgcctctgcgccctggtgggcattgagccgactgactttgagcgtcagaaggtcagggcagggcagtaccgcgtcactcgtgtcgattacaaccgaatgttcgaacttccaagccgggccgatgttcgagcctggctgcgtgcgggcgagttcaaatgtaagtcacgccatggtcgtccggtaaacaatcgcgggactctaactttcggcaaaggctcaagtcattggtcgattgtttgttattgcaaggccgatgaaataacttccggtggttcgcataagttgccggaagagtttcaccagtatcccgaaatctatcagtggatagataacaagcttcgcgttgaacttcggttgcgctcaaagaaactcaaggcgctgaaccttgaatatgcctctcaactcacccccacggttctttggaagctctaccgtgatttcatcggggaactggatatgtcagagcaaattgaacttaattcagagcaaatgatgaaaatcccgagcaaggtgctcggcacttacatgctctggaagcaggggcatgacatttcaaacttggtagcgaaggctacttattatcgtcatcgtcaggttcttcttgggtatggcatagatatcaatattcgttgtgatcgccgcgacgatagcaatgttgttccgatgattcgaattcttgaggctaagcctgcggccattccgaacttcttctttgaaagggggctgattcataaatcggcccgccaggtggctgtatga

SEQ ID NO: 343966 - DNA, 273 bp, Pseudomonas aeruginosa
atggtgctgagtgatgaccaacacatgctcctgcccagccagcgccagcagacgcacgcgcagcagcggcccacgagccaggtcgaatggctggcggatttcctcggccacccgctggcgcaacgttgcttcgctcgccccggcgcaatcctccaggacaatgcgcaacggcatgttcgccaggatcgtctggcgcgcctgaccgtcgacctcctcgaagcgggtgcgcaaggtctcgtggcgcagcaccagccaatcgaaggcctgctgtaa

SEQ ID NO: 343967 - DNA, 273 bp, Pseudomonas aeruginosa
atgagcgcgatcaagctcgggctgtctgcactgaatggaccggtatctcagcttccgccgcgaagattcgcagcgattaacccgaccacgacggtcgaagaggcgttgagcgaggcgatcgcgctgacgctaagtgtttctagcattctcggagcactgaccacctccgacgaagagcacgcgtgcttgtatgccctggagattgctgcagagatggctggcgacttggttgacgccgcgctcgactccctgcgtgaggagggccagcaatga

SEQ ID NO: 343968 - DNA, 234 bp, Pseudomonas aeruginosa; identical to SEQ ID NO: 325394

SEQ ID NO: 343969 - DNA, 387 bp, Pseudomonas aeruginosa
atgaacatggacaccaccatcaccgcacacggtttcaccggcttcctcggcaaaggcctgtccctgcgtgagcttcagtgcgtcctgggcatcgctgcgggtcgtacctcgaaggagttggcccgcgacctgggcatgcagccgggcacggtgggtaagcgcgtcttggcggcgaccaccaagctcggcgtcacccgtcgcgcagcactggtcgccgaggccatgcgccgcgggcttatctcgcccgccgtgatcgccctcgccttcctcgtcgccggtcagccactgctcaacgatgaccacatgatgcgcagccgccgtggcggcgaaaggaagatcgaaactcgtctgactgctcgccgcgatggcgtggcctgggtggcgtga

SEQ ID NO: 343970 - DNA, 2901 bp, Pseudomonas aeruginosa
gtgccgagcaattacgatccggagacccgggcctacctcggtatctgggacggcacgatgaaacaggcctggaccgataacccggtctggcacacctacgacatcgtgaccaacgatcgcttcggtgtgggtaaacgcatcaaggcctggatggtagaccgttgggagatgtaccggatttcccagtactgcgaccagttggtgccggacgggaagggcggccaggagccgcgacacacctgcaacctgaacctgcaaagccgcgccggggcctgggagctgctgcgtgacctcaccgcgatctaccgtggtatggcgtactgggcccagggccaactgaagatccaggcggatatcccgcgcgccaccgacgtcgatttcgcctacacccgggccaatgtcatcgacggccgcttcagctacggctcggccagtgagcgtactcgctacagccgcgccttggtcagctacgacaatccggcgaacaactacgacaccgacgtggctgtggccaccgataagcgcctgcagcggcgttacggcgacaacccggtcgaggtggcagccatcggctgcacccgcgagagtgaggcccagcggcgcggaaaatgggcgatcctgaccaacagccaggatcgcacgataacgttccgtaccgggatggacggagcaattccgctgccgggatgggtgattccggtggctgacgcgctgctggctggacgggagattggggggcgggtttctgcggttgctggccgagtgatcaccttggatcgcgatacccaggcaaaggctggcgaccggctgctcctgaacctgcccagcggtaaggctgaggcgcgaaccgtgcagtcggtcgccgggcgcgcggtgaccgtgacgacagcctacagcgagaccccgctaccggaattggtctggaccctcgatgccgacgacctggcggtgccgctctaccgtgtgatgaaagtcagccagccggagcggggtgtcttcgagatcaccgctctgcagtacgagcccgggaagttctcagcgatcgacactggtgccaagttggagagccggccgatcagcgttatcccgatcaccaccgtggcgccgccggcgagcgtcacgctgacctcgcactaccagttcgatcaggggttggcggtcagcacgatgaccatcgcctggcctgctgtagaaggggcggtggcatacgacgtcgagtggaagaaggatagcggcaactggatccgcctgccgcgtgccggcacgaccagcgtcgatgtgaccggcatctacgcaggtggctatctggcgcgagtgcgtgcggtgtcggccttcgacatcacgtcggtctggaagagttcgatcctgacacaactcagcggcaagaccggcgcgccgccggcgctggcgttcctgcgtaccaccagcggaccgtggaagatcggcctggagtggggattcccggccagtggcgcggcggacaccgcctacaccgagatccaacagtcggttacccccggcggcagcgaacagaacgcaactgccctgggcttgtttgcctacccgaccgacacccacacgctgacctcgctcgcggccggcgctcgcttggccttccgcgggcggctgatcgacaggaccggcaacgtcggcccctggtcggcctgggtcgacggcataagctcgacggatgcgagcgagtacaacgagctgatcaccaaggagtacgtcgagtccgccctgggcgagcagttcttcgccgacatcgatcagatgcaggtcgatatcagtggcctgcaggaccagatcgacaatctgaccgatgtgctggcctacgacccgacgaagacctacgcgcagaacgatatcgtgcgggtcggcaaccggctgtatcaagcgaagcaggcggtgccgctcaacgcctcgccgccgaacgcgacctactgggccgacatcggacagtcgatcgagacggccaacggcctggcccagcaggtggccaccaacaccgcggacatcaccgagctcgacggtaaggtcgaggcggctgcttcgagcctggatgttctgcaggctgctgcccgccgggagcccgcgacgggagagaaggcggatgcgctgaagggctgggacaccattgctcgagccgccaccgaagtcaccgtgcgggcgaacgaggacgaagcgcaggcgaagcggacgagcttgctggaggcgcggaccgagacggcggagggcaggatcgccaccgtggagtcggtcgttgcgtcgaacaatgctgtaaccgtccagcgattggatcagatcaccggccaggttgcgagtaacgcctcggcgatcagcaccgaacagaccgcccgtgccaacgcggacagcgccctggggcagcgggtggataccgtcagtgcgcgcaccgataccaacgaggcgaacatccagaccacatctcaagcggttacctcgctggatggtaacgtcaaggcgctctacagcgtgaagctccaggcgcatgccaatggccagaagtacgccgctggctggcaactgggcttcgacagcggtacgagcgtgacgaccatggcgttccaggctgatcggttcctctggttcaacagttccagcgggcagaccgtggcgccggtctcgatcgtcggcgggcagatgttcatcaacaacgcgatgatccaggacggttcgatcaccaacgcgaagataggcaacgtgattcagtcgaccgccctcggtgccaacggcgagccgctctggaagctcgacaagagcggggctcttacacagaacagcgctacgggcgggggcttcatgaggcagacagcggaggccaccaaggtctacgacgcgaatctggtggtgcgggtacagatcgggaatctcgacgtatga

SEQ ID NO: 343971 - DNA, 2901 bp, Pseudomonas aeruginosa
gtgccgagcaattacgatccggagacccgggcctacctcggcatctgggacggcacgatgaaacaggcatggaccaacaacccggcatgggtcacctacgacatcagtaccaatgcgcgtttcggcctgggcaagcggatcaagccctggatggtggacaagtgggagatgtacaagatcgcccagtactgcgaccagttggtgccggatgggaagggtggccaggagccgcgctttctgtgcgatctgaacctgcagtctcgcgcccaagcctggacgctgctgagggacattgcggcgatctaccgggggatgagctactgggcgcaggggcaattggtgtcccaggctgatatgccgcgcagcgctgacttcgactacgtctttacccgggcgaacgtgattgacgggaagatgacctacggcgccgcctcggctcgcgccagatacagccgcgccctggtcagctacgacaacccggcgaacaactacgacaccgacgtgacgggctattccgacacgacgttgctacgccgctatggcgacaacccggtggaaatttctgccattggttgcactcgcgagagcgaggcgcagcgccgcgcgaagtgggtggtgctgacaagcgtgcaggatcggacaatctccttcaccactgggacggagggccggatccccctgccgggctacatcatccctgtggccgattcgctgctggctggtcgcgagattggcggccggatctcgggtgttgctggccgcgtggtaacgctcgatcgcgtcactcaagccaaggccggtgatcgcctgatcatcaacctaccgagcgggcgcgccgagggccggacggtgcagtcggtcaacggcaaggccgtcaccgtcactgctgcctactcggagacgccggagccggaactgtgctgggcgctcgacgccgatgacctggctgtccagctctatcgagtgatgagcaccaagcgtgacgacaacggccaatggaccatcaacggcctgcagtacgagccaagcaagttcgaccacatcgataccggcgcgcgtcttgaagatcgcccgatcagcgtcatcccgatcaccacggtgcctccgccggcgagcgtcacgctgacctcgcactaccagttcgatcaggggctggcggtgagcaccatgacgatcacctggccggcagtggagggcgccgtcgcctacgacgtggaatggaagaaggacaacggcaactggatccgcctgccgcgtgccggcaccaccagcgtcgatgtgaccggcatctacgcaggtggatatctggcgcgagtgcgcgcggtttcggccttcgacatcacgtcggtctggaagagttcgatcctgacccagctcagcggtaagaccggcgcgccgccggcgctggcgtttctgcgtaccaccagcgggccgtggaagatcggcctggagtggggattcccggccagtggcgcggcggacaccgcctacaccgagatccagcagtcggtcaccccgggcggcagcgaacagaacgcaactgccctgggcttgttcgcatacccgaccgacacccacacgctgacctcgctggcggccggcgctcgcttggccttccgcgggcggctgatcgaccggaccggcaacgtcggtccatggtcggcctgggtcgacggcatcagctcgacggatgcgagcgagtacaaccagttgatcacccaggagtacgtcgagtccgcgctgggcgagcagttcttcgccgacatcgaccagatgcaggtcgatatcagtggcctgcaggaccagatcgacaatctgaccgatgtgctggcctacgacccgacgaagacctacgcgaagaacgatatcgtgcgggtcggcaaccggctgtatcaggcgaagcaggctgtgccgctcaacgcctctccgccgaacgcgacatactgggccgacatcgggcagtcgatcgagacggccaacggcctggctcagcaggtggccaccaacaccgcagatatcaccgagctcgacggtaaggtcgaagccgccgcttcgagcctggatgttctgcaggctgccgcccgccgggagccggcgaccggagagaaggcggatgcgctgaagggctgggacaccattgctcgagcagccaccgaagtcaccgtgcgggcgaacgaggacgaagcgcaagcgaagcggacgagcttgctggaggcgcggaccgggacggcggagggcaggatcgccaccgtggagtcggtcgttgcgtcgaacaatgctgtaaccgtccagcggctggatcagctcaccggccaggttgcgagcaacgcctcggcgatcagcaccgaacagaccgtccgtgccaacgcggacagcgctctggggcagcgggtggataccgtcagcgcgcgcaccgataccaacgaggcgaacatccagaccacctctcaagcggttacctcgctggatggcaacgtcaaggcgctctacagcgtgaagctccaggcgcatgccaacgggcagaagtatgcggcgggatggcagctgggcttcgacagcggtacgagcgtgacgaccatggcgttccaggctgatcgcttcctctggttcaacagttccagcgggcagactgtggcgccggtctcgatcgtcggcggccagatgttcatcaacaacgcgatgatccaggacggttcgatcaccaatgcgaagatcggcaacgtgatccagtcgaccgcactcggcgccaacggcgaaccgctctggaagctggataaagcggggagcttgacgatgaacagttccactagcggaggttttatgcggcaaacggcagaggcgatcaaagtgtatgacggaaacctagttctacgagtccagattgggaatctcgacgtatga

SEQ ID NO: 343972 - DNA, 1062 bp, Pseudomonas aeruginosa
atgccccgcctttccgccctgctgttcctcgccctcgcaccctggctggcccaggccgaggagaccctgcgcgtctacaactggaacgactacatcgacccacaggtgctcgagtccttccagaaggacaccggcatccgcgtcgagtaccacaccttcgccaccgccgaggaactggacaaggcgctgcgcagtggcgaggcgatcgacgtcgccgtcccctcccacgacaccctgccggccctgctgaaggacaacctgctgcggccgctggacttcacccagctgcccaaccgcagccatctcgaccgtcaattgctgagcaaactggccgcggtcgatcctgacaatcgccacgccgtcccctatctatggggtgccgtaggcctggccatcaataccccgcaggccgaagccgcctatggcgggccgctgcccaacagctggagcctgctgttcgacgccagccagagccagcgcctgaaaagctgcggcatcagcctgctggacgcgccggacgaaaccctggcgatcctcctcaactaccagggccgcaacctcggtcgtactgcgccgagccaggtacgccgcgccgccgaggcgctgcacggactgcgaccgaacctgcgctacgtcgacagcgagcgctacatcgccgacctcgaaggcggtcgcctctgcctggccatggcctgggtcggcgacgccctgcgcgcggccaaggcgggccagccggtaagtttcgaggtaccgcaggaaggctcggtgctgttcatcgacaacctggtgatcccggccggcgcccagcatccacgcgaggcgcaccgtttcatcgactacctgatgcaaccaaagatcgccgcacagatcaccgccgccaccctctaccccagcggcaacgccgacgccgccggcttcctcgatcccgccctgcgccagcaaccgggcctgtatccggaccacgacaccagccgccgcctgttcgccctggaaacgccgccggaaaagctccggccggtggtcgacgagatctggaaggccttccgcggcgccagccactga

SEQ ID NO: 343973 - DNA, 666 bp, Pseudomonas aeruginosa; identical to SEQ ID NO: 323670

SEQ ID NO: 343974 - DNA, 450 bp, Pseudomonas aeruginosa
atggaggagagcggtgcctggcttatcggaaactcagccatgatcgagcaggccctgtcgttcgacgatctgtgcgacctcctgggggtgaatcatgcccaccgtgccgaggctgccgaggtctgcgcgggcgacgccggaatcgttggcggcctgctctggattggtggggagttcgaggacagcgcggaccacaagagtggccgctccaaccgagggaacacggggccacttaccgcagcggtccagaacctgttccagaggttcctgcttgagaatccgtcggcaattcccgatccgttcgccccgggcgggcccttttacggagtcccgcggcaggagatggcgccgaacggcactgtgcagattcggcgaccggcactcaccgtccacagccaggacgggtcaatccgcacggttgagcgaaagccggaggtgattggtgagtag

SEQ ID NO: 343975 - DNA, 450 bp, Pseudomonas aeruginosa
gtgaatcatgcccaccgtgccgaggctgccgaggtctgcgcgggcgacgccggagtcgttggcggcctgctctggattggcggggagttcgaggacagcgcagatcacaagagcggccgctccaaccgagggaacacggggccccttaccgcagcggtccagaacatgttccagaagttcctgcttgagaatccgtcggcaatccccgatccgttcgccccgggcggccctttctacggcgccccgcggcaggagatggcgccagatggaacggtgcagattcgacgcccggcactcaccgtccacagccaggacggatcgatccgcacggtggagcgaaaggcggaggtggttggcggtgagttggttgcccgcgggcgccacgaagtgccgctacacctgatcgtagcgcgcaacgaagaggagatagggaatgggaagctcgactag

SEQ ID NO: 343976 - DNA, 222 bp, Pseudomonas aeruginosa
gtgctccgcaaggtcaagtggccggacaagctccgcaacctggagcttctgagccggcatgtcggcaccgagtctgccgcgctcgacttggagctcaagcgcctggatgtcgcgaagaagcgcgccgaactgaagctgctggagaaccctgaggacgaagcgccgccaaccagcgtcgcggtgaccatcatcgacgcgagggtgcgcgatgccgacgcttaa

SEQ ID NO: 343977 - DNA, 1338 bp, Pseudomonas aeruginosa
gtgctggcggcggtgcgcgcggccacctccgaggacttcatcgtcggcctgcgcctgtccgccgacgagcgcgaccccgagggtctcagcgaaagcgagtcgctgcaggcggccgaggcagtccagggcgagctggactacctgcacatcgtcgccggcacttcggcctccctcggcggcgccatccatatcgtcccgccgatggccatcgagccggcctacctggcccgcgaagccagtaccttcaaggcgcgcctggcgatcccgctgttcgtcaccgggcgcatcaaccagccccaggaggccgaggccatcctcgcccgaggccaggccgacgtctgcggcatgacccgcgcgctgatctgcgacccgcagatgccgaacaaggccgaggccgggcgcagcgacgacgtgcgcgcctgcatcgcctgcaaccaggcctgcatcggacatttccaccgaggctatccgatctcctgcatccagcacccggaaaccggccgcgagctgacctacgcaacgcccaatccgccctcgcggcgcaagcgcgtgctggtcgccggcggcggcccggcggggatgaaggcggcggcggtggcggcacagcgcggccacgaggtagtgctctgcgaggccggcgcccagctcggcggccaggtcaacctggcgcaactgctgccgcgccgcgcggaattcggcggcgcctccaccaacctgcaacgggagatgcaactggccggcgtcgaggtacgccgcaacacgccggtcgaccgcgcgctggtggagcgcgaacggccggacctggtgatcgtcgccaccggcgccgaaccctattggccgcctttcgagcgcggcggcgagctgcaggtggtggatgcctggcaggtgctgcgcggcgaggtgcgggtcggtcgctcggtgctggtcaccgactggcggggcgactggatcggccccggtatcgcggaaaagcttgtacgcgagggccaccaggtacgcctggcggtgaacggcacccactgcggcgagagcctgccgctgtacgtgcgcgaccagttggccggcgaactgcaccgcctgggtatcccggtcacgccctacgcccgcctgtacggctgcgacgataccacggtgtacatgcagcacagcgccagcggcgaggcgatgctgttcgaggaggtcgataccctggtgctatgccagggccaccagccggtggaccgcctggccgacagcctgcacggcctggcggaggtgttgcggatcggcgactgcctggccccccgcaccgccgaggaggcgatctacgaagggctcaaggccgcctggagcatctga

SEQ ID NO: 343978 - DNA, 588 bp, Pseudomonas aeruginosa
atggacaaaccggcctcgcggcatttcagcgtcttgatcatcgatgatgaaccccaggtgacctcggaactccgcgaactgctggaaaacagtggctaccgttgcgtaaccagcacccaccgggagtcggcgatcgccagcttccaggccgacccgaacatcggcctggtcatctgcgacctctacctgggccaggacaacggtatccgcctgatcgagagcctcaaggaagtcgccggcaacggcaggttcttcgaatcgatcatcctcaccggtcacgatggccgccaggaagtgatcgaggccatgcgggtcggcgccgccgactactaccagaaaccggtggcgccgcaggaactgctgcatggcctcgaacgcctggagaaccgcctgcacgagcgcgtccgcagccagttgagcctgagccacgtcaaccagcgcctggaatacctcgccgaatcgctgaactcgatctaccgcgacatccacaagatcaagtacgaggtacacggcaacagccagccgagtgccctcaagagcgaagacagccagccgtccgcgccgccggcgtcggtcgcggaaagctag

SEQ ID NO: 343979 - DNA, 303 bp, Pseudomonas aeruginosa
atgatcattacattgtcaccgtatgctccgctgcctggtagcgatgagcacctcgcgctggccagagctggcgatacgctcactgtgaacgggcagttattcgatttcaccccgcttccacatggaggtgagctgccgtccgaggctattggttcggagtggttcgtcggttctgttgtgcgccgcgccgggcgcctcgaattggctctacgcttcccgctggccgagaacgccagttcagccgcccgctttcctgaaccgatgtttatcgaggccgacggtccggtggagttgccgagatga

SEQ ID NO: 343980 - DNA, 1218 bp, Pseudomonas aeruginosa
atgaagcttgagtatttagcaattatttcttcagataattcattctgccagaatagctcagccttcaaaaacttacttcaatctgattcggaaataaaaatacaaggaaaaaaaataaagcataaatcctttgaggtggattacgagttacaagagggttttaatgaagagaaaaaacatagattctttcatcttcgcctgaaaactgattcggactcggttgacgacttctctaaaatgggaagagctataaagaagatgctaaacatgccatccgaaattaatattcaaaccctttgggatgacgtaagctttcattattcaaaaaacagctatccacttattcatgagatagagaatctcatgagaaaattgattaccaaatttatgctaaccaatgttggattaggttggtcaaaagatactatcccggaggaaataaagaaaagctctagagcaggctccgctgatggaaataataattatctttatgaggttgacttcatacagctatctgactttctctttaatgagtacagaaccttagatctaaatacccttgcaaaaaaaatatccgaaataaaaacagatagtgtcaatgtcgaggagatatcggaatttattccaaagtcaaactggaaaagatattttgaaccttacgtggattgtgatgcaaactatttgcagagtcgatggcaaagattatatgagatgagatgcaaaattgctcataataactcatttaataagtctgattacttgcagactttacgagtggcagaggaagtaaaagagaaactagagaaagccattgagtcacttgatgctatctccgttccggaggatgacagggaggaactcgctgaaagcgtggtaagtcacattagtttaggaacagcaaactttgtgcagaaatggaaaatggttgagcgtcttgctatagaaatacatgagaagtatagtattgacatgcctaaaagccccgcgaaaaagggcgtaaatacgtatcagctcttcagcgagttagcgaggaaaaatataataagttcagcagtctatctaaaaataaaggagatgcagaagtttagaaacataatggttcatgagatgactaatccgttttccgtatttgaaataactttgctctcaaagagaatcgacgagataatagaagatttgcatagaattttaaattcacccaaagtggagatggggtag

SEQ ID NO: 343981 - DNA, 519 bp, Pseudomonas aeruginosa
atgaggaagtacgaaacggagttcaagctggaagtggtcctgagcttcttggcaggcgaaggcggcgcgaagctcttggctcggcggtggtcgattcccgaggagaaggtccgcacctgggtgagccactaccgtctgcacggcatcgacggcttgcgccccaagcgcagcgcgtacagtgcgcggttcaagctgcaggtgctggctcatcaggatcgcgaacagctttccagccgccaggtcgcggcgatctatgacatccgcaatcccaatcaggtcgtggtctggcgacgcaatctcgatcaaggccgcctgcaggcgcgcgcgagcgggaaagaagagcagcccaagatgaagccagaacgacgctctgcaacaccgtcaagcacggtcgttgccgatgcgcagaagaccctgcgggaagagaacgagcgactgcgcgcggaggtcgcgtacctaaaaaaattgcaggccttgatccagtcgaagaggtcagctgcgccgacaaagcgcgtctga

SEQ ID NO: 343982 - DNA, 831 bp, Pseudomonas aeruginosa
ttgaggcatgaccataaactggcggacctgctgcaggtagcgggcctggcgcgcagcacgttctactaccagtgccaggcaacccagcgcgccgacccgcacagcactatggaggcgagcatccgcactgtctatgacgagcacaagggccgctatggataccggcggatcacggccgcgctgtgcaattcaatgggagagccggtcaaccacaagtgcgtgcagcgtctgatgcagaagatggggctgcgcgcgttgattcgggtgaagaagcgctcccggcatgtcccaggcacgagcgatgcacacgttcccaacgttctgcagcgcgacttctgtgcgaccgctccgagccagaagtgggcgaccgacgtcaccgagttcaacgtgggcggccacaagctctacctgtcggcctgcatggacctgtacaacggcgagatcgtcgcgtaccgcatggcaaggcgcccggtcttcgagatggtttccagcatgcttgacgccgcgctctcgcagaccagttgcgcggccgacctgatcgtgcactccgatcaaggctggcactacaagatgcagccctaccgagcgatgctcgcgcgacgcggagccaggcaaagcatgagtcgcaaaggcaactgcttcgacaacgcggcgattgaaagcttcttcggcaccctgaaggccgagtatttccatcttgaaaggcccgacagcattgatgcactcgaagcgggcgtgcatgattacgtccactactacaaccacgagcgcatcaagctcgggctgctgggactcagtccggtggagtaccgattgagaagcaccgcctga

SEQ ID NO: 343983 - DNA, 324 bp, Pseudomonas aeruginosa
atgagcagagcaagcaagttctccccggaagtccgggaacggtcggtgaagatggtgctggagcaccaagacgagtacgagtcgcagtgggcggcgatcgtgtcggtggcggccaaggttggctgcacggccgagacgctgcgaggctggcttcgccagcacgagcgcgacacgggcaagcgtgacggcgtaacgacggccgagaaggagcgcatcagggcgctcgaacgcgaggtgcgcgagctgcgccaggccaacgagatcctacgcaaggcgtcggcgtattttgcccaggcggagctcgaccgccccttcaaacgatga

SEQ ID NO: 343984 - DNA, 906 bp, Pseudomonas aeruginosa
atgaagcgattcgtcgatgagcagcgagacgttcacggggtcgagccgatctgcaaggtgctgcagatcgccccgtcgacgtactacgcgcatgcggccaggcaggccgatccggagctgcgatcgcagcgggtgaagaccgacgagatactgatacccgaggtgcagcgcgtgtgggacgacaactaccaggtctacggggtacgcaaggtctggcggcagctgcggcgcgagcgagtcgacgttgcgcgctgtaccgtgcagcggctgatgaagcggcttgggctgaggggcgttgttcgaggcaaggccgtgcgcacgacggtgagcgatccgaaggcgccgtgcccgctcgatcacgtgaagcggcaattcaaggccgatcggccgaacgcgctgtgggtcagcgacttcacgtacgtctcgacttggcaaggatgggtctacgtcgctttcgtcatcgacgtgttcgcccgtcgcatcgtgggctggaaggcctcctgctcgatgcagacggacttcgtgctcgacgcgctcgagcaggcgttgtacgcgaggaagccggtcggcccggatcgcctgatccaccacagcgaccgaggcgtccagtacgtgtcgatccgatacaccgagcggctggccgaggcgggcctggagccctctgtgggcagcgtgggcgactcgttcgacaacgcactggccgagaccatcaacggcctctacaaggccgaggtgatccatcggaagtcatcctggcgcacgcgcgacgaagtcgagtgggccacgctccattgggtcgactggttcaacaaccgccgattgcttgaaccgatcggtaatatcccgccggccgaagccgaagccaactactattcgcaacccaacgagtccgtcatgtcggcgtga

SEQ ID NO: 343985 - DNA, 1050 bp, Pseudomonas aeruginosa
atgatcgaagacggctaccgcccgaccacgagcggcagcatgacctcggctgcgatggcgttcatgcgcgatcacggggtgttgaaggacatctactccgagagcaccggcacggcgcacaagacggccaagggcaccaaggtatcggtgcgcacggtcaaggccccggggtttggccccaagggcgtgctgcgctgcatcctgccgttcacgatctttctcaagctcaaggacatcggtggcaacgtcctgccgccgtatgacgaggagttccgtgaagtcgcgatggacacggcgcaagccgcggcctaccgcgatctggcgggtcggctgaccgcggagctgaaacaggctctggcgcgacgcgatacgaccttgctgggtgtggtcctcaacgtgctgctggcctggccggattgctgcttccggtcggagaccgtggtgcatccgcgcacgcgcaacaccttggcgtttgtcccggctcagttcaacgagttcgagatcagccccaaggagcgtgagctgatcgacatctgcaaagcggagaaggcgcagggccgcaaggttctggcctacacggtctataccggcacgcgggacaccacgtcgcgcctgaaggtgctgctggagcaagaaggcttcaaggtggcggtgctgcgcgcaagcgtggatgccagccgccgcgaagactggatcgctgagcaactggatcgtggcatcgacgtgctcatcaccaatcccgagctggtcaagacgggattggacttgctggagtttccgacgatcgtgttcatgcagtcgggctacaacgtgtactcgctccagcaggcggcacgccgctcctggcgcatcgggcagaagttgccggtgcgcgtgatctacctcggctacgccggttcttcgcagatgacctgcctggaactgatggccaagaagatcatggtctcgcagtccacctcgggcgacgtgcccgaatcggggctggatgtcctgaaccaggatggtgattccgtcgaggtcgcactggcccggcaactggtcgccgcctga

SEQ ID NO: 343986 - DNA, 1203 bp, Pseudomonas aeruginosa
atgccagagccagccaccgcagagcgcgacaacgccgggcgcgtttttctggtctttctgcggctggggctgacctccttcggcgggccaatcgcgcacttgggctacttccgcacggagttcgtcgagcgtcgccgctggctggacgatcgcagctacgccgatctggtcgcgctgtgccagttcctgccggggccggccagcagccaggtcggcatggcgcttggcttgggccgtgctggtgggtggggcgcactggcggcttgggtcggattcacgttgccctcagcgctcgtactgatcctgttcgcctacggcatttccgaataccacccgctcgctgaagccggttgggtgcatggcttgaaagtggttgccgtcgccgtggtggcgcaagcggtgtggggcatggcgaaaacgctgtgccccgaccggccccgcgccgcgctagcgatcctggccgcgttgctgacactattgctgccgtcggcctgggtgcaagtcgcggccatcgtcatgacgggcctgatcggtcgctggtggctgcaactgccgccgctgccggcagcgcatctggcctcgtatgcggtgtcgcgccgtactggcgcgatagcgttgggcttgctggccgcgttgctgctcggtctgccgttgtgggcggcggccagcggctcgacgatggctgcgctgatcgacggcttcttccgcgccggcgcactggtgttcggtggcggccatgtcgtgttgccgctgctgcaagcagtcaccggctcgaccggcgcggtcggcaatgccgatttcctggccggctacggtgcggcgcaggccgtaccggggccgctgttcaccttcgcggcctatctcggcactgtggccgactggcccttgcacggctggcttggcgggctggtgctgctgatcgtgatcttcgtgccagccttcctcgtgctgatcggcacgctaccgttctggcagcggttgcgccaccggccgagcatccaggctgcaatggcgggcattaacgcaggggtggtcggcatcctgctgtccgcgctctacgaccccgtatggacaagcgccatccacggacgcaccgatttcgctctggccttggccgccttcggcctgctggtctatggacgcttgccgccggtgctggtggttgtgctggccgccatagcggggcaaatcctgtctgcctga

SEQ ID NO: 343987 - DNA, 423 bp, Pseudomonas aeruginosa
atgagcaacatcacgatctatcacaacccgaactgcggcacctcgcgcaatgtgctggccctgatccgcaacagcggcgaggaacccacggtcattgagtacctgaagacgccaccgacgcgggaaacgctggtcaagctgctggcggacgtgggcctgagcgcgcgcgaggtgctgcgcgagaaaggcacgccctatgcggagttgggcttggccaacccaaaatggacggatgatcagttgctcgatgccatcgggcaacatccgatcctgatgaaccggcccatcgtggtcacgccgctgggcacgaagctgtgccgcccctcggaaaccgtgctggacattctgccgaatccgcagcgcggcgcgttcaacaaggaagacggcgaggcggtagtggatgcaaaggggcagcgtgtctga

SEQ ID NO: 343988 - DNA, 1077 bp, Pseudomonas aeruginosa
atgaccgccagtgcatccgccagccgcgcaccgactgtttccgccatgagcgtgttcgagcgatacctgaccgtgtgggtgctgctgtgcatcgtcgccggcatcgcgctcggccagttcgcgcccggcatgtttcaggccatcggccgcatagaagtcgcccaagtcaatctgccggtcggcgtgctgatctgggtcatggtgatcccaatgctgctcaaggtggatttcggtgcgctcggccaggtcaaacagcactggcgcggcatcggtgtgacgttattcgtcaactgggcagtcaagccgttctcaatggcactgctggcgtggatcttcattcggcacgtcttcgccgagtggctgccggccgaccaactcgacagctacgtggccggcctgatcctgctggccgccgcgccctgcacggcgatggtgttcgtctggagccggctgaccggcggcgaccccgtattcacgctctcgcaagtcgcactcaacgacaccatcatggtgttcgccttcgcgcccatcgttggcctgctgctcggcctgtcggccatcagcgtaccgtgggacacgctactgatctcggtggcgctttacatcgtcatcccggtcatcgtcgcgcagctctggcggcgggcgctgctgcgccggggccaggccgcatttgaccgcgcccttgaacgcatcggcccgctgtccatcgccgcgctgctgctgacgctggtgctgctgttcgccttccagggccaagccatcctgcaacaaccactgatcattgccatgctggcggtgccgatcctgatccaggtgttcttcaattccggcttggcctattggctcaaccgcaagacaggcgagcaacactgcgtcgccggcccgtcggccctgatcggcgcgagcaacttcttcgagttggccgtggccgcggccatcagcctgttcggtttccattccggcgcggcgctggccaccgtggtgggtgtgctgatcgaggtgccggtgatgctgctggtggtgcgcgtggtcaaccgctcgcgccgctggtacgagcgcggccacgcaacgaactga

SEQ ID NO: 343989 - DNA, 774 bp, Pseudomonas aeruginosa
  misc_feature (272)..(272): n is a, c, g, or t
atggtcgatcgcagcgccgagccttggtatccgactgccgcgtacctgtacgcgctgcatttggacgacctcgcgctcgcctgggaatacctgcgcaggcatcccgactaccggctcgactggctgcgccgtcatcgccggccgcaggcggcacaggacgcggcgcatcgctggggcttgcgccttctggaagacccggtgctggatgtgcgcgacgcgcatccagcctggctgcccggccacgctgccgtggtgcagctctatcccgacgncgacccgccgctcgatgcggcggtctttgcgttctggcacatccctgggcacaagcaactgctgcatgacggcaaagggctggcgctgatcgcgcgcagccctggccgatgcgtgcgcttcgtgctggcgcccggcctggaggacggcatggctgtcgcctatgcccaccgcggcggcgctgccgcgccggtgcatgggcatctgcccagctccgacatggccgatacgaagccccggccgacactcgccgcgctgctggaactgcacaccttgcaggcgctcgacgcagccctggcgggcgcgtccttgcgcgaaatcgccgaagggctgttcggcgccgatgccgtggcggccgactggcacgccgacggtgatctgcgcgcccgcgtgcgccgtctggtacggcgcggcgatgcgctgatgcgcggcggctatcgccgcctagcacagcttgcgccgcttgagaagggacgttttgcagccgacgcaaaacgtccctga

SEQ ID NO: 343990 - DNA, 600 bp, Pseudomonas aeruginosa
atgaccgccgtttccactggcggcactgcgccgcgtcctcgctcgcacacccgctcacgcttgcgcgctcgcatcgtgctcgcgggcctcgccgcctgcggcctcgctgcgctggcctgggcgtccttcgttcatccgctgccgcgcctgatctacaacccgtccgacagcgtggcggtcggctggtatcgcatcgacccgttcgacccacgcaccgcctcgctgccacgtcccttgtccgtggacagcatcgtgctggtgccgctgccgaccacggccgccgcactcgctgcgcagcgcggctatctgccggtgcgcgtgccgctgctcaaacgtgtaggcgcagtcgcgccgcagcacgtttgcgttttcgatgcgctggtgtggatcgacggcgtgccggtggctgccgttcggcccgccgaccggctgggccgcccgctgccatcctggccgcagtgccggcagcttcggcctggcgaactgttccttctcagtgtgaccaatccggcgtcgttcgacagccggtatttcgggccggtcagcgcatctgccgtgatcggcgtcgcgcgcccgatctggctggaggcccacccatga

SEQ ID NO: 343991 - DNA, 633 bp, Pseudomonas aeruginosa
atgcgttgccagacagattccgtacaacccgccgactcgcctgccgaatggccttttcataccgtctatctttgggacgcacaaacaagactcgctccgttgctacttctggtaggggcgttcggctcatggctgacggtggacatgcttcggtggcagacgtttcaccgtagcctggatgtagcgttgccttggcttgccctgtttcatgtgctatggccactgttcgggccgcgcggtgcagccgtgcgagcgcagttgggcgcaagctggaattggcacagttccctggcgccttggtcattaagaatgctcggcccaggtcatcaaggattagccatcagagcactggtgctattgcttgcgctaggaatggccttttccgccatgttctcccgcacgtggcaccaaggactggcctccgtcttggtgctggccgtcgttttgcagatgttgggccaactatgggtgcattggcgtgcaggtgacgcactgctgccagcactgctacatggcatgggcccaagtcgcctcaatgaagccttgccaaaacacgcacgtggcatggcactgattctgacaatggtgattccggtctgctggggatggcaagaggtacgcattgaaccttaa

SEQ ID NO: 343992 - DNA, 864 bp, Pseudomonas aeruginosa
atgaaaaacgagaataaggtgctggcttgcgtcgatcaatcacgatacgcggttcatgtggcccactgcgcggcctgggcggcccaccgcatggatgcaccgctggagttcctacacgtgatcgacagccatcccgagcggggaccgggcgacgaccacagcggtgccatcggcgtcgacgctcaggaaagcctgttggcacaactgtcagccgaggacgaagcacgcgccaagagcgcgagagagcaaggccggctgttcctgaaccaactgcgcgaacgcgcattggcggcgggtgcggcgcgcgtcgatgtgcggcagcgtcacggcgcactggaagacacagtggtggaacaggcgcaaggcgtgcgtctgttagtgctgggccgacgaggtgcaggggccgaagtggcgcgacgtgagctgggccatcatgtcgagcatctggttcgcgctctgaatcgccccatcctgaccgtgaccgaagacttcaaggcgccccaacgggtgatgatcgccttcgatggcggcaccgtcacacggcgcggcgttgaaatggtggcgggcagcccgctgtttcgcggattgcccatcctattgctgatgtccggcaagcaaagcagagacgcacccaaatcgcttgattgggccagggacaccctgaaagcagcaggcttcgaggtgacggtttcactggttcccggagatgccgaaacagtgattgcaacggcagtgaaagaacagtccattgacatgctcatcatgggcgcatttggtcattcaccactgcgcggcctgctatttggaagcaagacgacggacttattgcgctcgtcacgcattccaacgctcttactgcggtag

SEQ ID NO: 343993 - DNA, 429 bp, Pseudomonas aeruginosa
atgcgaccggtgagaggcgcgccgcgacaattcgggaagggcaccggcatagtcggctacaacgtgcagacgacggtcgatacccggcatcacctgatcgttgcgcacgaagtcaccaacgtcggccatgaccgtgcagcgctcgccacgatggccgagcaggctcgcgaagccaccggatctgaacgccttagcatcgttgccgaccgaggctacttcagcggggtggaaatcctggcgtgcgagcaggcgggcattacccccttcgtgcccaagccgatgacctccagcagcaaggcggaagggcgttttggtaagcaggacttcgtctacatagccgctgatgatgagtaccaatgtcctgctggacagcgtgcaatcaagcgcttctcgacggtggaagatggcctcgagctggatgcttactag

SEQ ID NO: 343994 - DNA, 273 bp, Pseudomonas aeruginosa
atgcagcaacggcttgatcgcgaaccagagatgatgagcgtgcgccgacagaccgtggagcacccgcttggcacgctcaaacattggatgggcgcgacacacttcctgacccgaacgctgccccgagtcagcacggaaatgagcctgcatgtgctggcctacaacctcaaacggctggtgaacatcttcggcgttgccggtgcgatagaggcactgcggggcctgaggcctgccattttcctgcggctctccaccacaaactgccgtagatag

SEQ ID NO: 343995 - DNA, 609 bp, Pseudomonas aeruginosa
atgcccgctgcgacaggcagcggcctgcgtgcaacgagtcgcccgagccggcgcaggagcgtcctgaacctgtcgcgacctgcgcattcatcgaggaggagcgccggcgtggcgatcccacgggcttgctttacgcccttgggccgcgggagcggggagagccggagcgggtggcggagtggttggcggcgctggtccaccatttctacctggacggtcccgttgagccgccgaggccaacgctgggaaaggcgcgctgcgaaaccgcgccgggcctttgccgctgctgcggccaacccttcgattttcgccacaagcgcgcggcgctgttgctgctgggaacccatttcgccgccagggcggaggcgcaggcggcgtcggtgcgccgctaccggcgctgaggaatgctcgccgccgtcagcggcgggcgctgagatgggtgacgttgtcgccctggcgctcggcggtgaccttgcggcagtgcaccagggcgtcgcggatcatgaagttgaccagggtcggcgagacgcccagttccttggcgatgtccttctgcggcacgccgtgcaggcggtacatctcgaaggcgtagcgggtgcgcttgggtag

SEQ ID NO: 343996 - DNA, 471 bp, Pseudomonas aeruginosa
atgaatctagaccaacagaatgaagtgtctgtcgttcagctaatgagagcgatctgtttgcggagcccacgagaggttcctgaagatgccctagccgatttcgcaaagcaggtttggtatggagagctgaatctagtcgttctgcttggggagtacctggtgcgatcggacatggccgacgagcaacggcgaaggctgctctacgttatagatcggctgatttgttacccctgcatactgcgctcgaaggcaacccagcttcggacgattctgaaggaatgggctgagctgaagcccacacaaccaaccaccaacgctatcgaactcgctgcccggcacatgctggataagaaggccttcgagtgggggctagaggaggacattacaccgcagatgaaatctgtgctgcagtatcagacgcgtcactatgcagcatctttagggcgcaaaacgggatactccgagagttag

SEQ ID NO: 343997 - DNA, 966 bp, Pseudomonas aeruginosa
atggcagctagctttcgaaagattgattactctcttcgccccgcaaaatatgcagagagaaaaatgctcgttgatgtttttcgacgcctaacgccctttcaaccagttgaagattacaattatgttggctttggatctgtctggttttccgatttcatattgtttcataaaacacttggcatcaaaaacatggtttcaatagaggagtcggaaggcgcgcgcgcaaggttcgaagaaaatcgaccttttcagattaagatggagttttcaagttcatcagaagctttgccgaagcttgactggactcagcgcacgattgcctggctagattacgacgacactctcgttacatcaatgctgcaagatgtccggtctgtagcctctcgggctgtgtctggctctgttttggcggtgtctgtgcaatgcatgaaagccaaggcactcattgaataccatgaagaaaatgacccttcaaaagcgagcgccattgaaagattccgtcaaacatttggtagagagcgtgtgccagatgaagcccgagatgaagacctcgctggctggccttatggtgcactatgcaggaagattctaacaactgaaattgaactagctctatcggatagaaacacaacaccagaaacagccatgcgatttattcctatatgtgaaattgagtatcaggacgatgcacgcatgaccactatagttggaatatttgtttctccggaagagatggagcgctatgaatcatgctcatttaacaagctagatttcatacctcttaacaataaagctattcgtatagaaatgcctaagctgacagttagagagcttcgcaagattgagcaacagttaccgagtgctgaaggcatagagctttctctcggctctataccgcgatcagacgcggaaaaattttgcaaaatgtatcgatatttcccaaactttgcagttatggaggcctag

SEQ ID NO: 343998 - DNA, 1125 bp, Pseudomonas aeruginosa
atggaaaatcatcttcgtaaatgcttgaaacatgcacgcgagtcgaacttcatcagcgtgcctcaggccgcctactgggcgggagtgaaagaccgcacctggagagcgtatgaatcggcctttgactcatcatcaaggaatccaacgcgcaggtctctttggtgcttctttcaccgttcaggcatagctatcccgcctgaactgaaagattacatttttgaatctgagtctgggcaggcactatccataacagcctacaaaggtggcgtaggaaagtccccgatcactgtggatgtagcctcctgcttggtacagcgcggttttaaggtggccattgtgaccaacgatattgtttatacgtgcaaagttgagaaaggggataccccagaacctggttccttggtaagcaaaattagcttttatgatgaactagacattctcttctccaagtctgaaatcagaaaactagagaacgaattaaaccgcaatagagcgcacaaaccaatatcaaccatagacctcagaccactgatccatagcgaactatccgaaaggcttgagcgaaagagaaatgcaaagaaaacctacgagcaactgaaaaaaacctatgactacgttcttttcgatatgaaccgtagcctagaaaaagtacgcgacctcgtcgatctcatggtgttagttctagacagcaattgccagcagtctattgatagcgcagaaaactttattactcacttcaagcgcctactcaagaaaaagaaaaatccaatgctatttggacttattacaagatgcgatgtgggaggcagaagcatagaactagaagaatacgttggcgactatgttgaaatcagcgaagagatcgcaatggagctggatcaatccaaagccgacgagaaggaaaagcgtgaaagcatactgcttaatatcaccaagctaggcattccacttctaaagtccaagttcacatcggcgcatgagacagtaactcacgagtacaatcgcaatcgcagcctatggaccggatttagctacttccactctgtcttggatgtagctcccaactcttacgcggcagccgaggttaaccagttcgtagacgagctttttgagctaagaatgtga

SEQ ID NO: 343999 - DNA, 1128 bp, Pseudomonas aeruginosa
atgctgttctcgtatacctatgtgccgcaccagatggagaggatgcaggaattcattgacttcatttttcatgaggtttggtgcaaagcgccggtaagcggccccttcgggctacagctgttcgacgccaacgcagagttacgcgaagtgatggaggcgttctattactccgatgcgcaaggtgccgatttcttctacggacatgtggagcgaatctacggcctgttctcgacaatgactgtcgtacagatcaatcagtttcagcagtggtatcagggcaataacgatctggaaaaggtctgcgccaatgatcccgcaacgcacctcgcccgttacgccgacatcgccgtcaatcacaaaaaccttgctgctcaactcggcaccttcttcaaggggttgtattcgccatccctgttgggcctcgctgcgcttcgcaccaagattggtgacatcgacgatcactatcaggcatttgttgccgcgaacacggtgggcaaatgccctttctgtggcatcggagatatcaagggcgagcatcacagtaaacgcgaggcctacgaccactatctgccgaaagcgctatatccattcaattccataaattttcgtaatctcgcgcccgcctgccacgagtgcaacagcacctacaagctgagcaaagaccctgcacacaatgcagctggacgacgcaaggctttctatccgtatgccgctgtcagccatatcgttgaattgcaggttgctttgctgcatgcagatctcgataaattggggcctgccgacatcacaattcaactcggccctgcggcattggctgaagaactcgacacatggaaggacgcatacgggattgaagagcgctacaaagccaagttctgtgcggagaatgacggcaaatactggctgacgcaggtactggatgagtggaaagaggacggtcgagacccagccgacttcatgaccacgctagcgcgacaggtgcagaagaacccgtacggtggttgcaacttcctcaaaaagccgtttctcgatgcttgccagcagattggtgcttttgagggaggtagacagccgacaagtcggttgcgggcctttggagacttaggtttggatcagcttcccaggtag

SEQ ID NO: 344000 - DNA, 1839 bp, Pseudomonas aeruginosa
atgaagctgctacgactcaagatcaccgacccggacggctttcgcagcctaccctgtggttttgagcatcacttccgcaccgagtggagcctgcaggaagaattggcccagcccgaaggttttgcacccttcgtgtgcgccggccccaacggcagcggtaagtccaacctgctcgaagcgttggcagcgatcttctttcagctggaggtgcagcgcgtacgccgcaatttcttgcccgacatctttcagtatgaccctgatgacaatccggacggcatacaagagcacgaaggctatcccaatgcctatgaactggaatacctgatcaagttaccgaaggagcgccgttctcccggtagtccggagttcgcacacgtggtcgtgattaaggagagggacaagtcgccgtggctgcgctggcagaacaacgaagcgttccctgtcgagggctttgctttcagccgattgagcgacgaagagcgtgacttgctattgccgcaatacgtgctgggctactcctccggcgagaatgagattctcagcctgccgttcttcaagatgcgtttcatccagttcgatgagtactggaatgctctggcccgacagctcccttatcccggccatcccgaaacgcggctagcctatctggacagtggcttcagccaagctattctgttgtgcaatcttctgctccaggatgaagccactctccagcccttccgcgaggatgtgggcatagaggcgctgcgcgagttccgcattgtcctgcgccgcagcatcccgaccacaagccagcaaattgctgcctttacttcgggtgagtacgccttgcctaccgaaacgcaggatggtcgttttacagataccaatgtggtttatcttgatccggagaccggagattaccgactcaacctgcttcaaggactagaggccaatggcgatgagcgtactgaacgcacggccattgtcgaaaagctcaagcgctgtgccacgttgcatttctacgatgaggcttccgacacgctgatcctggattaccggatcaatgaagcgaccaagcaagccttccgtgccaatttcgatgatccggcaggccctgcacttgctttgttccaggccttgcaggttctgctgacgctcaacttgtatagcgtcagcgacaccatcaagaccgacctgtaccgctccaccagccactacgtcagtgagacggtaccgacgctggcttccgaccagcgcatcatgcgcttcaagaatttttacttcacaaagcagggcgtaaaaaagccgatgctgctcaaagatctgtcggacggagagtatcagatgctgcacagcctcgggctgtgcctgctgtttcgcaagaccaatagcctgttcctgctcgacgagccagaaacccacttcaacccgcactggcgcgccaacttcattacccgcctgcgtcaatgcttgcccgatgtggaggacgcgggacaagaaatgctggtcaccacccacacgcctttcctgatctccgacagcaagccggacaaagtgttggtgttcgccaaggataaagccagcggcgaggtcagcatcagaaagccgaattacaacacgctgggtgcctcgatcaacaagatcaccatgaacaccttcggcaagcgcgaaaccatcggcggtcacgcgcaggctttgttggaggcgttgcgtgctcgctttgagcagggcggcgaagacagggagtcgttgatcacggagattcaccagcaactcggcgattcggtggagaaggtactgctgatcaaggccattctcgatggcgatcagtcaggcaatggggaggagcagggctga

SEQ ID NO: 344001 - DNA, 1626 bp, Pseudomonas aeruginosa
atgacgcctctcttgcttggtagcttattcgaactcaagtatgggaaatctctccgcaaagacacgcgaaacgaaggaagcattcccgtctttggatcgaatggtcaggttgacgtccatagtgagagcttagtaaatcatccgactattgttgttggtcgaaaaggctcgattggggaagttcatctcgtcaagacgccttgctggcccatcgacacaacatactttgtctcacctcgtgacgagcacgagtttgaccttgattggttgtatcgcctcttgcgcaccttgcatcttcaagacctgaatcgatcagcggctattccaggacttaacagagatgatgtctatcgtatacggatcctcttgccccctattgaagaccaaatccgcattgcccatctgctcggcaaggtggaagggctgatcacccagcgcaaacaacacctgcaacaactcgacgacctgctcaagagcgtgtttctggagatgtttggcgatccggtgcgaaatgagaaggggtggggcaagaaacagttttcagaactgctcgacgacattgaaagtgggaaaagccccaagtgtgaggctagagaggccgctgcagacgaatggggggtgcttaagctaggcgctgtaacgcgctgcagatttgatgagaacgaaaacaaagcgctgccacaggatgttcttccatcagtgcgcgacgaggtcaaagcaggagatttgctgttcagcaggaaaaatacctatgacttggtggcggcatgtgcctatgtatttaaagctcggccaaagctcctaatgcctgacctgatcttccgctttgtttttaagaagaacgcggagataaatccaattttcatatggaagctcctcatttgtgattcgcagcggaagagaatccagtcgttggccgcgggggctgctggttctatgccgaacatttcgaaggcgaaccttaagacagtcctcctaccaattccaccgtggccgttgcaaaatcaattcgccaccattgtcgaaaaagtcgaaggcattaaatctcactaccaacaaagcctcactgatctggaagccctctacggcgcactaagtcagcaggctttcaagggagaattggatctgtcgcgcgtgcttctccccgctcagtctatcgctcccgttgctattggagatcaagccaccgtgcctgaacctgttgtgcaaaccgtgactacgattcatttgcccgataccggaaacctgccggctgcgttggaagattccgaggcgcgtaaagcattgatcgcagaatggctggaagcctatcgccaacaactgggagatgcaccattttcggtgcaagattttatggtggcagcgagtgatcgattcacagaatggctgcagactgtggtggaagacgaaggtgtcactgatgagcagaagaaccgcttagccgagttctacccgagcaatgacgttgggcttgatgtaaacgactatgaacacatcaaaaaatgggtgttcgaggcgctggtcgccaaccggcttactcagtcaagaaatgtcactggttacgatgagcaaagtggcgagcccatcttcggaaatttgattgagctaagggccagccagacatga

SEQ ID NO: 344002 - DNA, 1668 bp, Pseudomonas aeruginosa
atgcttcaaaacaatcccgaactcaaaagcaagatcgaccagctctggaacaagttctggagcggcggcatcagcaacccgctcaccgccatcgagcagatcacctacctgctgttcatgaaacggctggatgaacttgatcagaagcgccaggccgacgcacgagatggctggagcgatccgtaccaatccaagtttgaaggcacctggattccacccgaggaacgcaactggcctgtggcggaacagcgtcccatcgacaaacgcacgctgcgctggagtgagttcaagcacatgcaggccgaagagatgctgcaacatgtgcagggcaaggtattccccttcctgaaagacctgaacggtgccgaatccaatttcacccaccacatgaagaacgccgtgttcatcatccccaagccagccctgctggtggaagcggtgaagactatcgacgaaattttcgaggtgatggagaaggactcacgggaaaatggtcaggcctttcaggacatccagggcgatgtctatgaaatgctgctggccgagatcgccaccgctggcaagaatggccagttccgtaccccgcgccacatcatcaagctgatggccgaactggtgcagccacagctaggctacaagatagccgaccctgcctgcggcactggcggcttcctgctgggcgcctaccagtacatcgtcacccagttggccatcaaggcaggcaccaagaaccttgagcccgatgaagacggctttgtccgtacctcggtcgctgccgcactgaccgaaaaggctcagatcatcctgcaggaaagcctgtatggctatgacatcgacgccaccatggtgcgcctgggcctgatgaatttgatgatgcacggcatcgacgagcctcacatcgactatcaggacaccctgagcaagggctacaacgaagaagccgaatacgacatcgtgctggccaatccaccctttaccggcagcatcgacaagggcgacatcaatgaaaacctgcagctctctaccaccaagaccgaactgctgtttgtcgagaacatctatcgcctgctcaagaagggcggcactgcctgcgtgatcgtaccgcagggcgtgctgttcggctctggcggggcattcaaaacgctgcgccagatgctggtggagcgttgcgacctcaaggccgtgatcaccctgcccagtggggtgttcaagccctatgcaggggtcagcaccgccatcttgttgttcaccaaggtttgggggtcgaaagacaaggtgagcaaacccgccaccgaacacgtctggttttatgagatggccgccgatggctattcgctggacgacaaacgcagcaagcaggaaagccatggcgacctgcaagacatcatcgccagatatcacgcccgcgatgcctccactgacaccgaccgaaccgccaagtgcttcatggtgccgcgcagcgagattgccgacgagaagaacaactacgacctctcgctctcacgctacaagcaggatgtagtcgaagaagtgcactacgacgcgccgggcgtgattctggatcggctgattcaggccgaggtgggcgatgtggatgaagcggatcttgccaatgtgcgaagcggcatcgtgcgcgagctgctggagttgaaggggatggtgggatga

SEQ ID NO: 344003 - DNA, 2799 bp, Pseudomonas aeruginosa
atgtataaatccgaggcacagacacgagccgacttgattgaccagcaactcgcgttatcaggctggaacgtcaaagaccccacccaggttgtcgaggaattcgacatcctcaccgccttgcgagtgggcgtggccgagccgcgcacgccctacgagggccaccagttcagcgactacgtcctgctcggcaaagaccgcaaacccctggcagtgatcgaggccaagaagaccagccgcgatgccgccattggccgcgagcaggccaagcaatactgctacaacatccagaagcagctgggtggtgagctgccattctgcttctacaccaacggccacgagctctatttctgggatatggagaacgcgccgccgcgcaaggtggttggctttcccacccgcgacgatctcgaacgcttcgcctacatccgtcgcaatcgcaagccgctgacgcaggaattcatcaacacttcgattgccgggcgtgattaccagattcgcgcgatacgctcggtgctcgaaggcatcgaacaaaagaagcgcgatttcttgctagtgatggctaccggtaccggcaagacccgcacctgcatcgccatggtcgatgccttgatgcgggctggccatgcagaaaaagtgctgttcctcgtggaccgtatcgcgttgcgtgaacaggcactggccgccttcaaggagcacatgcccaacgagccgcgctggcccaatgtgggtgaaaagctgatcgcgacggatcgccgtgtgtatgtcgccacctacccgacgatgctcaacatcatccgggacggggcacagcacctgtcgccgcacttcttcgatttcatcgtcgtcgatgaaagccatcgctccatctacaacacctttggcgaagtgctggactatttcaagaccatcacgctgggcctcacggccacgccgaccgacatcatcgaccacaacaccttccagctttttcattgcgaagatggcattcccacgtttgcctacacctatgaagaagccgtgaacaacgtgccgccctacctctgcaacttccaggtcatgaagattcagaccaagttccagatggagggcatcagcaagcgcaccatttcgctggaagaccagaagaagctgatcctccagggcaaggaagttgaagacatcaacttcgagggcactcagcttgaaaagcaggtgatcaacaagggcaccaacaccctgatcgtccgcgaattcatggaggaggccatcaaggacgctaacggcgtgctgccaggcaagaccatcttcttttgcgccaccaaggcccatgcccggcgcatggaagaaatcttcgacaagctttacccccagtaccacggtgagcttgcaaaggtgctggtgtcggatgacccgcgcgtttatggcaaaggtgggctgctcgatcaattcaccaacaacgacatgcctcgcatcgccatcagcgtggacatgctcgacaccggcatcgatgtgcgcgaaatcgtcaacctcgtgttcgccaagccggtctactcgtacaccaagttctggcagatggtcgggcgcggcacacgcctgctggaaaccagcaagcccaagccctggtgccttgagaaggatgtgttcctgatcctcgactgctgggacaacttcgaatacttcaagctcaaccccaagggcaaggagcttaaaccgcagttgccgctcccggtgcggctggtgggcctgcgcctcgacaagattgaaaaggccaatgacagcggccatgccgacatcgccacacgtgaagtcgccaagctccgcctgcagattgccgcgttacccaaagagtcggtggtgatcaaggaagccgccgctgcgctggcgcggctggacgacgacaacttctggatcagcctcagccacgaccggctggagttcctgcgcgctgaaatcaagccgctgttccggaccgtgtccgaggccgacttcaaggccatgcgcttcgagcgcgacctgctggagtactcgctggccgttttgagcgaagaaaaggaacaggccgacacgctcaaggagggcgtcgtcgagcagatcagcgaactgccgctctccgtcagcttcgtcaagcaggaagaggccctgatccgcgccgcgcaaaccagccactactgggccaaggcggatgaagacgccttcgacgaactggtcgccaaactcggcccgctgatgaaattccgcgagcagtccaccggccaggaacaaacccacctcgatttagccgatgaactgcacaagaaggaatgggtggagttcggcccacagcacgaggcggtcagcatcacccgctaccgcgaaatggtggaaaacctgatcgccgaactcaccgcgcacaacccggtgctgcagaagatcaagaacggcgagacagtgagcagcgaagaggccaaagagctggccgaactgctgcacgaagaacaccctcacatcaccgaagacctgctgcgtcaggtttacaagaaccgcaaggcgcgcttcatccagttcatccgccacatcctgggtattgaagtgctcaagagcttcccggacgaggtcagcgccgcctttgaccaattcatccgcgcccacaccacgctcagtagccggcagatggaattcctcaatctgctgaagggcttcatcatcgagcgcgaaaaggtggagaagaaagacctgatcaccgccccctttaccgtcattcatccacaaggcatccgtggcgtgttcagcccactagaaatcaacgagatcctgcagctgaccgaacggttggctgcctaa

SEQ ID NO: 344004 - DNA, 138 bp, Pseudomonas aeruginosa
atgaagactagaaaaagtattttcagcctcgacatccgcgatgatcacacttgcggcaacgtgcccgcgttccagaccgaggaaatggccgcaggtagccaacgcttccgcatcgccagggaggctaggcatgtataa

SEQ ID NO: 344005 - DNA, 921 bp, Pseudomonas aeruginosa
atgcgtgcagccctgctacccatcttcggcgccctctccgctgcgctctgcctggaggcccgcgccgacgccgtcgcgctgccgccgctggcgctcggcaacgccagcttcatggacggcgtcagccgtcccggcatgctcttcgaactgcccctgcaatacgttcgggcgaacaacgccagcgacgccggcgggcattcggttcccggtcggcaacgggttcgtggcaccacgctgttgccgcacttcgcctacctcagccagaacaccctgctcggcgcccactacggtgccgaagtgctgctgccgctggtacgcctggacctcgatatcgacggcggcccggacggccggcgcacccgccagggcgacctgatcgtcagcccgctgatgctgcaatggggccccgctacgctgttcggccgcccctactggcagcgcctgaacttcgtcttctccctgcccaccggcgactacgacaaggacgccgcgatcaacaccggcagcaacacctggatcttcaacccgcactacgccttcacctgggaactgggcgagcgcctggaactcagcggccgcctgcactacgcctggatcagccgcaacgacgacccctcgccgcgcctgggcgcaaacgacgtacagccgggccaggcgctgcacgcgaacttctcgatctcctacgcgctggacccgcactggcggatcggcctggccggctaccagttgaaacagatcagcgccgaccgcatcgacggccaccggcaggccgactcgcgcgagcaggtcttcggcataggcccgggggtgatgtacagccagggcaggcaaacgctgttcgccaacctctacgccgaaagcggcgcgcgcaaccgcagcgaaggcaaccaactgaccctgcgctacctgctggcgttctga

SEQ ID NO: 344006 - DNA, 1278 bp, Pseudomonas aeruginosa
gtgagcagtcttgaaagaaaaatctcttatcttataaagccaatccttggaaaaaaaggattcagacctcacctcacaaaagaagattattacaaaattccatacatggaaaggcttaggcttgaaataaaaaaccccgaaggtcgtaaaatttaccttacggactcttcaaagaaaagatttgatgaaatacttgaggaactacacggggactttaatggaaaacttccagcaacatataacgacatttaccaatcattaaaaaaagtcattgcaatgctcgtggaagagttgcgtcaagatgtcactgggcgtgattttattttacttgtgaaggatgagcttaaaagaaaatacaaggaacgcgacatatacgctccgattaacggggtgcatctcgatggcgtgactgtcctagatttaggaaggtattctatcttacaagcaatctctgatgtatttaaagactgtgatacatctttagaaatggtggagactgcctgggcaagaatgtgggataaaacctggataaagggaatggtttatggaacaacagactatgcgaaagagaaattctgggaggatgcaaagctaatctcggcctgtttatctataatatctgccaccagctttgaaaatggaacaggtattacatgcatcgtccctgggataagttatagcaggtcatccgatagctctttctctatatttgatgagggaaagtcgctaagcatttcactaaaaataactgataaatcagatttacacattaatgaatccatcgccgaagacattggcgctagcgaatggttttcgaagcttattgaaatcatatatcgccctccaacatcagagcttgaaactgtgattcgcagatctttattttggttttatgatgcacaggcggatctactaccagagatgcagcttgttaaattctggagctgtatagaatgcatattctcttttgaaaaacaaaacactacgacggctattgaacaagggcttcttgtttttttaatttacggcggctataggtattacaaaatttccgatcagtcggttttaaaaaagcgaatatcagagctttatgattttcggtcccttgctgttcatgatgctaagcatggacacgttacacagaaagatgtaagagaattaagccagtgggcagccaaagttataattgaagtcacagcgctttccagcatgttcggatacactacaagaaagcagataaaagatcacttcgtgggacacttcaggtcaagaatctga

SEQ ID NO: 344007 - DNA, 1200 bp, Pseudomonas aeruginosa
atgagctttccgggcaggaccggcgagctgctcgacctgcgcgagctggagcaactggtcgaccagttgagccgcctgccgtcgcgccaggcgcaactggagctggtgcccggcagcgaggtcggcggcagccgggtgcgtctcaagggcgagcgcgacaagccctggcgggtctccgccacgcgcaacaacgacggcgacgtcagcaccggcgagcagcagatgggcctgggcctggactgggacagcccgctgggcctggccgaccagctcaacctgcgcgccaaccgcgacgcggtgaccgaccgctggcgccattccgacagccagagcctgttctacagcctgccctggggctggtggaccttcacctacggctacagccagagcgactaccgcacgcgcaacgaggccagcggcttccccttcaagctcgatggcgacagccgcagccatcagttccgcgccgaacgcgtgctgcaccgcgacggcatgagcaagaccgccatgagcctggggctcagccaccagcgcaccaacaactatgtcgaagacacccgcctggaagaccagagcacgcggatcaccgagacccagctcggcttcaaccacggccggcggatcggcagcggtttcgtcaacctcgacctcggctggcagcagggcatcggcgcccttggcgcgcagggtcgcggccacccgcaggcgggcgatccgaatgcgcgctacgacaagtacagcctgaccctcagctacctgcagccgttccagctatggggcgagcgcttcagcttcgacagcctggccaccgggcaaaggagcgaggacgtgctgttcagcccgcagcgcatcagcctcggcggcaacagctcggtgcgcggcttcaaggaccagaccctgaccggcgacagcggcggctactggcgcaaccagttgcgctggcggcgcgcggtggagtgggcgccgctgcggccctggctgcaggaatacggcgtggccttcgcctacgacgtcggcgtgatccgccacgaccgctacaacgacggcgccagcgggcgcatgagcggcaacgccatcgaactggatgcccgcggccgctatttcgccgccagcgtcggcttcgcccgctcgctggagcggcccagcgccattgagcggcgcgagcacccgatctatttccgggtcgacgcgttcttctga

SEQ ID NO: 344008 - DNA, 1074 bp, Pseudomonas aeruginosa
atgcgccgcctccagcgcgatgcgttcgcgcgccgccaggctctgccggttgaccagttcctccgcgctgcggatctcggcgctgccaccggcgtaggtcttgccgttcagctccacggcctgggccgcgatcttcaggtcgccctggctggaggcctgggccaggctcagcttgccgctggcgtcgatgcggatgtcgccgccgctggcggccatgtcgccggccagcttcacccccacgccctgctcggtgccgaccaggcggatcgccccggcgtacatcccgcccagcgccgagctgtcgatcgccagctgcggcttctcgctgccatcggcggcgcgcggcgtggcctgcaggctgtcggcctggacgtcgttgcggccggtgacgatgttgaggttcttcgcgtagagcttggcgttgagcttggcgctgcgggtgatcaggtcgaactgttcgaggttgccgacgttcagttcggcgccttcgacgacgatgtcgccgccgtccacctggaagcgctccaggcgctggccgtccatgatcggcttgccggtggtgagggtcgcgcgcggcgtgttgatgaagccgcagccctggcaggtgatgccgtgcgggttggcgacgatcacccgcgccgactgcccggccacctcggtgtagccggccagggtgctgcggttgccgccggtgacctggttgaggatcacctgcgccgcctggcccttgaggttggggttgccgaggatgatcccgccgagctgggtaccctgggtcttgccggtagcgttgttgaggatcagcccgttggcgccgacgttgtagtcgcggaaatggttgttcgacagcccggcgccgttgggcgtggcgatattgacgatgggcacgccgttgcccgcctggcccaggccggtgttgccgccggcggccttgtccagcgccagccccgccgccgtggcgacgatcgggttgaggaacaggatgccggccagggacagggcgatgcactggttcagcgggctgcggatgtccatatcgttactccttggcgggtaggggcccggcgaggttaa

SEQ ID NO: 344009 - DNA, 219 bp, Pseudomonas aeruginosa
atgttgcccccgctcgtccgccgtctgtcccgccttgccgccgaactggcggtactcatcgccttctggtgggccggcggctggctggcgaaggccatcggcctgccgctgccgggcggggtggtcggcctggcggcgctgttgctgctgttcgccagcggcctgctgcgtccggcctgttgctggcggagatgttgctgttcttcatcccggcgctga

SEQ ID NO: 344010 - DNA, 843 bp, Pseudomonas aeruginosa
atgaggaacttcgtaccgatgaccgactgcttcccgcggacgcctgatctaccatctcaatcaccgctgttctgggtcacccataaagatagataccttcgccagttgctcattcgagatattcaagtgagcactggcagggatctaatagtctatttcaccgagtgcgaaagagccggtgcacagatagacatgggggacgacgtatattttgctgagcttctccgagctgcgcaaggcaggccagtagacctgctgatcgagacaaacggtggctataccgaccccacggaaaagatatgttccatgctgcgccaagcagcatccgatctgagagttattattcctcggagagcgaaaagtaacggcacagttattgctctttgtggaactcacattcttatggggcttgagtcagaacttggtccaatagacccatccctaagtggtgttcctgtagaatttattcttaatgcacctcagggtttcaatccgattgagcggcagctagcccatacgacccaggcccaaacaataaaacttgctaaagagctactaagcacgggcatgatgcaaggcaaaagtactaacgaaatcgaagaaaccgtaatgaaaatggcgtctcgcggtcattatcactcccatgggtcagtgatagacatgcgcgaagcggccgctttgggacttgaggtgattcaacacccaatggaagatcagttctggcaacacttgtggctgctcaggacgatgtatcaatacgactgcttacaaaatgggtatgcaaagctcttcgaaagcgcgactgtcagtactgcagtctaccaaaataagccagagaaataa

SEQ ID NO: 344011 - DNA, 270 bp, Pseudomonas aeruginosa
atgagctatctgatctccggttacgtgcaatcaaatgctatggctagcgcccgcgacctcttcggctcccaaagcaatcaggtattggtcaaggatgaggtagcctttcaggctgctcgtagcccataccaagacctgtacgaggcaagccgtcgtatggacaatggctttaatgctttgaccatcggtcgtaatccgttcgacgctagtgagcaagaactggatgaggaacttcgtaccgatgaccgactgcttcccgcggacgcctga

SEQ ID NO: 344012 - DNA, 771 bp, Pseudomonas aeruginosa
gtgagaacatttatgatcaagcctctagacatagagcccggaccagtaaggctaaccaaggaaaagaaaaaagtgagcaaacttgatatttttttgaatcgcaccagccatatagttcagatcggcctcttctcggtaacactatttactgtttactacactgtcatacctctttataaaaatgcccagatggaagaatccctagcccgaaaagagcttgagttagacaagctaaatcaagcaacagaggacctatacaaaaaagttagagatatggaggccggctcacttgcctcaacaacaataagatgtacaaacctttttgatgagaagcttgaaccaagcagaaaagtcatgctagatatcgatatcccaacatgcctgaacaagctaatctcagaacacagttatgaatctctacgagaactagacaagctgaccttaaaagaccatgctcgagacatagctacgaaggtagcagccctacaagctgaataccgcgccaaaagagactctttagctgacgaaattcgaaataacccagctatagcggaatctataaaatcacagtacaaaaaagataacgagaatggtctaaatattgcgctgttcgatcttctaaaaggacttggaatgacccaagaacagttggactccgatcgagacagccgcctactagaaattggcaagtcacaaattgaaaacaagttctccggtttgatcacaaaagaattaattaaaataaaggacgtacgctggccggctagttag

SEQ ID NO: 344013 - DNA, 759 bp, Pseudomonas aeruginosa
atgagcaacaacccgcacttcatgaacatgaccgccgacacgctcggcaagagcttgctgcagggactgatccaggaaatccggatcatgccggactgctggcagaagcttcccgaggccaagcagcaggacatcatcgaccgcctggagcgccaggtacggaatgccgccaccatcgcgatccacacgattgccggcggcgaccgcgacacggtctacggcaagctcgaatccttcaccgcaaaggacaaggtaaaagcggtattcaccgtgagccccagcagtccgaaccaggagcaactctttggcgctgtgcaccaggactgcttgttggtcatcggcggcgccgctgagttcctcgacggcatgaaggacgtgaaggcggatccggaccagaacccgctggacctgaatggcggcgacggcgacatggaagacggcgcctggggcggcgagcagcagcccgacgatgatgtcgtagatgccgagttccaagaactgccgcaactcaccgtcgagcgcttcgccggccacaccctgggcgagatcgccatcggcgtcgccaccaagaaggacgtgttcgacgcggcctggctgcaatcgcgcttcgctctcaccaccgaggaagccgagcgcgtcgttctccaactgctgaaccagggcgtcatcgtgctcgagcacgatgacgaggaatcccgcgagctgaacacttaccgagtcgtcaagaagccgggggatatcgccctcgatctggagtga

SEQ ID NO: 344014 - DNA, 729 bp, Pseudomonas aeruginosa
atgaatgccgaaatcgccttgaaactcgcccgccgtttcatcgagctgccacaggacaagcgtcccctgtttctcgatggcctgcgcgaggaaggggtggagttttccctgcttcccattcccgatggcgtcgtcagcgaggatcgcgacgagctttcctatgcccagcggcgcatgtggttcctctggcagctcgaccctcagggtgcggcctataacctgccgatggcggtccgcctcagcggcccgctggatcgtgcggctttcgaggcagccttcgccagtctggtccagcgccatgaaacgctgcgcaccgtatttccccagcgtgccgacggcaccccgcgccaggctgcgctggaacgtccggtgccgattgacttcgaggacctatccctcttgcctgaggccgagcgggaaacctgcttgcgcgaaactgcccaggccgaatcgctgcggcctttcgacttgtgcgaggggccgcttctgcgcgtgcgcctgatccgtctgggcgaggagcagcatgtattgctgctgaccctgcatcatatcgtgtccgacggttggtcgatgaacgtgctgatcgaggagttcagtcgtttctacaaggcttgcatggataacagcgaagccggacttccacccctccctatccagtattccgactatgcgttgtggcagcgcagctggatggaagcgggggagcaggaacggcagcttgcctactag

SEQ ID NO: 344015 - DNA, 201 bp, Pseudomonas aeruginosa
atgagcaagcgcaagatgccgcccgccactaccttcccggacgagccaattgtcgtatcactgatacgacaattgggctggccgcattccatcctgcttctgttgctcaacccggccgtcaccggccgggcctcacgcatgaaggcagccatcttgacgcttgtgatttataagttacaattggggccggttcatgattga

SEQ ID NO: 344016 - DNA, 324 bp, Pseudomonas aeruginosa
atgattgacgtgcggcgataccagcgagcggatggcgcggtgccgttgaccgaatggttggctgacctgcgcgatgcacgggctcgggccaagctggaaatccggttccggcgggtgtccctgggcatctttggcgacatcaagccggtcggcgagggtgtcttggagctgcgcgaggacattggccctggttatcgcgtgtacctggggcggcacggcgcggcgctggtcatcctgctgtgtggcggcgacaagcgctcgcaggatgccgacatcaaacgggccaaggaatactggctggactggaaacggaggaatacatga

SEQ ID NO: 344017 - DNA, 342 bp, Pseudomonas aeruginosa
atgagcaatcgcaaacatgccgcttcggtctcccatagcgaagccaccattgccgagctgcgtgccgatcgaggctttgcggtcgagtacctgaaatccgcactggaagaactggacaacccggagcaccgcgccgtcggtctgctcgcgctgcgcgacgtggccgaggcttacggcgggctggcgactgtcgcccaggaggcgggcatcacgcgcgaagcgctctatcgggcgctgtcgccgacgggcaacccgacgctcaagaccttgctggccgtgcttcatgcggtcggtatgcggttgtccgttgcgcccgccgatcccatcgtatcgcgcgcctga

SEQ ID NO: 344018 - DNA, 222 bp, Pseudomonas aeruginosa
atgatgagtcgcaacgatacccctcaaggcaccgacaacgtactgctggatctcggcttcgacgacgcggaaggactgtcggcgaaggcggcgcttgcactcaagctcaacgagctgatcgaccagcgcggcctgggggtgtcccaggttcgccgctacaagctccagaacatttcgctggagcggttggtgcagacgctagcgagaatgtcgtatcagtga

SEQ ID NO: 344019 - DNA, 921 bp, Pseudomonas aeruginosa
atgccaagaacactccagtaccggcccaccctgatcgacgagcttatcagtaacgagcggatcaacagctaccagaacgtcttccagccggcctccgacatcgagctgatgggcgtctacctctggaacgcccacgtcagtggcgccatctaccccatcatcggtgctgcggagatcaccctgcgcaacgcgatagaccgtgcgctgcgcggccacctgggcaacttctggtggtctggccacaaactgcgctatcgctccttcgtgcgcggtacgccgccgccccatccggtgcaggcagcgcgcgacaacttcgccaaggccacccgcaagttcatcaccgaacagcgcaaccgctatggcgtgaccgggcacatcacgccgacccaccacggcgtcatggcgaaaaccgagttctcgacctggggtttcatgctcgaccacgagttcatgggcaacgggctgatctggcccagtcgactcggcaccgttttcgccggcacctggccgagcacgcaggcttcgaccatgctgacgcatgtgcaggatctggtcacgaccgtgcgcgacttccgcaatcggctgttccatcatgagccggcctggaaacggttcggtgtgcataccgaggccgatgcgctccagcacttgcaggaaaagattggcaagatcgaaagcctggttgcgctcatccacccggagaaccttcggctactggaaaagaacggcttgctccgtgcggcgcgcagggcctgtacatcgcatgagattcgtcgcttccagcaccttgctcagacccacaagatcaactcgatgagcaagttacaggggttggtggatcgctgcggcacggacgacaccatcctgatggcgaagctctatctcggacgtcagcgaactttcctggtcagtccagtttga

SEQ ID NO: 344020 - DNA, 870 bp, Pseudomonas aeruginosa
atggatgaggtggatgtcaggcagagagcgcgagcctttattgcgaaagtcgatacgtcggacatccgaacagacctgacgccctatgtcgttgcggccaacgccaaggtcaagagggaagaacttgatgaaggagagtccggctacacaatcactaagccgaacgggaagcacgtcattacggtgaactcgctggaaacggaagagcgccagcgtttcaccatctgccatgaggtagctcatatcgtgctcgatctggagtcgagtcacgaagaagtaccgtcttggtcttatgccaagcggcacccgaacgagatcgcctgtgacacgttcgccgccgagctgctgatgccatatcagcaatggctgtcactcgtacccaaggaagagccatcgctggagctgatccagcacatggctgacttgtttagcacctcattccctgctgccgcatctcggttcgcttgcctcagtgacatgccgtgcgctttcgtcacaatggagcgtggcgcagtacgttacgcagcacgctccaccagcttgcgacagactggagcttggatatcgcccaaatccataatccctgtcggctctgtggcccaccgcctccgctcttcgggcagcagtgctacggacacgggagaggtttcacaggacatctggttcgacaactgggaacagggactcgacctctgggaactctccaggcactacgcacgtaccgacaccaccacctcgctgttatggttcgacagcgacgacttacctgaggtcgaagtgaaccgcttcggtgcgcgtgtcgaggacgatggaggcttggctgaacttacagggcaactgccgtggccaggacgtagcaaacgccgttaa

SEQ ID NO: 344021 - DNA, 396 bp, Pseudomonas aeruginosa
atgaacgacaaatcgcatgtctctatggaacgccgcgtttgcctggtctgcggcaccgcttacgacaccggcagcatcctgctcgacaagcgcctgcgcgcgagcatggagcgctacacgacgacaggctggggcctgtgcgccgaacaccagaagctgtccgatgacggctttgtcgccctggtcgaatgcgaccccgagcgcagcggctcgccggcgggcggcggccgcgtgaagcctgagcaggcttaccggacgggtcggctggcgcacctgaagcgcaaggtgttcaccgagctgttcaacgtgccgattgcggccgagcagccgtgcgtgttcgtcgaacccggcgtgatcgaacagttgcaggcgatggtgtcgccggcggcgagctga

SEQ ID NO: 344022 - DNA, 2046 bp, Pseudomonas aeruginosa
atgaacgccatgacccaaaccgaaaccctcgccatccacaccgccagcgcactggaagtggccgacccggccaagaacctgattcttgtcccgctgtcgcagttgctgccgcgccaatccaagcgcaacgtgcgcaaggccccgcgcatgtccatccccgagctggccgccagcgtcgcgcgcgtcggcctgctgcaaaaccttgtcgtcatcctcgccgccgatggcgagcattacgaagtcgtcgccggaggtcgcaggctggccgcgttgaaactgctggcgaagaagaagcgcatcgccaaggactggaacgtgccgtgcctgctggtggcggacggcagcgcccgcaccgccagcctcaccgagaacgtgcagcgcgaagccatgcaccccgccgaccagttcgaggcgttcgccgcgctggtcgccgaaggccgccccatcgaggacattgccgccgatttcagcgtcaccccgctggtggtgcagcgccgcctgaaactcgccaacgtgtcgccgcgcctgatgaccgactaccgggccggtgccgtcacgctggaacagttgatggcccttgccatcaccgacgaccacgccgcgcaggaagccgcgttctacggcgcgccgcagtggcagcgcagcccgtccgcgctgcgcgagcacctgaccgaacgcgaaatcgacgcacagcacccgctggcccgcttcgtcgggctggacgcctacacggcggcaggcggcagcacccgccgcgacctgttcgccgaggacgacagcggcatttacctgaacgacgccgcgctgctggaacggctggtgcgcgacaagctggacgcgcaggccggtgacgtgcgcgccgaagggtgggcatgggtggaggccgtgccgcacctgagccacgccgaccggcaggcgttccagaacgccccgcgccagcggcgcgagccgaacgcccgcgaggccaagcgcatcgcctcgctgcaagcgcgcatcgacaagaccgacaccgcgctggaggacgcctacgaggccgaggacgaggacaaggccgaagccctgcacgaacagcgcgaacggctggcggacgaactggacaccgtgcaggccggtttgctgcgctacgccccggacgtgctcgcggtagccggtgccatcgtcaccatcgaccgcgacggcgaggccgtgattcatcgcggcctgctgcgcgaggccgaggccaaggcgctgcgcacgctggaaaagctgcgtcaaggcttcaccggcgcggaaggcgcgcacgacgacgaaggcgaggacgccgagccgccccaagccgccaacctgtccgaccggctggcgcagcgcttgagcgcgcaccgtaccgccgcgctgcaaatcgaagtcgcccggcatccgcaggtggcgctggccgcgctggtgcatggcatggtgcagagcgtcttgcaggacagccgctacggccacgacttgccgctgggcgtgagcctgaaagtgcaaaatcggctggaaggcatggccccggactggccggaatcgtccgccgccgtcgtcctgcgcgaactgcaacaggcatggggcgaacggctgccgcaggacagcgccgaactgttcgccgcgctgctggcgatggagcaaggcgagctggtgcggctgctggccgtgtgcgtggccgccagcgtggacgtggtaacgccctgcgccacgccgcaccagcccggcgcggaactggcgcgggcggtcgggctggacatggccgcatggtggcagccgagcgccgaaggctacttcaaccacatccccaaggccgcgattctggatgccgtgcagcagttcgcaccgtcgcacgtcacccggctggcgaagctcaagaaggctgacattgccagcgaggccgagcggctggccgatggcaccggctggatgcccgccgtgttcagggccgaggacgaggtggtgcaggcgagcgagcaggacgcagcgcaggaacccgacgcagaggccgaagcggaggaagtggaggaagcggaaacgctggcggcatga

SEQ ID NO: 344023 - DNA, 801 bp, Pseudomonas aeruginosa
atgaataaaaacagagatgatttttcaaatagtgtaaagattgagcttgctggtagagtgggctggatatgctcgttccctggttgtggccaatccacctcggggccatctcacgactctcccgaaagaatgataaaaaacggtacggcggcacatataactgccgctgccccaggcggcccccgctatgatccaacattgacgcctgagcagcgccgatccatcgaaaacggtatatggatgtgccctcgccatggctccttaatagataaggacggtgcttattctgctgccgaaataaagagctggaaagccaatgccgagaatatcgccagaagaaatctcgaatatggcccggactctcaaactggatatgctgtcacgatatattcctcaaaagatttaagaatattggaagcgtacagcaatgtttttacctggttcatcatcgagagaatcagaggcgagttgtttggaagcaaagtaagtcacgacgtcacaaatcctctagatgccgcactgggaatggaaaaaaatccagcttatatctttcaggatgaaaatcttgaagaaataaggaaaacactaaactccagaatctgggatttttaccgccacttttctcagcagagtggaggaatgataggctattacgattatattgacatacatgaatgcactcggcgcaacccaggaagtagagaatattgggaaaatgaaatatacaaaacacaggttttagcaggattggtttgcgatactgctctggaactgctcaaaattaaggagaataatagttag

SEQ ID NO: 344024 - DNA, 732 bp, Pseudomonas aeruginosa
atgcgcactggaagcagggggtctgaagtggcttcgcgaccgatcttcactccatcactgaacggcaagctacttgtctcgacccattacgtggactttcaatggtatccagggatggctagaagccaatctcagaagtccattgcgtcactccatgatgccgccaagaaacagatatgcgttgacaaggtgcttgaaatttcaagtaagtcacctgacgaactcggcgttagcttgagcgcatttaatctcatgataaaaacagtaaagcgagaaaaagagttcagccttgagtgtgcatatcaggcgagcaaggtctttgaacgcggcggcccgttcttggatttgcttgacgcgaaatcaatcgacgcaaagcgtgatccccgcctcaatcaacatggacgcctgattaaatttcgtttttatggcatggattgggagttgcagcctaggacggcattctatgactggctatatatcaatgctcttcacaaacgacctgagcttgcagagcaggttctaacataccgtgccttctcggatattgcttttaaccccgaaaggtcgattaactgtcaggcgtatgcagcagcgctatacgtatcgcttcatgagcgtaatttattgacagaaaaaactctaagagatcaagaaacatatcttgccattattaatactggcgaggtcagtaatgctcacgaagatacaactactcaaggaaggctcgtttga

SEQ ID NO: 344025 - DNA, 246 bp, Pseudomonas aeruginosa
atgtatgaggattggggtgaaaaaacccgtgcgatgctgggcatccaaaaccagtacccgacaaatccgcaagctgaagttctcatgctcaacggtgtccccagggagtacattttcggcgtgattgtgttgaatcaagctaagcaacaagagttgaaagccaagtatccgaacctagacgtgcgagccctcgccggctacttccgataccgttcggattatgcgcactggaagcagggggtctga

SEQ ID NO: 344026 - DNA, 318 bp, Pseudomonas aeruginosa
atgacgacggtcaagccatcgttgcccgatgcactgcggcggatcaggaaggcacgcggcctgagccaagaggcgttctcggacgtgtccagccgcacctacctgagttcgctggagcgcgacctgaaaagcccgaccctgaacaagctggccgaactgtgcaaagtcatggaggttcacccgcttacgctgctgacgctggcgtatgccggtgacagcacgcgcaaggccgacgagctgctggcgcaggtgcgtaaagaactggagtcaatcatgggaggaaacgataaaacgcctcctaccaactccaatcaataa

SEQ ID NO: 344027 - DNA, 351 bp, Pseudomonas aeruginosa
atgaagccgcccctcgtcaccgacgcccagcgcgcgcaactgctcgccaacggccgcgcacgcgccgccgggcaggccctcgacccgctgccggtcatccgcctgttcaccccggacgcgcgcgccacctggctgcttgccgccctcgatcccgaggacggcgacaccgcctatggtttgtgcgacattggcattggcctgccggacctcggcaccgtgcggctgtccgagctgggcgctatccttgggccacaggcacggcccatcgagcgcgacctgtatttcgtcgcccggcgcacgctgtcggaatacacgcgcctggcgcgcatcaacggctcggtcatcgactga

SEQ ID NO: 344028 - DNA, 774 bp, Pseudomonas aeruginosa
atggcagagcccgccgatcactggcaccccggtgccgcctacctctacgtcctgcatctggacggccccgcgctggcctgggagtacctgcgccgccacccggactatcggcgtgactggttgcgccgttgtcgccatcccgaggcggcgcagcgctggggcctgcgtctgctggaagacccggccctggatgcgcgggatgcgcacccagcctggttccccgaccacgacagcgtggtgcggctccagcccgacgacgatccgccgcccgatgctgtggccttcgacttctggcgcatccccggcaataagcaactgatccacgacggccggcggctggtgctgctcacgcgctggccgggtagccatgtacgcctggcgctcgcgtccggcctggcgcaaggcatgggttacacctatgccgtgtgcgcatccgtacaaccatatccgcgctgccgcgccctggcgggggcgctggacacgctggccgacgctgccgtgccggtggcggctcggccgcgcccggcggccaccgcgctgctggagctgcacaccctgcaagcgctggacggcaccctggcgggcgcgtccctgcgacttgtcgctgacgtgctgttcggtactgaagactggcacgccgatggcgcgctgcgcgcccgcgtgcgtcgcctggtacggcgcgggcaacggctgatgcgcggcggctaccgccgcctggcacagcttcccgaacctgaacagggacgttttgccgaccgcgcacaacgtccctga

SEQ ID NO: 344029 - DNA, 831 bp, Pseudomonas aeruginosa
atgcccagcctggagcagaagcagcgcgaacagctcgacctgttccgcgcgctgccgggcgacatggcgccgcgcgacgcccaggacctgatggcctatccgttcttctcgctggcgaaatcgcggcgcaccgcgcccatcgacttccgctccggcggcgtcaccgtgcgcgtggaaggcacccaggaacacggcatcgccaccatctgggatgccgacatcctcatctgggccgccagccagatcgtcgaagcgcgcgacgccggcatccgcccctcgcgctggatgcacgccacgccctacgagatcctgcgcttcatcggccgcggcacctcgctgcgcgactaccagcgcctcaaggccgcgctggatcgcctgcaatccaccaccgtggccacctccatccgcgagacgaccgggcggcgcctgcaccgcttctcgtggatcaacgagtggaaggaacgcgcggacgccaagggcgtgccgctgggcctcgaactcatcctgccggactggttcttcgccggcgtgctcgacgaagccctggtgctcaccatcgacccggcctacttcaagctcaccggcggcatcgagcgctggctgtaccgcctggtgcgcaagcacggcggcaagcaggccgatggctggcagttcgacttcccctacctgtaccgcaaatccggcagcctggcgcagccccgcgacttcgcccgcgacctgcgcgtgctggtcgcgcggcaatcgctgcccggctacgagctggccatcgagcgctggcccggcgagccggaaatcctcgccttcaggcccgtgccgtccacggcacgttga

SEQ ID NO: 344030 - DNA, 525 bp, Pseudomonas aeruginosa
atgaacagtaccgcacagatggcaacgccgccgtcaccgcaaccgctcgccgcgctcgccagcagcgcgccgctcacgcgcgtgtcgctcgcgtatgtcgcgcagcgcatcaacctctacctgcgcttcggccagccagcgcgcaccgtccagctcgaccgctggcggcgctgcgcggtgttcctgcccacggagatcttctgccgcatccactggcaatcgaacgactacggcaccgtgcgctggcagctcatggtgctgcaagcctgcacgccgctggacgctatgcagagcatccccggcattcgccccggcgcgcgcatcctgctgcacgccgaaggcgaacagaaaacgcgagccgtgctcgcacggatcgacaccatcgaggcgctgggcatcgagcctgccgaggtgtcgccggcctactggcgcacgctgggaaaccgtctggccgcgcgcctgccgctaccggactacaccgccgagcgccatgcggcctggctggccgggagggcgctgcaatga

SEQ ID NO: 344031 - DNA, 576 bp, Pseudomonas aeruginosa
atgaccgcacccaccaccacaacggccgccgtcgtgcctcgcccatgtagtcgccttcgttttgcactggccgcactcgcggccggcggcctcgtggcgctggcctgggccgcctttgtgcagccagccgtgcgcatcgtctacaacccgtccgacagcgtgccggtcggctggtatcgcatcgcaccggcgcacgcgctgtccggtgccttgccggtggacagcatcgtgctcaccaccttgccggcacacgccgccgcgctggccgcgcagcgcggctacctgccgtcgcacattccgctgctcaaacgcgtcggcgcggtggcgccgcaacacgtctgcatcgtcaatggccttgtgcgcatcgacggcgtgccggtggccgccgtgctgcgtgccgaccgctggggccggccgctgccatcctggccgcagtgccggccgctcgcccagggcgaactgttcctgctcagcgtcaccaacccggcgtcgttcgacagccgctacttcggcccggtcagcgccgccgccgtgctaggcgtggcacagccgctgcacctggagccacagccatga

SEQ ID NO: 344032 - DNA, 1968 bp, Pseudomonas aeruginosa
atgagccggcgcagcggcgacgacgccgaccgcttccgcatccgcccaggcgcgcccaaggaccgcacccagtcgttcgtcaaccgcgtgctcaagcaggccagcaaggccggtgccaaggtcggcaaggcaggccaccgtcccggtgcccggctggggcgcgggcacgtcgccgcgcgcttcgccgggcagtcgctgggcgccaatgcgcggcgcgtcaccatcaagacccggctggtgaatctcgccaaggccgggctgcgctcgaccaccgcccacctgcgctacatcgagcgcgaaggcgtggaccgccagggcggacggggccgcgcctatgggccgatgaccgacgacgccgacctggccgccttcgaggaacgcggccgcgaagaccgccaccagttccgcttcatcgtctcgccggaagacgccgaacagctcgacgacctgcgcacctacacccgccacctgatgcagcgcatggaggccgacctgggcacgcagctcgattgggtcgccgtcgatcactggaacaccgacaacccgcacacccatatcgtgctgcgcggcaaggacgacggtggccgcgacctcatcatcgcccgcgactacatcgccgaaggaatgcgccaccgcgccgccgagctggccaccgaatggctcggcccgcgcaccgaactggagatccagcagagcatggcccgcgaggtggagcaggagcgctggacggggctggaccgcaccctacagcgcgaagcggtgaacggccgcatcaccatcgaccggctgaacgtgctgccccgtctgcgaagccagcgcctgctgctgatcggccgcctgcaacacttgcagagcatggggctggtgcgcgaaaaggagcccggcgtctgggccattcaccccaacgtcgaagacaccctgcgggcgatgggcgagcgcggcgacatcatccgcaccatgcagcatgcaatgggcggcgcgcagcgcgaactggcggtgttcgagtcgggcaagcacgcccgcccgatcctcggccgcgtcgccaccaagggtctggccgacgagctgtacgacaagggctacctgatcgtcgatggcaccgacggcaaggcccactacgtcgcgctgccacctcgcatggagctagagcagtaccccaggggcgcggtggtggaagtgaaaggtgcgaccagcgtgcgcgcggcggacaagaccatcgccgcgctggctgtcgatggcctgtaccgcaccgaccagcacctggccgtggccagggcgcaggcccaaggacagaccatgagcggccgcgaccccgccgaggtggtggcggcccatgtccgccggctggaagccctgcgacgcgccggcatcgtcgagcgcctggccgaaggcgtctggcaggtgccggacaacctgcctgcggagggccagtggtacgacacgcagcgcgccgacggcgtggtggtggagttgaaatcgcacctgcccatcgagcggcaggcccgcgtgatcggcgccacctggctggatcagcagttgatcggcggtggtgaagggctgggcgagctgggctttggcagcgaggtgcgccaagccctccagcagcgtgccgatttcctcgaagaacagggcctggccgagcggcgcggccagcgcgtgatcctcgcgcgcaacctgctgcggacactgcgcaaccgggagctgacaacggtcgcgcagaccattgccgccgacaccggcctggagcaccgcccggtgggcgacggccagcgcgtcagcggcgtctaccggcgcagcgtcatgctcgccagcgggcgctacgccatgctcgatgacggcaaggggttcagtttggtgccctggaagcccgtgctcgaacagcgactggggcagcagcttgccgcgacgctacacggcggtggggtgtcgtgggaggtcgggcggcagaaagggccagcgattggttga

SEQ ID NO: 344033 - DNA, 603 bp, Pseudomonas aeruginosa
atgtcgaaaaccaccgaccgtccttatcaccacggggatctgaggcgcgcgatcatcgacacggccatgggcatgttgcatacggacaaaggctggcaattcacgctgcgggaggtcgctcgccaggcgggcgtcagccatgccgccccctataaacactttgcggacaaggcggcgctgctgggagagatctcactcattggctttgatcgcctgcgggaaattctggcgcgctcggtctctccgaagcctgcgtcgcttcgcgccgggatcttcgcaatggcggaaagctatatgcacttcgccagcgctaactcaggtctttaccgccttatgttcagtacggattcgggttcggtgccggaagtgcatttgagcgaccgggcactctctgcgctgggtgtattggtggaactgctggaacgcggccaggccgaaggcctgttgcgcatccgcgacgtccgcggccaagctgctgcatgctgggcactgatgcacggccttgccttgctcagtattgacggtctgcttctaccggaaaaagttggttccaatgtgctggagaacgcgctgacggcgttgcttgaaggattggaggcatag

SEQ ID NO: 344034 - DNA, 1419 bp, Pseudomonas aeruginosa
atgaacgatatcaaccatgccttgcggctcgacgcgatcctttctctgcaacgcgcgtccttcgagcgtgacggtgccccttctctggcgcgccgccgggctgacctgaagaagctccgcacagccatcctggcgaacaagaacgagatcgccgcagcgatcagcaccgacttcagccaccgctcgcggcacgaaacggctgtgatggaactgctgaccctggtcatgggaatcgactatctctacaagaacctgcgccgcttcatgcggccgacacgccgtcacgtcgcgctgaccatgcgcttgggcagcgctcgtatcgagtaccagccgctcggtgtggtgggcatcatggcgccctggaactacccattctcactggcggcgatgccgctggcgaccgcactcgccgcaggcaatcgggcgatgatcaagccctcggaactgacgcccgccaccagttccctgctggcgaagttgctggccgatctgttcccggaggagcaggtcgcggtggttcagggcgatgcctcgctgggggcggcgttttcggcacttgccttcgatcatttggtattcaccggcagtacgccggttggccgtgccgtgatgagagcggccagcgagaacctggttcccgtcaccctggaactcggcggcaagtcaccggcgatcgttgccaagggctatagcccggatcgcgcagcgatgggcattgcctatggcaagtttgccaacgctggccagacgtgcgtggcaccggactacgcactggtgcctgaacaggagttggagcgcttcgttgccgcgttcgacagggccgtccgcacgctctatcccgagggcccgaccagtaccgactacacgtcgatcatcaacgaacggcaccatgcgcgccttaccgggctgatcgacgatgctcgcagccgtggcgcgcgcgttttcgaagtcggccccagggccgctgacgctgctagccgcgtgcgcaccctggcgccgacgctggtgctcgatgtcaatgacgacatgaagatcatgcaggacgagatcttcgggccagtccttcccgtcaagacctatcgctcgctcgacgaggccatcgactatgtcaatgcgcatccccgcccgctggcgctgtattacttcggacgcaacgacgaggatcgaagcaaggttctgtcacgaaccacttcaggcaacgtcacgatcaacgccacgctgacgcattacgcgcaggaagaccttcccttcggcggggtcgggccgagtggcatgggtgcttaccacggcatcgagggattcagggcgctcagccatgccaagggcgtgttcgtgcagggccggttgaacggtgccgaaatgctgcgagcgccctttggctggttggccaacatgattctgagagtcctcctgcgctaa

SEQ ID NO: 344035 - DNA, 384 bp, Pseudomonas aeruginosa
atggcatcgagttttgattacgtcatcgtcggaggcgggtcagcgggcgcagcgcttgcgggccggttgagcgaagacccctcaatcactgtctgcgtgatcgaggcgggtgggcggggggatggagcagttgtcaacctgccagtgggtgcggtcaccatgttgccgacccgcctgaacaactgggcgttccatacggtgccacagaaaggcctgaacggccggcgtggctaccagcctcgcggcaaggtgctcggcggtggatcggcgatcaacgcgatgctctatatccgcggacatcgccgggattacgacgagtgggccggtctgggatgcccgggttggagctattccgaggtactgccttacttcaattcgcagtga

SEQ ID NO: 344036 - DNA, 1284 bp, Pseudomonas aeruginosa
ttgggcggcccctggcatgggcaggaagggccgctgtgggtcagcgatatccagagtgacatggcctatcagcagcgttttctggatgcagcgcgacaggctggcttccccactaccgatgacttcaacggggcgcaacaggaaggcctaggtatctatcaggtcacgcagcaaaatggcgagcgatgcagcgccgcgcgcgcctacctcctgccgcatctggagacacgatccaacctgttcgtcgagacccacgccatggtcagccgggtgttgatcgacggtggctgcgccaccggtgtcgagttcgagcgcggcggacagcttcatcgcatctccgcgcgtgaggaggtaatcctttctgctggcgccctgcaatcaccccagttgctgatgctgtcgggggtggggccaagggaggaactggagcgctgggggatcgaggtcgttcaggactcgcccggcgttggcgtgaacctgcaagatcatcccgacttcacctttgcctacagagcgcgcggcaccgatggtttcggcatctccgcagtcggcgcgctgaaaatgattccacaagtgtggcgatacctgcgccgtcgccggggtatgctggcgtcaaatttcgtcgagtgcggcggcttcctcaagacccgggacgatctggaggtgccggatatccagttgcacttcgccccggccatcgtgatggatcatgcacgcaagttagccacgggccacgggctgagctgccacgtctgcctcctgcgccccaagagccgtggcaccgtcaagctggcctcggcggattttcgccaaccgcccctgatcgacccggcgttcctggaagacccggacgatctggacaccatggtcgcgggctacaagaccacccgtcgcctgctccaagcgccggccctggcttcgtgggccgacaggaatctgattaccccgcacgtccagtcggacgaggacatccgcgccctgctgcgttcgcgcgtcgacacggtctaccacccggtcggcacctgccgcatggggacggacgccgacgctgtcgtcgatccgcaactgcgcgtatatggcgttcgtgggctgcgcgtcgtcgacgcctcgatcatgccgaccttgatcggcggaaacaccaatgccccttcgatcatgatcgcggaaaaggctgcggacatgattcgcggctgccccgcacttccccccattcagatctgcgagcccgctatcgaaacctcgaacgcggccatgacagctcttgatttcatcgaagcgacgtaa

SEQ ID NO: 344037 - DNA, 969 bp, Pseudomonas aeruginosa
atgtcgaaactgccacctgcgctcaacggactgaccttgcccgtgatcgcctcaccgatgttcatcgtcagcacgccaaaactagtcatcgcgcaatgcaaggccggtatcgtcggctcgatgccggcactcaacgcacgtcccgccgggctgctcgacgattggctcgccgagatcaccgaaagcctcgatgcacacaaccgtgcccatccagacaatcccgccgcgccgtttgccatcaaccagatcgtgcacaggagcaaccagcggctggagcaggacatggcgctgtgcatcaagtacaaggtgccgatcgtcatcacctcgttgggcgcacagccggagatcaaccaggcagcacaccaatatggcggcatcgttctacacgacgtgatcaatgacaccttcgccaggaaggcgatcgccaagggagccgacgggctgatcgccgtggcgaccggcgcaggcggccatgccgggacgaagagccccttcgcattgatccaagaaatccgggcgtggttcgatggcccgctggccctctcgggctcgatcgcgaccggagatgcgatcctcgcggcccaggcaatgggcgccgacttcgcctacatcggttcggccttcatcgccaccgaggaagcccaggcgtcaaccgaatacaagcaggccgtcgttgagtgcgactccgacggcatcgtctacacgaactccttcacgggtgtccatggtaactacctgaagtcgtccatcctcgccgcagggctcgatccgaacgacctgcccaccagcgatccgacgaagatgaattttggcgaaggcgcagccgccaaggtgtggaaagacatctggggttgcgggcagggcatcggcgccatcgagcgggtgcagccggtcgctgactacgtcgcctggctcaggcagcagtacgccgacgcgcgccgaaggctttccctgggagactccgcatga

SEQ ID NO: 344038 - DNA, 450 bp, Pseudomonas aeruginosa
atgaaccggttgtctttcaatgccttcatcttggccaaggtgcccattgcctggatcgccggcgtaaagctgcgccatctgaacgacagggactgccagatggaagtgaagtacggctggctgagccagaacccgttcaagagcatcttctgggcggtggagggcatggcagccgagttctcgacgggcgcgctgtgcatctccaagattcgtcagtcgaagcgcagaatcgcattgttggtcgtcaacctggaagccagcttctccaagaaggcggtcgggagaatcgtctttcattgcgatcagggcgaggacgtggacgccaccatccagaaggccctggcctccaaggagccgcagatactgaggatgcgcagtgtcggcattgatgaacaaggcgatctcgtggccgaatttttcttcacctggagcttcaaggtgaaagactag

SEQ ID NO: 344039 - DNA, 264 bp, Pseudomonas aeruginosa
ttgaagaagactactccctttctgctcgccgtcgcgctgacagcctgcggccagtccgaaacgcctcaacaggccgatctgccaactgtcgaggaactggcatccaaccccgaacgactcaaggagctgcgccagcagtgcaagacggatcacgcaaagctgggcgacatattgtgcaaccgcgtggccgaagccacgcgcaagcggttctttggcgatggcaaggtgccctacacaccgccggaaaatccacccaagttctga

SEQ ID NO: 344040 - DNA, 489 bp, Pseudomonas aeruginosa
atgagccatcttcattcccgccatcgcctgaacctgttcatcgagcgcgaccacgccaagcgcctggacgagctggcggccaagaaaggcgtttccaaatccagcatcgtcgcggccgctttggcgtcctggctgtcgccggacgcggccgaccagcgcgaggctgccatcgccaaacgtctggatcggctgtcgcgccagttcgagaagctggagcgcgaccagaacatcctgatcgagacgctggcgctgttcgtgcgctactacctaaccgtcagcacgccgctgccggaggcacatcaggaggcggcgaaggcacagggcaaggcgcgcttcgagcagttcatcgaacagctcggccgccacctgctgcgcgggcgcagcctggtgcgtgaagtggtcgaggagatccagcccgacgtgcagcggctggacgaggcggcggcgctggccgaggcgcaggagcgtgcgcgggaggcggccttatga

SEQ ID NO: 344041 - DNA, 1020 bp, Pseudomonas aeruginosa
atgagcgccgtgccgaacgagccgttgtcttgcgccgccacctcgctggaccggcgcatccgcatgttgcgcacggcgatggggccgctgatcgccaccgcgctggaagacccggacgtggtggaagtgatgctgaacccggatggcgcgctgtggctcgaccggctgtcgtcgggccgcgccgccaccggcgagtcactgtctgccgccgatggcgaacgcatcatccgcctggtggcggcccatgtgggcacggaggtgcatcgcggccggccgctgctgaccgccgagctgccggaaaccggcgagcgcttcgagggcatcttgccgccggcggcgccgggcccggccttcgccctgcgcaagcgcgccgtgggcgtgatcggcctggccgactatgtgagcgacggcatcctgtccgagccgcaggccgcgttcctgcgccgcgcggtgcgcgagcgccagaacatcctgatcgccggcggcaccagtaccggcaagaccacgctggccaacgcgctgctggccgagatcgccgataccggcgaccgcgtgctggtgctcgaagacacggtggaattgcagtgcgcggcgcgcgaccacgttccgctgcgcacccgcgccggcgtggtgtcgatgaccgagctggtgcgcgccaccatgcgcctgcgccccgaccgggtgatcgtcggcgaggtgcgcggcggtgaagcactggacctcatcaaagtgtggggcaccggccaccccggcggcatcgccacgctgcacgccagctccgcccacggtgcgctcttgcgcctggagcaactgattctcgaagtcgccctgaccccgccgcgcgcgctgatcgccgaggcggtgaacgtgatcgtgttcatcgccgggcgcggccgtgcccggcatgtgcagaccgtcgcccgcgtgtgcggctgcgacggccacggctaccagctcgacgacgcgctggcgcagccacttccttccccgtcctcaacccaccctggagaactgccatga

SEQ ID NO: 344042 - DNA, 741 bp, Pseudomonas aeruginosa
atgaagacccgtgtgctttccgtttcgctcgccgccgccgtgctggcgggctcgctgctggccgtgcagccggcgacggcgttcaccgtcatcgacccgaccaacctgatccagaacacgctgaccgcgatccgcacgctggagcagatcaacaaccaggtgcgccagctccagaacgaggcgcagatgctcatcaaccaggcgcgcaacctggccggcctcgactacaacgtggtcaaccggctgcgctcgacgctggcgaccaccgaacggctgatcgccgaggcgcagggcctggcctacgacgtggcgcacatggatcaggagttcgcccggctgtacccgcacgagtacgccgccagcgtcagcggcgaccgcatggcgcaggatgcgcgcgaacgctggcgccacacgctcgatggcctgcacacggcgatgcgcgtgcaggcgcaggtgtcgcagaacctcagcgaagacgaaggcgtgctggccgatctggtggcccagagccagtcggccggtggcgcgctgcaagccatgcaggcgaccaaccaactgctggccttgcaggccaagcaggcgatccaggcacaacagctccagttgacgcaggaccgcgccgcgtcgctggagctggcgcgccatgcggcggccaccgagcgcgcccgcgaggtgcggcggcgcttcctcggcgaaggcacgccgtacacgccgcagcccgtgcgcttctacggccactga

SEQ ID NO: 344043 - DNA, 318 bp, Pseudomonas aeruginosa
atgaagcccgccttcgtgatgctggccctgttcgcgctgaccgcctgcggcccggagccatcgaccgatgccgtcgaggcgctggcggtcgatccggtgcggctcaaggcggtgcgccaacagtgccaggtggaccgcacgctggtgggggaagccgcctgccaggatgccgccgaggcgttccgccggcgtttcctgaccggcgccgccgggccggacgagcacccggcgcccgccgagccgctgcccatcccgccgagcttcgacgaacccggcgacgatgaggaaggcgaccaccctgcggaggtgtcgccatga

SEQ ID NO: 344044 - DNA, 1386 bp, Pseudomonas aeruginosa
atgaacgacgtatcggtgatcgaccgctttctcgacgttttctccacctacatcgactcggggttcggcctgctgggcggcgagatcgcttttctcaccgccaccctgatcgtgatcgacatgaccctggccggtttgtactgggccatgagccacgccaccggccagggcgacgacgtgatcgccaagctgctgcgcaaggtgctctacgtcggcgccttcgcctacatcctcggcaacttcaactggctggcgggcatcgtgttccgttcgttcgccgggttggggctgatggcctcgggctcgacgctttccgaagccgagttcctgcaaccgggccggctggccaaggtgggcatcgacgccgccgagccgatcatggagcagatcggcgacatgacgggctttcccggcgtgttcgtgaacctcgacagcatcacggtgctgttcctggcctggctggtggtgatcctcaccttcttcatcctggcggtgcagcttttcatcacgctgatcgagttcaagctgaccacgctggccggcttcgtgctggtgccgttcgcgctgtggaacaagaccgcgtttctcgccgagaaggtgctgggcaacgtggtgtcgtcgggcatcaaggtgttggtgctggcggtgatcgtcggcatcgggaccggcctgttcgccgagttccagaccgtgcccgatgaaccgtccatcgaccacgcgctggtggtgatgctggcctcgctggcgatgctggcgctggggatcttcgggccgggcatcgccaccgggctgattgccggtggcccgcagcttggcgcgggtgcgatggccggtgccgcgctcggcgtggccggcacggccgttgcggcgggcgcggtggccactggtgtgggcggtgccgtcgtcgccggtgcgcgcatggcgcccggcgccgcccgcctggccgccggtggcgcgcgctcgatggcgtccaccgccagcggtgcgaagtcggcctaccaggccggttcggcaggcgcgggtggcggcctcaagggcgcggcggcgggtctcggcaatgtcgcccgcacgggcgcgcagtcggtcggccagaaggtcgccgccggtgcccgctcgctaaaggcgcgggccgccgctgccatgcagcccgaggccgccgcctcgacggctggggcgggcggcggcgctgccgcttcgacggcctcggccgcccagggcggtgcggacgccgcacccgccagtaccgatcaacccgcctgggccaagcgcctgcaacgccgccagcagctttcccatgccgccaccaccgtcgcgcacacgctgcgcggtggcgacggcggcggcgcgggcgctggccccagcctgcgcgatccctcgaactcataa

SEQ ID NO: 344045 - DNA, 1296 bp, Pseudomonas aeruginosa
atgagccaggacgatacccccgacatggcaccggctggcgcggctccgaagctggcgccggagcaggtcgccctgcgcgcccagccgcgcccggtcacgcgcctgaaccggcgcatgttggcggtgctggtcggcggcgtggccgccgccgtgctgggcgcgacgatctggtcgctgcaagccccgcaacgccgtggcgcgagcgagccgaccgagctgtacaacgtcgatcgcgtgtcgcgctccgaagggctggcgcagttgcccgccgactactcgcaactgccgcccgcgctgccgccggaggtgccgatgctgggcgatcccttgcccggcgacctgggcgggccgatcctgcgcgccgagcagcgcgcgcagggctatccaccatccggccacgacccggccgaggccgagcgcctggcgcgcttgaaggaggccgaggaagcggcggcttcgtcggtgttcttccgcacgagcacgcagcgcgccacggcggcgacgccagcccaggccgccgcgcctgcattcgcgtcgaacgcggccttcgacccgctggcggccgggccggcctcgacggccgcgcagtcgctcgaccccaccgccgtgcagaaccggcaggagcagaaggaggcgtttctgtcacaagccggttccacgcaaacccgtaattccgggaatctgcaaatgccggtgtcgccgtatcaggtgatggccggcacggtgatccccgccgcgctggtgacgggcatcaaatccgacctgccgggcgacgtgatcgccacggtgacggaaacggtctacgacacggccaccggccgttatccgctgatcccgcagggctcgcgcctgatgggccgctacaacagccaggtcagttacgggcagacgcgcatccagatggtgtggcaccgcatcatcctgccggacacctcatcggttcagctcgacaatctggtgggcagcgacccggccggctacgccggcctggaggatggcgtcgattggcattgggatcggatcttcgccggcgcggcgctgaccacgctgctcggcatcggcgccgagctggccgcccccgagaaccgccaggacggcaaccgcgtcatcatcgccggccgcgacagcgtgcaggacacggtgaaccagatcggccaggaggtgacgcgccgcaacctgaacatccagcccaccttgaccaaccggcccggcctgccggtgcgcgtcatcgtcaaccgcgacctggtgcttcagccgtaccagccgctgttcttcaacaggggagcatcacgatga

SEQ ID NO: 344046 - DNA, 216 bp, Pseudomonas aeruginosa
atgagcacgaacaaactgcggctcgggccgctgccgtccagcaccagcatgaagctgaccttcacatgcccggccagcctcaaggccgacctcgaccgctacgccgcgctgcacgcgcaaacctacggcgaagcggtcgatgccgtgacgctgattccgcacatgctggaagcgttcatgataggcgaccgaaacttcaagcgatcctcaaggtga

SEQ ID NO: 344047 - DNA, 1254 bp, Pseudomonas aeruginosa
atgactgagcgcgggacgagcgccttgatcgtcacttttgcccccgaagctgccgaaccggtgatcgactttgcgtcgatctttggcaaagtcgagcctccgaaggtttcgatcgacacaattcagtgcgcgacgccagaacttagaactaaggtctacgattacgtcgatcggcatggcgctaaaacgccacatctgttccgcctgcgcaagatgctcgacgatatgcctgacggggagttcttcctgctcctgccaacgccaccatcctcaacggctgagcagtttcgctatgaacaggtactgcaccagctcaatcatccgcaagagcaacctctggatgaacacttgcaggtctttggccgcttgcttgagcaatatgacctgtgcatccctcgcaccgacaaacatttcaacattggtaatgccaagaaggcggaccgggtttgtcgattctgtggtagatcaacgaagaccggggcgcgattcgacaaggaagcccatgccattccggccgcactgggcaacaagtaccttaagctcgccgacgaatgcgacgattgcaaccagtacttcggagacaagatcgagcccaccctcgtcgaacttctcaacatccagcgtgtgtttctgggcattgaagctcgcgggtcattgcctacagttaaatttcccggggggaggctattcagtgacggtaagaacgacaagatgatggttgttgtatccgagaagatttctgaagatgcatccggtgtactaagcgcgcaactaggcaagggaaagcccatagtcccgcagaatttctaccgggctctgagcaaaatcgccctctccgtcatcccgaaaaaagaacttcctgcgctgacgaagacgatccgctgggtacgctacggcgaatcttcagacacgcctttgcctaggatcgccgctgcggtggtaatgctcccccccgacccatcagcccagatcaccttgtacatccgcagagagcctcatccgaagatgcctcacgttgtgtgcgagtttcgactggggtgctacatgtacgtctatgccctgcctttctccgagcgcgatgaaggaagcctgttgggattcttcgaggaagaggacttcaagaaaacgttccgccattacgcatctgtgtcctcctggagccaacaggactacagcgggaatcaggaaatccaggtggtccaaaacattaggctgcaacctcgcaacgcaccggatagtgggcaatcatcttga

SEQ ID NO: 344048 - DNA, 246 bp, Pseudomonas aeruginosa
atgaaaagccgaaccatacggaccaaggcgcaaatgctaggcgacctggtgacgagctacctcggtgccatccatgacctggcttccgctgtccaccaagacatggggttcgatggatcggccgatccggctcctcgccttactggtgaccagcgggaagcgatccttctgtcgatcaccacgcttgtcactctggcccacggtgatctggtcgacctgctgactgagatggaggttccggcatga

SEQ ID NO: 344049 - DNA, 129 bp, Pseudomonas aeruginosa
atgaccaaccccacccagatttaccgacacatcctgcctatcgttgggttcctccgcaggtgcgatctgaccacccgcctcaagcgcaagctgcggacgctggtgcagcgcctggagcgtgcgcaatga

SEQ ID NO: 344050 - DNA, 540 bp, Pseudomonas aeruginosa
atgacccaatccctgcacggcaaggtcgttgccgccctggtgaccgacggtttcgaacaggtcgaactgaccggtccgaaaaaagccctggaagacgccggcgccacggtaaggattctttccgacaaggccggcgaggtgcgcggctggaaccatcaccagccagccgaggccttccgcgtcgacggcaccttcgaagacgccagcctggacgactacgacgccctgctgctgcccggcggggtgatcaattccgaccagatccgcagcctggccaaggcccaggaactggcgatccgcgccgaacaggcgagcaagccggtggcggtgatctgccacggcgcctggctgctgatctccgccggcctggtgcagggtcgtaccttgaccagttggccgtcgctcaaggacgacatcaacaacgccggcggccactgggtggaccaggaggtagcggtggacggcaagctggtgagcagccgcaaacccgaagacatcccggccttcaaccgtcgattcatcgaaatcctcgccggctga

SEQ ID NO: 344051 - DNA, 987 bp, Pseudomonas aeruginosa
atgttcagtcagtgggtgttcctgtccgtccttgctcttgccgtaccctcgttcgcctgggcggaggatgcggtgtccgacctcgccaaggagcagtccaaggccgagcagggcgacaagcgcggcgatgaactgttcgccgaattcacccgcctccgccaggccgccgagacgggggagccgcaggctctgttcgatttcggcgcctacttctaccagcaacagaactacgccagcgcgcgcgaatggtggggcaaggcggccgctgcggggatggtccgcgcgcagatccaactggccatgctctatcgcgatggtgacggcgggccacaggacaagaccgaggcggcacgctggttccggaaggccgcggagcagggggatgccgccgcccagaatgaaatgggcgttctctactggagaggcgaaggggtcgaccaggaccgggtgaaggccgggacctggttcgaacgcgcggcggccagcggtagcgaagacgccgaaaccaatctgggatggttctacctggacgactcgcaaggcgtctattccgccacttcagacgaggaagccgccctgctggaccgttatgccggcagccgggaaaaggccttccagtggttctgcaaggctgcgacccagggagatgcccgtgcccagttcaaggtgggcgaggcctactggaacggttccggtgccgggatgaacaagctgcaagcgcggctctggctggaaaaggccgcacagcagcaggatgcggatgccatcgcctggttggagagcgccgcgaacgcagcctggtacacccgcctggaaaactggattcacgctgcgctggatggagagctgtccggcgtcgccgactgctccggtgccgccgatcgccggcactccggccgaggcatggagggcgccccgtctgacccggaggcggtggaagccagtgcggaggatgcgcagcaggcggttgaagcggcgagccagtga

SEQ ID NO: 344052 - DNA, 597 bp, Pseudomonas aeruginosa
atgcaattgaatgtgaacggcgctcaggctatcgaagtctccgagcgtacctttggtggcgaattcaacgagaccctggtgcaccaggcagtcgtggcctacatggctggcggccgtcagggcagcaaggcgcagaagactcgctccgaagtctctggtggtggcaagaagccgtggcgtcagaagggcaccggtcgtgctggcaccatccgtagccccatctggcgtgggggcggcaccactttcgccgctaaaccgcgtagccacgaacagaagctgaacaagaagatgtaccgcgcagcactgcgctccatccttgccgagctcgttcgtctggaccgtctggtcgtcgttgccgacttcgctgtcgatgcaccgaaaaccaagggcctggttgccaagctggacaccctgggtctgaaagacgtgctgatcgtgaccgatggtgtcgacgagaacctgtacctcgctgcgcgcaatctggcgcacgtcgatgtacgtgatgtccaaggttccgaccccgtcagcctgatcgcctacgacaaggtgctggtcaccgtgtccgccgtgaagaagttcgaggagctgctgggatga

SEQ ID NO: 344053 - DNA, 750 bp, Pseudomonas aeruginosa
atggaagatgctgccgcttatgagaggcttggggtagatgggggatggtggactattcctccaaataatcagagaaaagaggaggtcgtagttggacgggttaagaagtctgagctgaaagcactttattcgaactacttggtggcacagggtaaacctgcccgcattatatatgataggttaatgggggctgctcccggagagcgatgcccatactgtggtattgggcgtgtcagcactctagatcattatcttcctaagtcgaaatttcctcgtttgtcagttttggttgctaatttggtgccgtcttgtcgagactgcaatatgggcgggaaaagtacctctgttgcttctagagcaggtgcgcagcctattcatccatattacgatggtgactattttaactcagcgcaatggttattttgcgaggttcaacatactcggcccgcggctatttcattttatgctgatcctcctgctatatggccagattttgctagagaaagaacaaggtctcatatgttggcatttgatttgaatgctcggttctctgttgaagcggcagaggagctatcacatataaggcaaatgtttattgcgtattatgagggtgcttcggctgatgagcgtggacagcatctactgaatatggagggcgcagaacgtcagatttatcctaattcatggaaaagagcattatatcaagcgttaggaaatagtcggtggttctgcgaagtggggtatcgatag

SEQ ID NO: 344054 - DNA, 1551 bp, Pseudomonas aeruginosa
atgaagattaatttctttaaaaaatcaggtggaggcggtactccacggaagctggccgcttacttgaggcctaataattgggatgattacagttttaaaactttattctatttgacggtttatgatgctcacggggtggagcatgacattggtaacgtaaagataggttacgttaaccaaccgcacggatggactgagaagtccttgtctgaacatttcgaatttttatctgaggaatatttttccttaggtcaagatgtcgagtattatgagaatttgcaaaaaaaactatccccagagttggttgagcagattcttgttgggcttcgagatgttgcttatgatgaaaatatatacgcaatagctaaagaggagttggtgttcaatgactccctaatgcgtggtgtaagtgtcgccaccattaacgtccagtaccgcagggttatagcgggtggagctgtactcacgtcatttgactttagttattctcgagcggctactagtgtaataggtggtgctaaattaagttttaaggttgttccgagttcaaagccacctaccaatatgcatgttttaattggccggaatggcgtggggaagacaactctattgaatggcatgattcggtcaataattcagggagttggttcggaagggggtgggggggaatttattgataatgatccttggagcggtggatctatcagttcagagtatttcagtagtgttgtctcggtttcatttagcgcatttgatccgttcattccgccccgggatcgagttaataaagctgagggtacatgttactattatataggtcttaaagactccaattcgataaagtcggatggttcgtatagcctaaaaacaatgatagaactttctcttgagtttgtaaggagtctgagagtttgctttagcttggagaggaaaaagtcgcattgggtaaaagctattagaaggcttgaatcagattcaaattttcaaagcatgaatcttcccgctctcgcggaagagtttgaacctgaggaggcttatagaagagcagattatttgtttgcaaaaatgagctctgggcatgcgattgttttacttactgttactcggctggttgaaactttagaagagaaaactttggttcttcttgatgaacctgaaagccatcttcatcctcctttattatctgcttttactagggctatgtctgatctgcttacggatagaaatggtgtggcaattattgcaacccactctccagtcgtattgcaggaagtgcctagttcttgtgtttggaaagttagacgttccaattctttgacgtatgctgaaagacctgagtcagagacatttgctgagaatgttggtgtattgactcgagaggtatttggactagaggttgctaaatcaggcttttatgatcttttggctcagtccatttcagaaggtaagagctatcaggagatatttgagggttacggtgggcaactcggatttgaagggcaggccctacttagggctcttattaaaacccgagaggatgatgttttgtga

SEQ ID NO: 344055 - DNA, 1053 bp, Pseudomonas aeruginosa
ttggatctggagctaaagaaatttaaagatatagacttgacggatcctttctttgactcattaaagtcttcctataaagagtttgtagagtggtttgaacgtaagggtaatgaaaaggcttatgtgttcttaaagagcagcggagctctagatgggtttctttatttgaagttggaagatggcttagttgatgatgttttgccgccgcttccctctgctaagcgtcttaaggtcggcactatgaaaataaacgctcatggcaccaagatgggcgaaagatttataaaaaaaataatcgatcatgccatttctttcgctgttgacgaagtgtatgtgacagtattcaaagagcatgaagggctgattcagcttcttaagaagtatggttttatgcagcagggcgtcaagaaaactcttaatggggttgagttggctctggttaagaatatgaaatcaaattatgtctctcagtttcaaagctatcctttggttagcttgaaaggagtgcggtgctatgttgtggccatcgaccctagatggcatactcggctcttgcccgattcaatgttgagtaatgaaagttcagatattgttgaagatatatcttctgctaacagtattcacaaaatttatatggctggtatgcagggcatggagaacttgcgtgctggagacgtcattgttatctatcgtatgagcgatgggcaagggcccgcccactacagatcggtagccacatctattggagtagtagaggaatatcgccatatatcgaatttttcttgcaaacaagaatttttccgatactgtgagcctcacagtgtttttaaggctccagaattggaacggctatggatgagaaagaattacccacatgttttcaaattctcatacaatttggctttgaaaaagaaagtgacacgtcaggttcttattgaagaactaggatttccaggcggaaatcaatactggggtttttttgagattcccgcatctcatgttaaggctgtggcaaaaagggggatgattcatgaaggtcttattgtcgattaa

SEQ ID NO: 344056 - DNA, 318 bp, Pseudomonas aeruginosa; identical to SEQ ID NO: 82646

SEQ ID NO: 344057 - DNA, 261 bp, Pseudomonas aeruginosa
atgaccatgaagcagatcgccccattcctgttggtcgccgcgctgtccgcttgcggccagtccgaaacaccgaaacaggcaaccaatgtaccgaccgtggaagagctggtcgcagatcctgcgcgcctgagggagctgcgccgccagtgcaagaccgaacgcccgacgatgggagacgtgctgtgcaaccgggtggccgaggcgacgaacaagcgcttctttggctatggaaacacgccctacacgccgccgaagttctga

SEQ ID NO: 344058 - DNA, 1602 bp, Pseudomonas aeruginosa
atgactgactccacaaggactgattccgtcatgcttcaaacgccatcccgcatccgaccatgcctacgtcggatgccacatctggtactgctccctttggtggcgttgacgctggcagcttgcgcagtagggccgaattacaaggcacctgccgcgccccaggcagtgacgtatgcccgccaagaccccgttgccgtgtcccagcttgtaccggaggccgatgcgcaattctggcgggaactggatgacccggtgctgcactctttggtggagaatgctcttcacgccaatcacgacatccgcatagcactgtcgcgctacgagcaagccagcgcactgtcgcgcgaacgtcgccaagactactatccgacgctgggcgcgtccggtgaaatcagtacccagcgcgccagtgctgcacaagcaccggatgcgtcccgctccgaccgggataacgatctgcattcggctggcctatccgtgatctgggaattggacttctttggccgagtgcggcgcagcgtggaatcgcagcgcgccgagaccgaggccagcgcagccgacctggcgggcgtacaagtggctatggtggccgagttgaccgacgcctatttccgcttgcgcggcttgcaagtgcaattacaggtcgcgcgggacaacgaaatcaaccaagccgaaacgctgcggctgatcgaggtcttgttcgagaacggccggggcacgtcgttcgatgccgaccgcgcccgcacgcaattggcgctgacacgctcgcgcattccgccgcttgaagctgaggctgctgtggccgcccaccgcattgccgtgctcactggccgcacgcctgcggcgatggccgaagtgctggatcaccccgcagccttgcctgagctgcccgcccagatcaacgccggtgcaccgggcgatctactgcgtcgccgtcccgatgtggctgcggcagaacgtaggctggctgcggccactgcgcgtatcggcgtagccatggcagacctgttccctcgctttacgttgggagggctgatcggcacgcaggcgttgggctttggttcgttgttcgagcgtgatagtgaaacgcgaatgatctcgctcggtgtgggtggttccttcctagacgtgggccgggtgcggtcgcgcatcgcggcggccaattcagccactgccgaaaacttggcggtatacgagcgcacggtgctgcgcgccatggaagaaaccgagaacgcgctggtacgcctatcgcgcgcgcagaccgagaacgccatgctggtacaggcgaccgaggccagccgccgggcagccaagacggctcgcctgcaatttgagggcggcgccatccatgttttggatgtgctggaggccgaacgttcacgcttggagtccgaagacttgctggcacaaagcgccacccgcagggcgacggcgttggtggcggtctacaagacgctggccggcggctggtcacacgccttgcccggaccgcagggcgaggcagtcgcgcagcgccacaaaagcggcgacaggcctgaactggatgaactcggtgagatgagcggctacaacgctgcgactctcaaacggcctttgtactga

SEQ ID NO: 344059 - DNA, 3168 bp, Pseudomonas aeruginosa
atgaactttgcccgctttttcgtggacaggccgatttttgcggccgtgctgtccatcatcattttcgtggttgggttgatcgcgatcccgctcttgcccgtcagcgagtacccggaagtcgtgccacccagcgtacaggttcgcgccacgtatcctggcgcaaatccgcgcgaaatcgccgacacggtagccgcaccactggaggcatccatcaccggcgtggaaaacatgctctacatgaagtccgtggccggtagtgatggcgtgttggtgctgaccgtcaccttccgtcctggcaccgatcccgacgacgcccaggtcaaggtacagaaccgtgtcgcccaggcagagccgcgtcttcccgaagcggtgcgccagcaaggtgtggtgaccgtcaaacagttccccaacgaaacgctggtcgtgcagttgcgctcgccgggcgatcgctatgacgcgctgtacctgcgcaactatgccgtgctccatgtacgcgacgagttggcacgcatccagggggtgggcgatgccacgatcatcggctctggcgactacgccatgcgcttatggctggaccccgacaaaattgcggcgctgggtatgaccgccggcgatgtggtcgaagccgtgcgcgaacagaacgtccaggtctcggccggtcaactaggtgcgccgcccaacccctcgggaagcgacttcctcctgtccatcaatgcgcagggccggctggtgacggaagaagagttcggcgacgtcatcgtcaagaccggatcgcagggtcaggtcacccggctgcgagatgtggcgcgcgtggaaatggacgcatccagctactcgctgatgtcgttgctcaacaacaagcctgctgtcgcgatctctgtctttgaagccccgggcgccaatgccatcgaaatctcggatcaagtccgcgcgaagatggacgagttggccaagcgctttcccgagggagtggaatggtcgttggagtatgactcaactgtcttcgtgcgtcagtcgatcaaggcggtcgtcaacactctgctggaagccatcggactggtggtgctggtggtgatcttgttccttcagacttggcgtgcctccatcatcccactgctagccgtgccggtgtcggtggtaggcaccttcgccgtgctgctgatgctgggcttttccatcaatacgctcacgctttttggactcgtgcttgccatcgggatcgtggtggacgacgcgatcgtggtggtggaaaacgtcgagcgcaacatcgccgaagggctggcgccgctggctgcggcccatcaggccatgcgcgaagtcagtggccccatcgtcgccatctcgctggtgctgtgctcggtattcgtgcctatggcattcctgtccggcgtgacagggcagttctacaaacagttcgccgtcaccattgcgatctccacggtaatttcggccatcaactcgctgacgctgtcgcctgcgctggccgcgcgcctgcttcgcccgcatggtgccgcgccagacctgcccacgcgggtgctggatcgcagtctgggctggatattacggccgttcaaccgtttcttcctgcgcagcgcggatggctatggaaacagcgtgtcgcgcatcctcgggcggcgtggtgcggtgtttctcgtctacatcgcgctactggtggcgacgggagctgtgttcaaggccgtccctggcggattcatccccatgcaggacaagctgtatctcctcggtgtcatccagctacccgagggtgcatccctggagcgcacggaagcgctggtccgccgtgtgagcgacatcgcgctcaagaccgatggcgtctacaacgccgtgcagttcccgggcatgaacggcttgcagttgaccaacacgtccaatagcggcctagtgtatttcgtactcaagcccatcaatgagcgcaagcacactgcaaccgagattgcggaacagttgaacgagcgcttcgctcaggagcaggacggtctggcctttgccatcatgccgccccctgtcatggggctgggcgcgggttccgggttctctctttacgtgcaggatcgcaaccgtgagggctatgccgcattgcagacggcgaccaccgagctggcgacggccatctcgcaagaaccgggattccaatatccgatcagttcctatcaggccaatgtgccgcagcttgacgccgtagtggaccgcaccaaggcgaaggcacagggcgtggccgtgaccgatcttttcgatacgctgcaagtgtacctgggttcggcgtatgtcaacgacttcacgcgctttggccgcaccttccgggtgatggctcaggcggacgcaccgttccgcagttctgtcgaggacgtggtcaaactgcgcacccgcaacgccaatggcgacatggtgcccatcggcagcatggtggacgtgcgcaagacattcggccccgatcccgtcatccgcttcaacggctatccatctgccgacctgattggtgagtttgatccgcgtctggtgtcgtcatcgcaggcattgcagcaagtgcaatccattgcagacaaggtgctgccgccaggcatgcaactggagtggaccgacctcagctaccagcaggtcacgcaaagcaataccgcgctggtggtgttcccgctggcggtactgttggtcttcctggtgctggcggcactgtacgaaagctggacgttgccgctggccgtcatcctgatcgtgcccatgagcctgttgtcggccatgacgggcgtgtggctcgcgggtggtgacagcaacattttcgtgcagattggcttgatagtgctgattggtctggcctccaagaatgccattctgatcgtggagttcgcccgtgaacttgagcgcaaggggcacagcatcctcgatgccgcgctggaggcatcacgccttcgtctgcgcccgatcatcatgacttccatcgccttcatcgctggcgtggtgccgctgatggtcggttccggcgcaggcgcggagattcgccaggttatgggagtgactgtgttcgccggcatgctcggcgtgaccttgttcggtttattcctgactcctgttttctacgtcgcgttacgcaggctcgcgacgcgcaagccacgtcgccaggcaaatgtcgccatggaggccacccatgactga

SEQ ID NO: 344060 - DNA, 1203 bp, Pseudomonas aeruginosa
atgagcacattgccttaccttgcggtcctgccttcctggcgccgcgccttgccgttagctgcggcgagcttgctggcgctgtccctagctggctgcaatagcgacgccgccgacgcggtcgccgcccctccacccacggtcagcgtggcacctgtgtcggtgcgcaagatcgtccaatgggatgagttcaatggccgcgtcgaggcggtggaaggcgttgcgctgcggccacgtgtgagtggctacatcgacagggtcaattacgaagagggccagatcgtcaaacgtggcgacgtgctgttcgagattgacgctcgcagttaccgtgctgctctggctcgcgcggaagcagacttggcccgcgcccgcacgcaggccgcactggcacgtagcgaagcggcccgtgctcaaaagctggcttcgttgcaagcagcctccaccgaggagttggagcagcgccacgccgccgccgatcaggcccaagccaacgtgcagttcgcccaagccgcagtcgagaccgccaagttggatctgtcgttcacccaggtacgttcgcccatcacaggccgcgccggacgtgcactggtcacggcaggcaacttggtgagtgctgacggccaggccagcatcctgaccaccgtagtctcgctgaacccggtgcacgtgcattttgatgtcgacgagcgtacctatctgcgctacgcccacatggctcgcaacggagagcgccccgaccagcgcagcgaaagtatcccggtgcaggtgggcctggtcggcgagaacggctatccacacgccggaaacgtggacttcgtggacaaccgtgtcgatgcggccaccggcaccatccgcgcacgcgccaccctggtcaatcccgacggcctgcttacgccgggcctctatgcccgagtgcgcctgccgggtagcggcagtttcgaggccatgctgatcgacgacaaggccatcctgaccgaccagagccgcaagtacgtgtatgtgatcgatgagaacaacaccgcccagcgccgcgacatcacgctgggacgcaaggccgaaggcctgcgcatcgtcgaggaaggtctaaatcccggcgaccgcgtgatcgtcaacggcatccagaaggtttctgtcggcatgccagtgacggcccaggacattgaaatggcgcctgcaggccgacaaaacgcccaggcgagcgaatga

SEQ ID NO: 344061 - DNA, 606 bp, Pseudomonas aeruginosa
atggcacaaaagcgtgcagagatgattgaggaaacgcgggccaagctcatcagtgccgcccgcgctgcgttcgcaaccgtgggatatgcggacagttcaatggatgagctgacggcccaagccggactgacgcgcggagcgctctatcaccacttcggtggaaagaaagggctgctggaggcggtcatcgcccagattgatgcagagatatctggccgactggccgtcatcgtcgaggaggcggagtccacctgggacggcttcgttcaggagtgcattggctacatcaagatggccgtcgagcccgaagtccagcggatcgtcctgctggacgggccagcggttctgggcgatccctcccagtggcccagccagaacgtgtgcatcgtgaatacgcgccgcagcctccagaagttgatcgaggaggcagtcatacgccccgtcgatcccctggcgacggcccgcctgataaacggggcgctgctgggcgcatcgctgtggatcgccagcgcagacgacccacgcgccgcttccgaaaaagccgtgcagggatttcttgtactggtggcgggcttgcggcgggacacctctcccgcgcagccgtaa

SEQ ID NO: 344062 - DNA, 741 bp, Pseudomonas aeruginosa
atgggctacgtcacggcacagacgtcgcgcatcgcgctcgcaactggcagcgtcatcaccactctgcgtcatcccttgcttgtggccaaagcagcagcctcgatcgaccgcttgtcaaatcagcgcctggtgctaggtatcgccacgggtgatcggccaacagagttcccggccttcggtcagacaatggatgcgcgagccacgttgttccaagaagcattgactgtgttgcgtcaagcctggcgtgaggacttcccggaaatctccacgccccgagtgaacttgtcgggtgcagatacgctgccgaaaccggcgttgagagacattcccgtgatggtgactggtcattcacgccagtcggtcgaatggattgccgagcatggggatggctggctttactatccccaaaatatcgcgcagcaagccatgacaatcaagaattggcggtcgctgacaccaagattcaaacccttcacgcaatccttctatattgacctgtcggagaatcccgatgaacccccgtcgcccatcttcctcgggtttcgggctggtcaccgattctttactgactacttcagccgcttgcgcgatattggggttaatcatattggcctcaacctgaaatacgcgacacgtccggcgcatgagattgttcaggaacttggcgagcatgtcgtaccgcactttccggcgcacgctactgcccatttggaggaggcgcaggatgctgcacggtcataa

SEQ ID NO: 344063 - DNA, 888 bp, Pseudomonas aeruginosa
atgctgcacggtcataaaatttttgcctgggatctcgcttttacttcttcggctggtacctatgccttcgatgtccaatgcgaaatgctggctgacatcggttatgacggcctgacctatgccgtctggtcagggagccgatgggaaaccgcaaagcgtctatccaccgtgaaagatcgtttcggtttggaggtctttagcgtgtatgtggtgatcgacctggatcagggcccacagcatcccatcaacgcaggactcttgcggatgcttgaggagatggaaggcgtgaaggctgtcaatcttggaatcaggacggcaggccacggttcaaatcatcgaaaggcaccggacgacaaggtattgcaggacttccttggtcgggcacttgagatttgcgcacggcgcggaattaacatcctgctgtattttcatctgggcttctggatggatcattactccattgcggcacagatctgctcggtcgtgaaccatccgaatctcggcatcgtgtttccaagctatcactggtatggctacgaaaccaatgcaggcagcccgacggagggctatcaggcagtagacccgacgccagcgttaatggcgtcaacacccttcatgcgggaattgactctcagcggcgcaacccgcagcccacttggctggagtcgtattgccactttcgaggcgctcgatgcaggagaactcgacaacttcgcacttcttggacttgccaagtcgttcggttataccggccccgtcggctatgacggcacattggtcggggggaatccatacagcacgctcaaacgctcctatgacgcgatggacgagatgttgggtttgctgacaaagcaccctggttgggccaagcgtgaaacgcacccgtaa

SEQ ID NO: 344064 - DNA, 246 bp, Pseudomonas aeruginosa
gtgcactgccgtagcgccacggggaccgaccgtttcgatcatgaagcctggcgatttgatgaagtcaatgggttgccctatctgcaaggggcgcaggcttcgctgttctgtgagctgattgaacaccatgcagtcggcacccactcggtaatgctggccagtgtcgagcgtgtgctcacatctgcatatgccgatccactcgtctatctggatggccgcttccgggccatagatccaacccgttga

SEQ ID NO: 344065 - DNA, 597 bp, Pseudomonas aeruginosa
atgaccgccatttccactgctgacgccgcgccgcgtcctcgctcgccccgcgcaggtttgcgcgctcgcatcgtgctcgcaggcctgtccgcctgcggccttgctgcgttggcctgggcgtccttcgtgcatccgctgccgcgcctgatctacaacccgtccgacagcgtggcggtcggctggtatcgcgccgatccgctgggagacggcaccggcccgctgccacgtcctttgtccgtgggcagcatcgttctgaccacgctgccgccagatgccgccgcgctggctgcgcagcgcggctacctgcctgcgcgcgtgccgctgctcaagcgcgtgggcgccgtcgcgccgcaaactgtgtgcgtgttcgatgcgctggtctggatcgacggcgtgccggtggccgccgtgctgcctgccgaccggctgggccgtccgctgccctcatggcggcagtgccgccagcttcggccgggcgaactgttcctcttgagcgtgaccaacccggcgtcgttcgacagtcggtatttcgggccggtcagcgcatccgccgtgatcggcgttgcgcgcccggtctggctggagtcgcgcccatga

SEQ ID NO: 344066 - DNA, 792 bp, Pseudomonas aeruginosa
atggtcaaccctcatcacgttgcccactggtatcccaccgccgcctatctgtacatcctgggattggacatgctggcgctggcctgggagtatctgcgcaggcatcccgattaccggctcgactggatgcgccaccgtcgccggtcacaggccgcacaacatgcggcgctgcgctggggcttgcgcctgctggaagaccctgccctggatgcgcgcgacgcgcacccggcctggctgcccggcaatgccgccgtggtgcagctccatcccgaccccgatccgccgccggatgcggccgtgttcgcgttctggcgcatccctggccacaagcaactgctgcacgacggcaagggactggcgctgatcgtgcgcagtcccggccattgttcgcgcttcgcgctcgctccgggtctggaggacggcatggcggtcgtccatgctcatcgcggaagtggtgacggcggcgctgccgcgcctgcccgctgccatgcgcccgtgccggacgccgcgctggcccatgccatgcccaggccacctcctgccgcactgttggagctgcacaccttgcaggcgctcgacgcgaccctggcgggtgcgtccttacgcgaagtgggcgaagggctgttcggtgccgacgccgtggccgactggtacagcgacggcgggctgcgctcgaaggtgcgccgcctggtgcggcgcggcgatgcgctgatgcgcggcggctatcgccgcctagcacagcttgcgccgcttgagaagggtcgttttgaagaggacgcaaaacgaccctga

SEQ ID NO: 344067 - DNA, 348 bp, Pseudomonas aeruginosa
atgaaccgactcatcaccgaggacgagcgcaggcagttgctggcccacggccaggctcgcgcccgtggcgaggccatcgacccgctgcccgtggcgcggctattcactccggacgcgcatctcatctggctgctggccgcgctcgatcctgtcgatggcgatacggcctggggactgatcgacctggggctggggatgcccgaactgggctccgtgaagctgtccgatctggcatccatcgtcgggccgcgccagcagcccgtgatgcgggatcggtatttccaggcagcgcgcccgctgtcggaatatctgcggctggcccaggagaacggttccatcctcgattga

SEQ ID NO: 344068 - DNA, 819 bp, Pseudomonas aeruginosa
atgaacaaagaacatcgtccgcatggcaaggctcctaccgcatgggaagccgacattctcaaaatccgggcctttgagatggtgctgatccttttctacatggaagatttgcggcgcttcatcatgggctccatcgaggcgaccgacaaactgcatgggctgaatcggctgagtgatggcaaacccaagaccagggaaggcaagaagctggagctggcccgcgccgtgctggtttccgaaggggtcattgaccaggcggagagcgatgaactcaaggaattggtggactaccgcaacatcattgggcacacgatccatgacctgaccgtggatgtcggagcctattctgatttgaccaggcagcgagaccccaagaccttcgagccgatgcctttgtatgactacacggccgccaagcgggccaaggcgctgcggcagaaggtgagcaaaggcatgatgaagaagttcatgatgatggcgtcgttcgacttcctggcctttgaagcggcggagaagacctacgttgcggagatcgagcggctgaagaagcgggtcaaccaaggcatcgtgaaggccaacaaggtgattgcggaaacgaaccgcatcattcaggcgatcccgaaatcagttatggaatcggcctatcccggccacccgaggaacatcaagggaaacggaaccttgagcaagcgcggcgtggagtgcgttttccagctctttgaagcccaagcaaccccgttggctgcggcttacctgatgaggatttcgcagcgctcggccacgcattggtttgccaagtggaaggccagcaaggcgtag

SEQ ID NO: 344069 - DNA, 927 bp, Pseudomonas aeruginosa
atgcccatcggcatttccgaccttgcccattctgttcgcaagaacagcgcttccgtggccgcacctgtgcagcttggccacgcgcagcaactcatcgttgctgcacttggctacaagagccttgccgcctaccaggctgcgcaggtagccgcgctcgaaccccaggatttaggcaacgtccaccacgttgtagtcgactacgaccagctcgatcagcgcgccagcgaacttggcgcggcccccacgccaagccaactgcacgagttgatcgacgcagccttcaaagagcgggcgcctcgtacacacattcacgcctctcatgcggacttcgacaactacttgcgtgagcatgtggatcaggtggtcatcgaagacgatgacgtgaacagcgagatggccaacgccaattacgatggcattgatgaggtctatttcgatttcgaggtcgagtctgaaaacgtacccgttggcggctcgctggaaatcaacctggatggccatgttggcctgggaatcgacactgagcgcccctacgcgggccacaaagtgaacgtggaaggcttcctgacagtggatcgattgggtagccagtgctttgggtcagtggactgccaagtcaccaaagcggaactcgataggaactggggagatgacgactatgatggcgagccaccgccgcgcagcgtatcgcaagcctatgccgaactgctgggcctcgaactgcatgaggttggcaatctcgccgatgtagaagcaatggagctggacggcagtagcggtgaaatggtctatggctacctcctcgacttcacggactacgcatcgcccgagatagcgcagaagatcttgcgccgccactcctcactgcgtatcgaagtcggccctggcttctttgaaggtgttcgcagcgacgactggcctcgctga

SEQ ID NO: 344070 - DNA, 1797 bp, Pseudomonas aeruginosa
atgaagctatctaaactctattcaaacaagccggatgtgttcgagcccgtggactttgctcctgggctgaacgtcgtcatggctgaaattcgtctgccggagaatcgaaacaaggacacccataatcttgggaagaccacgctggggcgtcttttggatttttgcttcctggcaggcaaagaccctaagttcttcctcttcaagcattttgacttgttcaaggatttcgtttttttccttgaaattgaactggaagacggctctttcatcacgatccgacgcagcgtagaagacgcaaccaagattgccttcaagcagcatgaagcaggccaccaggacttgtcggctttggcgctcgcggaatggggacatcgggacgttccttttgaacgcgcacgcgaactgcttgacggcctgctcgactggcgtgctctcaagccgtggtcgtaccggaaagcgcttggttacctgctgcgttcgcaagaggattttcgtgaagttttccaacttcgcaagttcgcctctaaacacgccgactggaagccattccttgcacatcttctgggcttcgatgccaagctgatcgctgaccactatgcgaaagagcacgaactcgccaaaaagcaggagacagcgcaaaccatcaaaaatgaactaggaggctcggtcgaggacatcagcaaaattgaaggcattcttctgctcaagcaaaaagacgcagagaagaagcaagtgctgttggatgctttcgattttcgcgcccaagacaaagatcgcaccaaaaaggtggttgatgaagtcgatgagcgaattgccgcgctgaattcggaacgttattccttgagtcaaaacaggaagaaggtgcaagcatcgttgcaggaagatcaaatccttttcagtcccgatgaggcgcagaggttgtttggcgaagccggcgtgttgttccaggggcagatcaagaaagatttccagcagttgattgctttcaatcgggccatcacggatgagcgccgtggctatctccaagaggagttcgcggaaatcgaaggtgagctgaagcgggtgaatgcagaactgaatgcgctaggaaaaaagcgctcggaaatgctctccttcctgagcggaacggatgttttcaccaagtacaaacagctctcggatgagatggtgacgttgcgcgcggacatcacatcgttggagcaccagaaaggccacttgcatcgcctccaggagttgcgcgctgagattcgatccttgacggaagagcgcgaccatttgcaagcgcggatcgaagccgacgtggataagcagaactcggatcaggcaagcccgttctccacgatccgcgttttcttcagcgaaattgttgaggaagtcattgatcgcaaggcactgttgagcgtggcgatcaaccaggtaggtcacctggacttcaaagcggaaattcttgatggatcgggcaacgccactagtgctgacctggggcacacataccgcaagctgctgtgtgtcgctttcgatatggccgtgctgcgagcacacctgagcgagaagttcccacgctttgtgtatcacgacggagtgttggagtcgctggatgaccgcaagaaagagaatttgctgacggttgtacgtcgctatgcagatttgggattgcagcaggtcatcacgctgatcgactcagatttgcctgtacgtgcagaagatgatgcccctgtttttacagcaggcgaaatcgtcgtcacgctgcacgatgagggcgatcgcggccgaattttcaagatgagagggtggtaa

SEQ ID NO: 344071 - DNA, 249 bp, Pseudomonas aeruginosa
atgctgcggccaaccaaacactcacatcctgatcgcacagttattaatgtttctctgctgctcctgtcgcgactgaaagatcgtcgtgtcgatgaatacgatgtgctgcgcaaatttgcgaagaagcacgtcgtgggtggcgatgtacttttcctgcccgcgctcaactttctctatttgatgggcttagttgaatatcgccccaagactgacgcagtggaatacgtggggccaaatgaagctatctaa

SEQ ID NO: 344072 - DNA, 981 bp, Pseudomonas aeruginosa
atgaagtttgcttatgaagatttgagcgacgatcagttcgaggtgctgatcgtgctcttgtgccaacgcttgctcggtatcgccgttcagggattcgcaaaagggccggatggcgggcgtgacgcaaaattcgtcggcacggccgagctgcatcctagcaagacagccccgtgggtaggcacagtcatcgttcaggccaagcataccaacgggtacaaccgcagtttttcggaactggacttctacagcacgtctagcagcaatacggtggtcggcaaagaagtaccacgcatcaagaagctgcgcgaggccaagcaactcgaccactacatgctgtttgcgaatcgccgcctgaccggcaattccgagacggaaatccgtgaccacatcgccgccgaatgcggcgtccctgcttcgtctatctatctttgcggcctggaacaactggaactttggctgaaacgctttccagaggtggcccaggaggcgaatttggatgcggtggactcgccgttgattgttagtccagatgatcttgcagaggttgtccaggcgctagcacggcagaaggatggtttgacggcgttactcgacgacccacccaccgtacgtgtgacgtatgaggaaaagaacacgctgaacaatatgacggcagcgtacgcaaaggagcagaggcgaaaatacctgaaggaaacggcgcaaattcgcacgtttcttgctgcgccagagaatatcgaattgctgcgcatgtacgaatctgtggtcgatgagtttcagctcaagattcttgcgaagcgcaaggactaccagaccttcgacgaggtcatggagtatctggtagatctgctgttcaatcgtgacccggttcttcggcagcacgcgcacaagcgactgacgcgagccattcttttctacatgtattggaattgtgacattggggaggtggatgatgctgcggccaaccaaacactcacatcctga

SEQ ID NO: 344073 - DNA, 321 bp, Pseudomonas aeruginosa; identical to SEQ ID NO: 292085

SEQ ID NO: 344074 - DNA, 360 bp, Pseudomonas aeruginosa
atggttcagaaacgcaagctgctgtactgggaaggctcctcgaagaaggacttcaaggagtttcccgtcgatgtacagaaggacatgggtgtggcgttgttcatcgttcagttgggcagcacaccacattcggccaagccctggagggggttgggctccggtgtgtacgaattggtggaagaccatcggagcgatactttccgggcggtctatacagtgaagatgggcgatgcggtacatgtactacatgcgttccagaagaagtccaagtccggcatcgccacgccgcagccggacgtggaactgatcgagaagcggttgaaggccgtgctggcccgtcacaagacgagcgggagataa

SEQ ID NO: 344075 - DNA, 624 bp, Pseudomonas aeruginosa
atgaatcaacggatcggctacgcccgagtttcgacagatgaccagaacctggatttgcaacgcgacgcgctgcacctcgcgggagttcagtccatctacgaagagaccgcaagcggcaagactgccggccgaccggagcttgaccattgtctgaaagcattgcgcgccggtgacacgctagtggtgtggaggctggatcggcttggccgcagtttgcccgacctcgtgcacatcgtcgccgagttggaagaaaagggaatcggcttcgagagcatcgccgagaagatcgagacgacgagcgcagccgggaagctggtcttccatgtcttcgctgcgttggcggagttcgagcgcaacttgatacgggagcgcacccgggcaggcttggctgccgcacgtgcgcgaggccgggccggtggtcgcaagccgaagctggacacacgacaagttcgggagatcaagcggctgatggctgacccgaccatcccggtcagtcagatcgcgcaacgctacaaggtctcacggacaaccatttacaaggtggccccccgcgcccacgcatcggctgttgacacacaggcgaatgcaagcggggcgaagtcacacaggcgagatgcctcatga

SEQ ID NO: 344076 - DNA, 1839 bp, Pseudomonas aeruginosa
atgcgtgtagcccggatagaaatagagaacttcaggggcataaaacaggcgaagctgttatttcccaagcatggcgttcttatcggcgacaacaataccggaaagacaacgatcctggaggccctggatctcgttcttgggccggatcgcctcaatcgccaacccgcaattgacgagcatgacttcttcggaggcatttatgctcaaatgcccgacgcccctccggaaaacggtggagccgacggcgctgctccgcccgagcctggtgaagaagtcgcagaggactcggcaccggactcggcaccgaaaatcgtcatagaggcgacgatcgccgacctgactgacgagcagaaggggaaatttggagattacatcgaattctgggactcggctgtggacaagttctacgaggcgcccaatcctgccggcgttgatgctgcttcgatcacagaggcactccgcgttactttccatggttggtacgacaaagaagaggatgacttcgagggtgccacctacttcacccgcagcctcaccgaaggcgacaagcccgacccgttttccaggaagcacaagcagctttgtggcttcctatacctccgctccattcgcaccggctcgcgagcccttagcctagaacgcggcagcttgctcgacatcattctgcgcttgaaagaggtccggccgcagatgtgggaggctactctcaccacactttccaatattgtggtcgccagcgatccagcgctgggcatctcccctgtattagagagtatcaacacggcgctgaagaaatatgtccccaaagaatggggggttgagcctcatctcaaggtgtcgaatctcactcgcgaacacctaagaaaggttattacagccttcatcgccaccggcgacggcatgcatgcggcaccgttctaccggcaaggtacaggcacgatcaacatgcttgtcctggcaatgctgtcccagatcgccgagagcaagcagaacgtcatatttgccatggaggaacctgaaacagctatacctccctatgcgcagaaacggatcattcacgaagtacgcaaactggcatcccaagccctctttacgtcccattcgccctatgtgctagaggagttcgagacggatgaaaccgttgtgctcgctcgtgacgcttcgggccggatggggcaaagggctattgcgctgcccgacaatgtgaaaccgaagcgctacaggcaggagtttcgcacccgcttctgtgaaggtttacttgctcgccgcgttcttctggcggaaggaccaactgagtattcagcgttcccggtggtgtgccgacgcctcgcagagatcaatccaaagagctatctctccctcgaagcgctcgggatatgtacagttgacgcagacggcgagaaaaacgtccccggcatggcgcagctctacaaagctctggggaagcgaacctttgcgatttgcgacaagcaagaggaagcaaacaaggcactaattgaggcacaggtcgaactgctgctcatgcacgacgaaaagggctttgaggatttggtcctgaaaggcacaacggaagaggccctgaagcgatttgcaaagcagttggactggccaacacacttggcgcagaaatacccggatccggaagcacaggcggaagctgcactgagagattacttcttttggtcgaagggcaactggggcactgccgactttcttgctcaatgcagcgaagaagagattccggagtggcttcgtgatgccgcgctgaaattgaaagcggcttgtacgcccgctcacgctgaagcagacgcggaagctggtgccgatggaactgactga

SEQ ID NO: 344077 - DNA, 1815 bp, Pseudomonas aeruginosa
atggaactgactgagggtcaactgaatgtaatggagtcggatgggcacctgcttgtcacaggtggacctgggtcgggtaagacaaccatctccatcatcaaggcgtcccagatcgcggagcaacatgttcgcccaggtcagaaaattctgtttctcagcttcgcgcgtgcgactgtttcccgcgtggtggaggccatcgaatacgaacagaagatcccggccgccacgaaaaatttcatcgacgtcgatacctatcatgcattcttctggcgcaccttaaagacacatggctatctgataggcctgccccgtagattagggattctcaccccacccaatgaggccatcgctctctcgggggtcaggtcgggcttcccagccagaaatctcacggatgaacagaaggaagccaagaaagctgctgaagcggcggagcgtatccgtctggcaacgaacgaggggcggatttgcttcgacctcttcgctccgtatgtgggggatattctgcatggtagcgagcgcatccggcgtctcatcgcaaccatgtatccggtcatcattcttgacgagtttcaggacaccaacggcgcgcaatggcgcgtggttcaggcgttgggcaagtcgtgcaggctgatcgccctcgccgacccagagcaacgaatttacgactggataggtgccgatcccgcacgccttgatcatttccgggatgcattcgccccaacggcggttgacctcagtaccgacaatcacagaagcgcagggacggaaattgccatttttggcaatgacctactcaccggtgaatttcgccagcaagaatacaagggtgtctcgtttgatgtctttgacccgttttccggtccagcgatgaccaagctggtgacaacaatctatgcggctcgccagcgtttgatgactcaaggcattgagaactggtctctggcgattcttgttccgaccaagaaattgacgcgcctggtgtctgacgctttgcgtcaccctccggccgggatgacggaggtgtttcacacggcaaccatcgagatggaggccgcgatccttggagctgaagtcattggccttttgatgcaaccttccggagatagtcgtcacttcgcgcagttcattgacctattgtgcaactacttccaaggcaaagatgggagtgagccgacgcaaggggcgttgaaggaggctgcgagcatccggggcgcttatgaagagttgttggcaagccgtgctaatggcaaagccatccgcaggaacagtatcctcgtcaacgtgttgacggtatacgatcaggttcgcgcccttgtcttgacgggcgatccagacaaggattggcgcgctgtgcggcgcgttctggaagatggtgcatgcaaacgcctgaaagagatcgcggaggaggttcgaaacatccgcctactggaccgaggtactcaacttcgccaacaactttctcaggattggcgagacaacggatatcgcaatgcgctggcgatcattcgacaagccttcgtccaagagcacttttctacgagcgctaagcccgaatccggcgttgtcgtgatgaacatgcacaaagcgaaggggaaacagttcgacgaggtaatcatttttgaaggttggccgaagcgggcaaaagggaagatcgtcgcaaacacagaccgcattgtgcgcttcaactccagagatcaaatcaatgaccaagcacgacagaactttcgggtcagtgtcacgagagggaggcggcagacgacgatcttgacgcctaaaggcgatccttgcgtgttgctcgttggtgaggcgtga

SEQ ID NO: 344078 - DNA, 1080 bp, Pseudomonas aeruginosa
atgagttggaaattcgtgctgtatgactgggccggtctgaatctcgcgctatttcaagcgatcaatgctgggacgcccgcagtgctgtggccgctggcgtcgctcttcagcctaatcggcagctactggaccgcgcccctaaccgtactgggcctatgggcatggtcaaaggcatcttccgatccggcccgcgttcggctagtgcggagccgtttgttgcacttcggcgtcgcgttcttgctggccttggcggcggcgtcggccttgaagtggtggctcgactttccgcgcccgcatgcggtgctgggcgcagcggtgcatgtcatcggcgctgtggagctgcattacagcctgcccagcgggcacgcgacctacgcggcgctggtggccgctgcgttgtggccgctgctggcctggcgcggtcgcggttgcctgttgatgtatgccgccctggttggctggtcacgcatggcggcaggtatgcacttcccgggcgacgtgctggcaggctgggggctgggcttgggctgcaccgtgctctcgcggtggctgatctcgttcgccactgcggcgcgcgcaaaggggctgctcgcgccggccttgccgtggtacggggtggctgcggcagcggttgctgctgatcaggcagccaagctctcgatcgaacgggcgttcgtctatggcaaacaggtcgagatcacgccgttcttcaacctcgtgcatgtgctcaatccgggcgccgcgttcagctttttggccggagcgagtggctggcaacgttacttcttcatcacgttaggactgctcgtcgcggtctggctcatccgacaactgaagcagacgctgccgcgcttcgaagccgtcggctacagcctcattcttggcggggcacttggcaacgtggtggatcgcctgctgcgcggtcaggttgtggacttcctcgacttccactggcagggcatgcactggcccgcgttcaacctcgccgatgttgcgatctccatcggagtcggctgtttgatcgctaggttccttgaaattcgagacaagggtaacaagggtagattgttgtcaggatga

SEQ ID NO: 344079 - DNA, 2403 bp, Pseudomonas aeruginosa
atgagttgcggatcaagcgggtacggttgtgctgatgctcccgttctcaaatcagaaacacagaccagcgccactaccggggtggcggttgccgtctatcacatcgagaacatggactgccccacggaagaagcgctgatccggggcaagctgggcggcgtgcccggcgtggtggagctcgatttcaacctgatgcggcgcaccttgaccgtgcggcacaccctggcgtcgttggcccccgtggaacaagccttggcggctgtcgatatgcaggcggtgcgacaggacgaccgctcggcggtgcagaccacccgccttgccatcgccaagatggattgtccgtccgaggaggcgctgatccgcagcaatctcgccacgctggccggtgtgatcgatctcgacttcaacctgatgcaacgcacgctcaccgtgcgccatgccccagccgtgctgcctgacgtgctgggtgctctgcaatcgctcggcttcgaggcccaagtgctcgaagaagccaaccgcacgcctgcgtcatcagcaccggggcagaccacgacccattggtggccgctcggcatctcgctagtcgccgctgttgcggcggaggccgtgtactggctccaaggcggcaatcattggtcggtgatggttctggctctggtcgccatcctcaccggtggcctgtccacctacaagaaaggatggattgccctcaagaaccgcaacctcaacatgaacgccctgatgtcgattgccgtcaccggggccatgttgatcgggcactggccggaggcggcgatggtgatggtgttgttcgctttggccgaggtcatcgaggccaagtcgctggaccgcgcccgcaacgccatcgcggggctgctcgatctggccccggagcgagccacggtgcaacagcctgatggctcatggcgcgaggtggatgccaagcaggttgcgatcggcagccgggtgcgagtgcggcctggcgaacgcatcgccctcgatggggaggtcgtagaaggccgctcgaccgtgaaccaagcgccgatcaccggggagagtctgcccgtcgacaagggcctaggcgatcccgtctttgcgggttccctcaacgagtcaggctcgttcgagtaccgtgtcacggcgctggcgaacaactccacgctggcccgcatcattcatgcggtggaggccgcacaaggcagccgcgcgccgacccagcgcttcgtggatcagttcgcgcgctggtacacgcccgccgtattcgccttggccgtggtcgtcgcactggtgccgccgctctttgtgggagcggcatggctggattggatctatcgggcgctggttttgctggtgatcgcctgcccgtgcgcgctggtgatttcgacacccgtcagcatcgtcagcgggttggccgcagcggcacgccacggcattctcatcaagggcggcgtgtatttggaagagggccgcaagctgcgctggctggccttggacaagaccggcaccatcacccacggcaagcccgcgcagaccgacttcgttgccttgggtaacgcttcgccccagcacgcccgtagtctcgcggccagcctggccagccgctccgaccatccggtgtccaaggcaatcgcgcaagccgcccttgccgacggcgtggcgctgcgcgaagtcgcggaattcgccgcattgcccggccgaggcgtgcgcggcgtgatcgacggagtggcctatcacctcggcaaccatcggatgctcgacgagctgggacattgctcccccgcaatggaacaacgcatcaccgcactggaagccgagggtaagacggcggtgatgctggtggagcccgagggcgtgcaggcgctcatggcagtggccgacaccatcaaggacagcagccggagcgccgtggccgaactgcacgcgctgggcatccagaccatgatgctgaccggcgacaacccacacaccgccaaggcgattgccacacaggccgggatcgaccgcgcacaaggcaacctgctccccgatgacaaactgcgcgagatcgaagcgcttgcccagtccggcggggtcggcatggtcggtgatggaatcaacgacgctccggcgttggctcgtgccgacattggcttcgcgatgggcgcggcgggcaccgacacggccatcgagacggccgacgtggcgctgatggacgatgacctgcgcaagattccgaccttcgtgcggctgtcccgcaccacggcacaggtgctcacacagaacatcgcgcttgcgctgggcatcaaggccgtgttcctagtgctcaccttcaccggccacgcgaccatgtggatggcggtgttcgccgacatgggagctagcctgctggtggtgggcaatggcttgaggctgctgcgccgatga

SEQ ID NO: 344080 - DNA, 444 bp, Pseudomonas aeruginosa
atggaaatcaggatcggcgaactggcgcagcgcacgggatgcgaggtcgtgaccattcgttactacgaaaaggaagggctattgcctgagccggcgcgaagcagcgggaactatcggctgtacggcgaggagcaagtcaagcgcatgcagttcattcgccactgccgttcgctggacatgtcgctgggcgagattcggaccttactgaacctgtgggacagccccacccaggattgcggaaaagtgaatgccctgctggatgaccatatccggcaggtggaggcgcgggtcgaggcgttgttgcagctaaggctgcatttgacggccttgcgtgaaaagtgcgccggcgcacgacccgtcgaggcgtgcggcattcttcaagggctcgtgaattgttcttgccataccgtcagcacccgagacgaggccagcgctggcgtttag

SEQ ID NO: 344081 - DNA, 1245 bp, Pseudomonas aeruginosa
atgcgtagctgtatatcagtcttccggccggccttgctggcactgttcgtctcggcaagcggctcggccggcgccgacgcggctgtggaaaacccgcggatcggccgtgccgccgatctctatgaactgatcccggaataccagccggacacctaccggaacatggacaaggtctatccgacccgggttatccacaaggggaccaaggtccgtccgctgccggcgggtgtggccatcgcgccgcgctaccggatcggcggcgaggaatacggcgtcgacgatttcatgcggcgcaaccgcgttggcggcgtgctggtcctcaaggatggcaaggtcgccctggagcgctacggcctgggcaacgacgaacggacgcgctggacctcgttctcggtggtcaagtcgatctcctcgaccctggtgggcgccgccgtgcagcagggcctgctggctctcgaccagcctgtggacaagtacctgccgagcctggccggctccgcctaccagggggtgacggtggagcaggtcctgcagatgagttccggggtccgctggaacgagacctatcgcgatccgaagtccgaccgccggcagatgttcgacgcccagctcgccgaacgtcccggtggcatcctgcggctgctggcgagcctgccgcggcagtacccgagcggtacccacttcacctacagcaccggcgagtcgcacctgcagagtgagctgctgcacgcggcgacccgcattccggtgagcgactacctgtccgagcggatctgggcgcgaatgggcatggagagcgacggcttctggcaactggaatcgccggccgggcaagagatcggcagcagcggcttgagcgcgaccctgcgcgactatggccgcttcggccagttcgtcctcgagaacggggtgatcgatggcgaacgtatcctccccgaaggttgggtcgatcgtgccagtcgcgtcgaggcttcttcccacctggccccgggcaagctctacgatggcgaatacgcgctcggctacggctaccagtggtggaccttcccggtgggcgccaaggccctgcccgagcatgacggtggggccttcgaagcccagggcatcttcggccagtacctctacatcaaccgcaaggagaagatcgtggcggtggtctggagcgcctggccgaagccggagatggacgatcgcgaggaggagacctatgccttccttggcgcggcggtgaaagccctgcgctag

SEQ ID NO: 344082 - DNA, 1611 bp, Pseudomonas aeruginosa
atgaaccgggaactgttgcgagtggaaaacctgagcgtcgcctatggcgacacgcaggtcgtgaaggggatcgacttcagcctgcgcgccggcgagaccctggccctggtcggcgagtccggctccggcaagtcgcagaccgcccacgccctgctgcgcctgctgccgggcgcggcgcgcctgggcggcagcgtgcgcctggacggcgaggaactgctcgccctgtcgccgcaggcattgctggcgattcgtgggcagcgcatcggcatggtgttccaggagccgatgacctcgctcaatccattgcagcgcatcggccgccaggtcggcgagggcctgcgcctgcatcgccgcctgcgtggcgccgcgctgcgcgggcgggtactggaactgctcgaactggccggcctcgagcagccgcgacgcctgctcgaggcctatccgcaccagctctccggcggccagcgacagcgagtgatgctggccatggcgctggcttgcgagccgcaactgctgatcgccgacgaaccgaccacggctctcgacgtcaccgtgcagaaacgcctcctggagctgctgcaaagcttgcagcgacggctgggcatggcgaccctgctgatcagccacgacctcaacctggtgcgccgggtcgccgatcgggtctgcgtgatgcgcgatggccagatcgtcgaggagaacgcctgcgagacgctgttccgctcgccccggcatccctacacgcgcctgctgatcgaggccgagccgggtgggctggcggagccggtggcgtgccgcgagacctgcctggaggtgcgcgcgctgagcctcgactaccccgcgcccggcggctggctgcgccggcgcgcgggactgcgcgcggtgcacgaggtcagcctgcggctgcgccgtggcagcaccctggggatcgtcggcgaaagcggttcgggcaagtcctccctcggccaggcgctgctgcgcctgttgccggccgaagggcagatcctgttccagggcgagcgcctcgaccggctgcacggcaagcgcctgttgccattgcgccggcagttccaggcggtgttccaggacccctacggcagcctcaacccgcgccttagcgtggaacagatcgtcggcgaaggcctgcgtatccatggcatcggcgatgccggcgaacgccgcgcgcgggtgctggaggcactgcgcgaggtcggtctcgacgagccttgcctggaacgctatccccacgagttttccggcggccagcgccagcgcatcgccatcgcccgcgcgctggtgctgaagccggcgctgatcctgctcgacgaaccgacctcggcgctcgaccgcagcgtgcagtgccaggtggtcgagctgctgcgtcggttgcagcgtcgccacgggctgagctacctgttcatcagccacgacctggctgtggtacgcgccctggcccacgacatcctggtgctcaaggacggccgggtggtggagcagggcagcgccgctgcgctgttcagccagccgcgccacccctatacccgcgagttgctcggagcgatacccgcgctgcgcctggaagagcatctgcgggtggccgggctgggaatctga

SEQ ID NO: 344083 - DNA, 3804 bp, Pseudomonas aeruginosa
gtgctgcagagccgcggcgacctcagcctcgacgccggacgcgacgtcaccgtcgccgccgtcgaggaccgccagggccagacccgctggagcacgtcgcggctccagagcgtgacccagctcggcgccgaagtcagcgccgggcgggacctgaacgtcagcgccggccgcgacttgacggcggtggccagcaccctcgaagcgcgccgcgacatcgccctctccgccgggcgcgacgtgaccctggcggcggcggcgaacgaggagcacagcttcgccaccggcaagaaggtgacggcgaagaacgatcgggtggaacaccaatcgaccgtggtcagcgccggcggcgatctcagcgtgcaaggcggcaatgacgtgaccttcgttgccagtcaggcgaaggccagcaacgaggcctatctgtacgccggcaacgacctcaatctgctggcggctcacgacgaaagctattcctactactcgaagaagaaaaaaggctcgttcgggcgcagcagtagccggatgagcgagagcgaagccagtaccgtggtgtcgtcgtcgatccaggcgggacaaggggcggaactggtcgccaagcgtgacgtcaacgtcgaggcctcttccgcctccagcacgaagggcgagctggcggtcgtggcggggcgcgatgtgaacctcacggcagctgagaacagctactccagcgtgtccgcgaaatccaagtccggaggcttggggctgtcatccaccagcaaggccaacgcccagtcctcttcctacaccagcgttcagggcgccacgttgagtggcgataccaccgtggtgcaggcgggaagggacatctcggtggccgccagcaatgtggtttctaccgggaagactgcgctgcgtgccggcaacgacatcatcatcgacagcgtggcggagacgtcggagtcgcatcgcagcgagtcgaagaagaagtccggcctgatgagttccggagggatcggcatcacgctcggcacggcgaagaatgcctcgacacaggacacccgtaccgtcgtcaaccagggcagcaccattggcagtgtgctcggcgatgtcgacatgcgggcgggcaagaacctgtctatcacggcttcggatgtggtggccggcaaggacatcaacctcgtcgggcagaacgtgagcattctcgctgccgacaaccagaacgtcagcgagcagacccgcaagaccagcaagagcggcttgacgctggccttgtcgggaacggtcggtagcgcaatcgacgccacctaccagaatgccaagcaggccaggaacgaagacgacagtcgcctttccgcgttgcaggggatcaaggccggcttgagcggcgtccaggcctggcaggcagctcagcagaacggcggcatgacgggcgagaacagcgcgcagttcgtcggcatcagcgcttcgctgggctcgcagaagtccagctctcggcagcgccaggagcagcagatcagccagggaagtacgctcaccgccggtggcaacctgaacattatcgccacgggttccggggctgtcggcgaagacggcgacttgcgcgtgcaaggcagcaagctgcaggctggcaaggacctccaactgatcgccaaccgcgacgtcgtgctggaagccgcggccaatacgcagaagctcgatggcaagaacaagagcagcggcggcgctgtcggggtaagcgtcggcgttggttcgggcgaggctggcatcagcattttcgccaacgccaacaagggcgccggcaaggaaatcggcaacggcaccacctggaccgaaaccaccctggacgcgggccagaaggccagcttggtcagcgggcgcgacaccacgctgaaaggggcgcaggtcaatggtgaaagcatcctggcgaaagtgggtcgtgaccttaccctgcaaagcctgcaggatcgcgattactacgattccaagcagaagaacgtcggtggtggggcgagtttggctatcgttggccagggtggcggcgccaacttgagtctcagccagagcaagctgcattcgaagtacgacagcgtgcaggagcagaccgggctgttcgccggcaagggcggcttccaggtggaggtgggcaagcacacgcagctggatggcagcgtgatcgccagcaccgccgaagccgagaagaatcgcctgagcacaggctccttgggctggagcgagatccgtaacaaggccgagtacaagagccaacttcagagtgtcagtgtcagcagcgccaacgatggcgccggtgcgttcgtcagcaacatgcctagcggcatgctcattgcctacaaccacggcgatagtgccagcggtaccacgggttcggcgatatccgaaggcaccctggaggttcgcgatccggcgcgccggcaacaggatgtggcgacgctcagccgtgacccgagccgcgccaacgatagcgtcagtccgatcttcgacaaggagaaagagcagaagcgtctgcagcaggtccaactgatcggcgagatcggcacccaggccatggatatcctgcggacgcagggccaactcgacgccgacaaggcggcgcgggccgaactggaagcgcggggtatctccgcgccggacgccggcgccagcgagcggcaagtcgaggactaccgcaaagcgcttctgggcacgaatgcctaccaggacatcatgggcaagtacggcaccggaggcgactaccagaaggccgcccaggcggtgaccgcagccttgcaagggctggccggcggcgacattggctcggcgttggcgggagcttcctcgccctatgtggcgggcgtgatcaagcaggtggcaggcgacaatgacacggcgcggatcatggcccacgcggttcttggcgcggtggttgcgcaggcccagggcaattcggctgctgcggggggcgcaggagcggcggggagcgaactggcggcgcaggtgatcagcgagcgactgtacggaacccgggacagctcgacgctgaacgaagcgcagaagcagactatcaccgcgctggccagcctggccggcggattggccggctccgttgtcgatgggagcagcggaggagccattgccggggccgcaggcgggaagaacgcaacggaaaacaacttccttggcggcggaaccccgccgggcttgatcagctatggtcaggcagcgagctccttgaccgagtacatgcgcaagaacggggcgacagccgaggagatcacccaggcgcaacgtgatctggcccagggacagggcttcgatggcgtacagccagcgaatgagttcatcaaggcctggggcgaggccatggttgcggaggctgccggccttgggattgttgcggggttgggtaggtttgggttgtgggttgggaaaggggcgggagaaactgccatagccgttcccggtcgtgtccaatctcgtataaatattgccaatggccgcacagcaactacaccgcttcgcgataccggaaggccagtatctgcggggtttgaccatgttctacaagggcatttcggagtagaggtttccaactcacggtctgtgttcactatcactccgagtgaactgaaggatgtacttcagagcagccctgttgttaagtcaccagttatggcattgcctgatgggcaattcgtgaggaccgttgatgtaggtaaagtaattggcactaccaatttaaaggatggaggagtgcccacctcggtattaaaaatatttactgacagagctggtaatttgatcacaaccttcccaatcaaggcggtggattaa

SEQ ID NO: 344084 - DNA, 1776 bp, Pseudomonas aeruginosa
atgctcaccgtcggcgtgggccaggatttcaaaccgcactaccagatcctctcgggcaaggaaaacaccgtcgcacggctgaaggagctgcggcagaaagccgtggaaatctacgtcgcatcggacccggatcgcgaaggcgaaagcatcggctggcacatcctccaggctgccgggatcaagaactacaagcgcgttgccttcaaggaaatcaccaagtcgtgcatcagcgccgaactcagctcgccgcgtcgcctggacctcccgaaggtcgcctcgcaggaatgccgtcgcgtcatcgatcgcctggtggggtatctggtcacgccagagctgcggcgcgtgatgggcaggccaaccaccgccgggcgcgtgcagtccgtcgcggtgtacctggtggtcctgcgagagcgagagattcgcgccttcacagcaatcaagcacttcggggtggaactggccttcgtttcgcccagcgacggccgcacctggaaggcggagtgggatccagtgcccacgtttgccagcaaggagttcccgtatgtccaggatcgtcaactcgcagaactggtgggggctatacgtaatgtcatcgtcgagacctgcattgatggcgaagaaaccgatgcgcctccggcaccgttcatctcctcctcgctccagatggccgccgggaatgcgctgaagtggtcacccgacaagacgatgaaggtcgcccagcggctgtatgaacaggggctcatcacctaccaccggacggacaaccccaatatttcgaaggactcgatgccggatatccgtgctgtcgccaaagccttggggctgaagtgtgtagagcaacagcgaatgttcaaagcggaccaagacgctcaggaaggccaccccgccatcacccctaccgactggatggccgctaccgccggtgaaactgctgatgagcaggcgctgtaccagctcattcgagttcgcgcgcttgccagccagatcgaagctgccgtgtacgcagtgagaaccatcaccctcctgggcgtcggccccgacaaaaagccgctgcgcttcggcgccaaagggaagctgttgaacgtgcctggctggagaaaactgctgcagggcgatgatgccgaggagcaaaagaacgaaacgccttcaagcccaatcccggcgctggagccaggccagatactcaaggtctacagcggcgaggtcctggagaagaaaaccaccccacccaaacgcttcaccgatgccagcctggtgggcgagatgaagcgccgcgggattggccggccatcctcctacgcctcgatcgtgaagaacatcatcgacaagggccaggtgcagatgaagggccgaagcctgatccccggcgagctgggcgaggccaccatagcgctcctggagcacaacttcagcttcctcagcctcgactttacccgcaacctcgaggtcgccctggaccggatcgccaacagcgaggacacctacatgaacgtggtccagcagttctaccagctcctgcagtcagagctgcagacgctccgcgcgctccccagcgcacaggacgaaccacgcgcaagctccaccgccaatgtctcctcggcgccgaccagcgacttcctttgcggcaagtgcggtctgcccctggttcaccgcaagaaagccggcaaaggcggcttcgacttctggggttgcagcggctatcgaacaacagggtgcaaggttagctaccccaccaagagcggccggcctgacttcgacaacccgcgcgggctatag

SEQ ID NO: 344085 - DNA, 2670 bp, Pseudomonas aeruginosa
atgatggaaagtctgcgaccaaagcagtcaggggctcgatccttggtctttgcagaaggggcgcagtgggtccgcgctgactttcatctgcatacccgagcggaccgcgaattcaagtacgcgggcgatgacaacttctacaacagcaactatgttgatgcgttggagaaagcgggcatccgactgggcgtcatcaccaatcacaacaagtttgacttcgatgaattcaaagcgctgcgcaagacggcccagaagaagggtattgcgctgctgccaggcgtcgagttgtcggtcaatgacggggcaaatggcattcacacacttgttgtgttctccgacgaatggattgaggagcacaactacatcaaccccttcctgaccagtgcattcgaaggcaaaacgcccgcgcagtacgagcaggagaacgggcgcacctcttggtcgctgctggagactatcaagaagctggaaggctatcaccgggacttcttccttgtcttcgctcatgtcgaagctccgagtggcttgtgggcggagctggatggcggccgactgactgagttggggcaaaatgagttcttccggcgcagaacgctggcttttcagaaggtacgcacgcacgacggcgcaggcaaagacaaaccctgccgcaccaagattcaaagctggctacagagctggtaccccgccgaactggaaggcagcgaccccaagagtgtcgatgaaatcggtcgaggcaaagccagctacctgaagctgggcgagctgtccttcgaggcggtcaagtttgccttgagcgatcccgctgggcgggtagccatggagccgcccaagcatcaagcgtcccacatccgcagcatccgtttcgacggcggcattctcgacgggcaggtgctgcatttctcttccgaactcaacacgttgatcggcatccggggcagcggcaaatcatccatcctggaggcagtgcgctacgccctcgacattccacgtggcgagaaggcgcaggacaccaagtacaaggatgagttgatccgccataccctcggcagcggcggcaaggtgacgttgacggcctgcgatgtgtatgggcaggaattcaccatctcccgtatcttccgcgaagcgccgaacgtctacttggacggcaagttgcagcctggcgtgtctatccgagagaccgtactgcgtcgcccgatctattttggtcagaaggacctctccagcaccggtgaaggcttcgagactgatctggtagaaaaactggttggcgagaagctgcgggtgctgcgtgacgaaatccaagcccaacgccagcgcgtgcgcgaagccgctcagcgttggctcaagttgagcaacaccgctgagcagaagcgcgattttgagacccagctcgccgatgccaactttcgtctggccaagttcgcggagcacggtgtcgcagataggctccaaaagcgacttggcttccagcaggacgccacagcgctcgcgcgcatgatggagcgggcagacggcttcatcctcgctctaggcagtctgattgccgagcatgaggacgagctgcggaacgcaacgagctacgtttccaagcagaacccggatttcttcacggcttactacgtcgagttctccaacctcgtggccaaggtcgatcagctcaagcagatcgagcaagacgcgcgagcgattgcggggcgcctcaagaccaagcagagcgagtttgaaggtgcaagcaagaaccttcaggaggagttcgcacaagtcgagcgccaactagctcaggaactcaagcaaaccggcatgacagccattcatccggacgacttcctggtccaacagcagcgcaaaaccaaggcggagcaaatgctgaaggcgctggcaaagcaggaatcacagcaaaccagcatccgcgacgcgctgtttgccgagattgacaaactcaatgaactatggctgcgcgagttcaacaccatcaaggtagagctggatcgcgtgaacgctggccacaccgccctgcagattgaatcggacttcaagggcgacaaggaagccgccatcagcttcatgcagcagctcttcaagggcagcaacatccgcgaaaccacgctgcgcgcagtgatgggggactatgccgatttcggtggcctcctgcgtgccctgccgggggcgttggcgaaggccgggagcacccccgaggtcttcgaaaagactttcatgcagaacctcaccgagttcgtcacctggcaggtgcccaaccgcttcgtcatccgctatcgcggcaaagagttgaagcaccattctctcgggcagcgcgcttcggcgctattgctgtacgtgctcagccaacgccagaacgacgtgatcatcatcgaccaaccggaagacgatctggacaaccagaccatctacgacgatgtgatcaagctgctacgggaaatgaagcctcacgctcaattcatcttcgccacccacaacgccaacttcccggtgctgggtgacgcggaacaggtgcacgcctgccagtaccaggacgagaaggtcgccacgcgaagcggcagcatcgacgcccgcccggtgcaggacgctatcatcaacatcatggaaggaggccaggaagccttcaaccgtcgcaaagaggtctacaacctatggaaaccacagagctga

SEQ ID NO: 344086 - DNA, 198 bp, Pseudomonas aeruginosa
atgaaactgcacgaagaatacgaaccgttcttcatcaccgaggacatgaccgccgagatggccgctgacggctacgagttcaatccccccggccatgccagaacgaagagcgtgcgcgacctgtacggatggcagcccggggagactctggaagaggccgttgtctggcaccagcgcaggctgtgttcattctcttga

SEQ ID NO: 344087 - DNA, 1170 bp, Pseudomonas aeruginosa
atgattccagacatcgattcccgtctcagccggaacatattgaaatccatctcgtatggcctccccctcgccgaagtggtccccgaccatacctatgcgcaactggaaacgcgcctcggcgaactgaaacgcaggtatctggagctgcgcatctcccacggcgcgcgcgagctgccgttcagcaactacctgttctacctgatcctccagtcgcgccaccaggaattcgacttcaagctgcgccagggcaactcggtggtcaccaacatccaccgtttcaagagcaagggacgcatcccgtccctgaccaccctgctcctggccgatgcggtcaacgccaagagcgagctggagctcaagcatccggacatcccgcagctcgaccgccacgctcgcgacatcgagcgctggctggccgccggcaacgtcatgccgcccagcgagcgggccctgcgcggcctggttgaggcgctggagcgcgccgctggcgaaggccgtccgttgcacctggtgagcgcggtatgcccggactactcgcactccagcgatgccgagggcaagccgcgctacaccttcgagcgagtcggcgaccagcccggcctggccggcgccaagctggtcagcgccggccaggcggtggcggagctggccagggcgcgccaggtggaaatccgccacgcgatcctcggcggcgagttcgagtacctatcgttcaaccgcaaccccgccaccggcgagacccgcgagggtttcctcggcaaggtcgagcgccagctcgagcggatcgccggggccctgccctgcccggccgcgacctgctcgttcttcgagatgtgcggcggcgaggacggctggcaccgggcccacggcgagatcgtccagcgcctggaacagggcgactacggccagaccgggctggactacccggccctggaatcgatcctcctgtcgcgcctgccgctctacgagaaatggttcgccagccagtcgcgcgagcagatctgggccagcttcgtctcccaggccgccgagtacgcattgatgggaaaactcttcggcgagcgcttcgacaacttcgtcgtgctggccgtcgatcactaccggatggagccgttctactcgttcttcgcgaccgtcccgacgctctacatccgaaccgactacctgtaa

SEQ ID NO: 344088 - DNA, 1212 bp, Pseudomonas aeruginosa
atgaacaacagcttctggaaggccggccatgcgccgaccctgttcgcggcgtttctctatttcgacctgagtttcatggtctggtacgtgctcggcccgctgggggtgcagattgccggcgacctgcaactgagcacccaacagcgcgcgatgatggtcgccacgccgatcctcgccggcgccgtactgcgcttcctgctcggcctgctggccgatcgctggtcgccgaagagcgccggcatcctcgcccaggtcatcgtcatcgccgccctcgcggccgcctggctgctgggcgtgaacagctatgcgcaggcactgctgctggggttgttcctcggcttcgccggggcatccttcgccgtggccctgccgctcgcatcgcaatggtacccgccgcaacaccagggcaaggccatgggcatcgccggcgcgggcaactccggcaccgtgctcgccgccctcttcgcccccggcctggccgccgcgttcggctggaacaatgtgttcggcttcgccctgctgccgctcgtcctgaccctcctggtgttcgccatggtcgcgcgcaacgccccgcagcggccggcgcccaaggccatgggcgattacctgaaagccctcggcgaccgcgacagctggtggttcatgttcttctacagcgtcaccttcggcggcttcctcggcctggccagcaccctgcccggctatttccacgaccagtacggcctgaacccggtgaccgccggctactacaccgccgcctgcgtcttcgccggcagcctgatgcgcccgctcggtggcgccctcgccgatcgcatcggcggcatccgcagcctgctgatggtgtacaccctggccgccatctgcatcgccgcggtcggtttccacttgcccagcgcgatggccgccctcggcctgttcgtggtcgccatgctcagtctcggtgccggcaatggcgcggtgttccagctggtaccgcagcgcttccacaaggaaatcggcgtgatgaccgggctgatcggcatggccggcggcatcggcggcttctgcctgactgccggcctcggcgcgatcaagcaaagcaccggcgactaccagctcggcctgtggctgttcgccagtctcggcgtgctggcctggttcggcctccacggggtgaagcggcgctggcgcaccacctggggctcggccgcggtcaccgccgcgcgggtctga

SEQ ID NO: 344089 - DNA, 2286 bp, Pseudomonas aeruginosa
atgaacgcagaagattccctcaagctcgcccgccgctttatcgaactacccgttgagaagcgtcgggtcttcctcgaaaccctgcgaggggagggaatcgatttctcgctgttcccgattccggccggcgtgtcttcggccgagcgcgaccgcctgtcctacgcccagcagcgcatgtggttcctctggcacctggagccacagagtggcgcctacaacctgcccagcgcggtgcgcctgaacggaccgctggatcgccaggcgctggagcgcgccttcgccagcctggtgcagcgtcatgaaaccctgcgtacggtgttcccgcgcggcgccgacgacagcctggcgcaggcgcccctgcaacgcccgctggaggttgccttcgaggattgcagcggcctgcccgaggccgagcaggaagcccgcctgcgcgaggaggcgcagcgcgagtcgttgcagccgttcgacctgtgcgaggggccgttgctgcgggtccgcctgatccgcctgggcgaggagcggcatgtgctgctgttgaccctgcatcacatcgtgtccgacggctggtcgatgaacgtgctgatcgaagaattcagtcgtttctacagtgcctatgcgactggcgcggagcccggcctgccggccttgccgatccagtacgccgattacgccctgtggcagcgcagctggctggaggccggtgagcaggagcgccagctggagtactggcgcggcaagctcggcgagcggcatccggtcctggagttgccgaccgaccacccgcgtccggcggttcccagctaccgtggcagccgttacgagttcagcatcgagccggccctggccgaggccctgcgcggcaccgcccgacgccaggggctgaccctgttcatgctgttgctcggcggcttcaatatcctcctgcaacgctatagcgggcagaccgacctgcgggtcggcgtccccatcgccaaccgcaaccgcgccgaggtggaagggctgatcggcctgttcgtcaacacccaggtgctgcgctcggtattcgacggccgcacgtcggtggcgaccctgctggccgggctcaaggacaccgtgcttggcgcccaggcccatcaggatctgccgttcgaacgcctggtcgaggcgttcaaggtcgagcgcagcctgagccacagcccgctgttccaggtgatgtacaaccaccagccgctggtggccgacatcgaggcgctggacagcgtggccggcctgagcttcggccagctcgactggaagagccgtaccacccagttcgacctgagcctggatacctacgagaagggcggccgcctgtacgccgcgctgacctacgcgaccgacctgttcgaggcgcggaccgtcgagcgcatggcgcggcattggcagaacctgctgcgcggcatgctggagaacccgcaggccagcgtcgactcgctgccgatgctcgatgccgaggagcgctaccagttgctggaaggctggaacgccactgctgccgagtacccgctgcaacgcggcgtgcaccggttgttcgaggagcaggtcgagcgcacgccgacggcgccggcgctggccttcggcgaggagcgcctggactacgccgagctgaaccgccgggccaaccgcctggcgcatgccctgatcgagcgcggggtcggcgcggaccgcctggtgggcgtggccatggagcgttccatcgagatggtcgtggccctgatggcgatcctcaaggccggcggcgcctacgtgccggtggacccggagtatcccgaggagcgccaggcctacatgctggaggacagcggcgtgcaactgctgctcagccagtcgcacctgaagctgccgctggcgcaaggtgtgcagcggatcgacctggaccaggccgatgcctggctggaaaaccatgccgagaacaatccaggggatcgagctgaacggcgagaatcttgcctatgtcatctacacctccggctccaccggcaagcccaagggtgccggcaaccgccattcggcgctgagcaaccgcttgtgctggatgcagcaggcctacggcctgggcgtcggcgacacggtgttgcagaagaccccgttcagcttcgacgtgtcggtctgggagttcttctggccgctgatgagcggggcgcgtttggtggtggcggcgccgggcgatcatcgcgatccggcgaagctggtggagctgatcaatcgcgaaggggtcgatacgctgcacttcgtgccgtcgatgctgcaggcgttcctgcaggatga

SEQ ID NO: 344090 - DNA, 1212 bp, Pseudomonas aeruginosa
atgtcgaaaaagtcccgctccagactctggttcctcgtccacagctggctggccctgcccatctggttcttcgtcctgatcgtctgcctcaccggcaccctggcggtggtcagccaggagatcgtctggctggccaacccggaaatccgtgccagcaagccaagcgactccgccgaaccgctgagctacagccaggtcctcgccagcatcaatcaggcccggcccgagctgaaggtcgaatcgatcgaacgccccgacgagtcccacttcgccctgaccgtggatgtcagccatcccgacggcagcagcgctgcgctctacgtgaatccctacacaggtgccatccagggcaagagcccgcacttcgatttccgccagttcacccgcgccctgcacggctggtggctgatgccgttcgataacggctacagctggggctggtacctggtctcgctactcggactgccgatgttggcctcgctggtcaccggtctggtggtctataaacgattctggaagggtttcttcagaccacgcctgcgcatcagccagggcgcgcgcatcttctggggggatttccaccgcctgagcggcatctggtcgatctggttcatcgccgtgatctccatcaccggcacctggttcctgatccaggcgatcctcgccgacaatcacatcactctctccagcgaaggcccgccgccggtcatcgcccgcagcgaggtgccgctctcgccttccggccagccggctgtgcagatcgacctcgacgaggccgtgcgcatcgccactcgggacatttccggcttggaagccagcgggctgttcctcccaggcaacgcctacagcccgctctatgtctatggccgcggctggtacccgctgatgtaccagtcggcagcgatcaatccctacaacggcaggatcgagtcttcccgcctgctcggcgaccgcaccccgctggagttcgtcaccgaatccatgcgccccctgcacaccggcgatttcggcggtatctgggtcaagctgatctggttcgtcttcggcctgctgctgagcatgatggtgctcagcggcctgctgatctggagcaagcgcaccgcacaggccaccgccgcgctggtcaagcgcggcaagcgcccggcgcgccagccgaaaccggccaagccggcgccggtaatggccaaccagaccgcggagggacagccatga

SEQ ID NO: 344091 - DNA, 1086 bp, Pseudomonas aeruginosa
atgtcacctctctctatacctgacctatctgtggctattggtacttcaatcgggtctgttaggcagagaaatgaagaccgcgttgctattgctaaagtgcatggagccaatggtactgaatacttcgtcacgctggtttgcgacggggtcggtggctctgatatgggagatgtcgctgcgtcaatagcgttggtggtatttctagatgagttggtttatacgagcaccaggcagcctttagaggttttagtcgctaaattggttaggcgggttgatgaccgagttagagatattttgcaagggcgcggtgctactacgttaagtgtgctggttgctgccgggaatggcgaaattgttgctactaatgtaggtgatagtcgtatttatgcatggtcgcctcaaaaagataaactcatgcaggttagcagagatgacaccttggaaaatgagttgtcagagtttgcgctcaaagatccttcggctctgcgactgagagggttaggaggaagtctctcccaagctataggagagaccgggcgtactagtgatgatcttcgtatcaagttgctggggagagagctatttcctgatggtgccgtacttgcgacggacggagcttggaagggcgcggaagacgggtttaatgctgtagtaaaaaaggcgccaactgctgctaacgtagtaagcagagctttgtcagtagcaacttggagcggtggtattgataacgcttcgttgattgcagtggagcggataagcgcgacgcttaatgcggcctatgatttctcaatcacttcgccaaaagttagtgtttggattgctaatacaaaattggtgctagttgattctgctttttcctcatctggaagatactctattcctgaggtgaaagataagccagttatgaaggcagatatacgaagggctctgagaaagaaatatgttaaagctaaaggcgagccaaaaacaccggagcaactagacttcaaaattgtagaagacgcgccgtcgcccagaaagaaagatccgcgagcagatttagaaatttccatcgagccaactccaaaaaaagaatcagatagctga

SEQ ID NO: 344092 - DNA, 1071 bp, Pseudomonas aeruginosa
atgataaacttaaccagcagatatgtgccgcttactcagactttgattagcggtgggttcggaagcgttcaaccagtccgagatacatttcttggtcgcgacgtgttattcaagtttctgcattcggggaatgatgacgcgcagcttcggaatgagatacaaatgctagctaaggttcggtctaagcatattgttgagatctacgacgttattaaggggggtgatggcaaagttcaaggtattataattgagtacctgaaaggtcggtcctttgatgacttccatctcgaagcgcttgctaaccctaccgaatatctgagagtcgtttatcaaattgcacaagctttatctgtcctgcacggctcggggatcgtgcatagagacttgaagctggataatattaagggctcatcttctggtattgtaaaactattcgacttcggtatttcagttgatggggataattaccacactgttttgaatcgtggcacattagtttatgctgcgccagagcttttcgtgccaggagcttgtataaccaaagaaatggatgtctatgctttaggcgtatgtgcctgggcactggctaccgctaagctgcctaaggttttacgtgagactcctccgcaacaaacagcggatgcaccctcaataaactcagctatggggggcgggctggcgcaagaggtcgttgacgtaattgacgcatgtttggctgtagatccacgtcgtcgtccatctgcacaaaaggtttgtgatgtgatccacaagcacttggtacgggatgaacataggggcacctttgtgtacggtagtaatgtttacctgcttcacaaaggaaacagaaatgtaactatgaaaatatcaggcgtaggtgagctgagtgtcgcttataccggtgtcagctttgaaattactggtgtagcgggggacgtctacgttaataataaggatgcggtccctggtatggagttgcacgaagcttgtgttctgacctttggtaagcctgaacgaaagtctcaacgttcatgggtcactttttcatcttcgcatcctgaggttatcctgtga

SEQ ID NO: 344093 - DNA, 1119 bp, Pseudomonas aeruginosa
gtgattcagcatcgtcttaacgccggagaagtgttggttggtcgctaccaaattttaaattatcatgcagctggcgggatgcaagaggtttattattgcctcgatcaaactctagagcggcatgccgcgctaaagattccgaaagccggggttaaagaccgtcgcttccgtcgtggtgctgagatgggagcgcgagtcaatcatcctaatattgcagccacgctagattactacgaggatgattcgttaacatttttggtagaagaatttattcctgggttagatctggggcagcggcttgccaacgaatttcactttttagatccgtatctgtgtgctcatgtggcgcaccatgttgctaaagctcttcacgaagctcacggcgtcggtatatgtcaccgcgatctgaaaccaagtaatatcatgacgtcgcctgatccatcaatcgagtcaattaagttgacagactttggaatcgctaaattagcagaatccgaaatcgcggcagagatggagctttttgctgaggacgagtctactcttgttacgtctaacacattgttgggcgctgtcccttatatggcaccagagtgctgggacgactggaagagtgcaggcatgccaatggatgtttgggcgcttggtagtgtgatatatcacttacttaatggcgcgcctccctttggtacgggacgaaatgcgattatgaatgtcgctaaatatcaagccgggacgttcaagcttactaagcccgtttggtttgggaaatatcctgacacccgtgatcttgaagataacctttgggatatcataactaagtgcctagctgttgatcctgctgatcgacctacagcaaaagatttgcttggggctttcaactttctaacatatgctagcggtgctagaaagttagggcatatcacccagtatccaatgtcttaccccggtgggggaacggctactgctgggtttattcgggatgtagataatgaaagccgctttttccatttgactagtttttatggaatgcatggccctgaaaaagggcaaaaagtatgcttcgcctcttatcctggggtgccttcccctcgttcgtctcctattcttctattaaagtag

SEQ ID NO: 344094 - DNA, 1164 bp, Pseudomonas aeruginosa
atgggttggaataagttttgggctggtttagttttagttatggggttactagttcctttagtaattttgggggcttatttttgggcgttcaaaggtaaaagtatctcgtataattctgatgattggtccgcgtttggcgctattttggctggcgcattcactttgcttgggtcgatagccaccgcattagcacttttttttgtaagtcagcaacttgaattggcgaggagtgttgcgagtcgtcagatggaatcaatgacgttggatcagtatatagggcatagaaaagtttttggggaacggttggaaactctacagaaacactttgaaggtagcattaggtttatctctcatgatgaattgtatgggcagatttttagtcgtaatactccagtgcatgttgagttagtggtgcctagtgatgacggagggaaggaaaggattgcctaccttgtcaagctttatgaggagcttcatgatggtgcgttggagattgtatcaggtaaagtcgagttggctcatagatttgttattaggctgctcaggtttcagaaatatctaggttataaggttctcaatgttgaggggtacgggacggttcgttatagaggttctgattgtcaggttaatttattttccctcatggcttctataaatagagctgaaagcgtattgaattcgtaccttttcttttcaggaaataagcaaaaaagtttgtttagagttaatggttttataatgagggacttggcgttcttggtgattcaagcgtatagaaatgggaaggttagtcaggattggtctgtgtgtatggatgctgaaaaaaagctggagcgcctgctggacttatatggattctgcatcgaagtgggatgcagggtttctagtgaagagaataagttggtagtgttggattattatgatgaggtgctgaattatcttagggggctgctttcgaagcctctgacagtgaagtcgaagctggatgattctttgagctatagcaaactgatagaagagcttgaagagcatgcctgggttgggtttgctcgtgagcgagatagaggtgaccaggagatggcgaatgaacgaaaagaaaagttgaaaggattgtttaagaatttgcgtgatgagagatatggtagaataagtctgtttgattaa

SEQ ID NO: 344095 - DNA, 702 bp, Pseudomonas aeruginosa
atggttgggattgctcacatcgccaagtaccacgaagcgtataaagtagcgctacatttacatcgggtatattcggatcttgacgcagcggcactcttgataatattcgctggttttgagcggctgatagttccactcatggacgaagtttcacctgattggaaatattccggaaaccttgggcgccatatgaacttcttgaagagaaaccttgagcgcggtagtaagaactctagcgcggccgatgctttcgacattgtttactacgacatgccaattcttggagactacttgattgcgggggtggcggggcctggcgaaactgatccacgcctgttcgaggcaacgaaccgactatttgaaataggggactacgcctcggtaattcgtgctacattcccaatcctttccgcgaggatgcgtcgcctatttggcgttccggctggatcagacggcgagggtctgattaacgcgatctttaccaggggcgaaggaactaacccggttgctctggataatgacgaaaagtctgcatatcgaaatttgctggccggcttttatgcaacttatcggaatcggctgagtcatgacgacttcgagccgactctaactcaggcgcggggggtagtcgaaatggctaattcacttatcaaagaccttgaggaagttgcagaaaaatcagcggagcagaatctggtttaa

SEQ ID NO: 344096 - DNA, 165 bp, Pseudomonas aeruginosa
atgcacctcatcatctgcatcatccgcccctaccgggcgccggatccggtagctattgcccgccacaacgagcacgccaggagaccaccctacaagtcagcaccattctgcggacatccagtggcgtttacggagagcttcgtgcaccaggaggtgcaaccgtga

SEQ ID NO: 344097 - DNA, 558 bp, Pseudomonas aeruginosa
atgagcgacctcttctatctccaggacagccgcagcaacgtcgggagccgagcaacgttctggcgcgccggcggcggctacaccaccaacctcgacgaagccgagacgttcaccctcgcccgggccgtacggcaatacgagtgccgcgagaccgatctgccctggccggtcgactacgtgcgcgcccgggctgaacttggtgtcgatcaccaggacctggacctgtcccggacgcaggcactcgccggccggacatccaacctggccgccgcacggacctggccgctcgaccacgccggcatactcaccgcgcgccggcgcgcgccctggccgaagtcctacatcgaccagcatgccaggcctgttgctgtggcggcctccctcaaccacaagcaggccctccagctcttcggcctgaagctacccaagccggagcaccagggccagcgccgcctgagctacagcaccaggctgaattgcagcggctgcggacgcttcatcacagagcatcagcgcttcgacgactgccccaactgcggggcaaggaatgcaccatga

SEQ ID NO: 344098 - DNA, 1293 bp, Pseudomonas aeruginosa
atgcacacgcccgccagcaataccgtcgccagcgtcattccctgcctgcgttaccgcgatgcgccggccgccatcgactggctgtgccggacctttggcttccagcgcaagctggtggtgcccggcgaggacggacaggtgctccacgccgagttgacctacgccagcccgaacggcgccaacggcatgctgatgctcggctcgagcgtccgcgacaacgcctacggtcggctgatgcggcacgtcgacgaagccggcggcaatacccagagcctctacctggtggtcgccgatcccgacgccctgttccgcagcgcccaggccgccggcgccgagatcgtcatcgacatcaaggacgaggactacggcggtcgcggcttcacttgccgcgatccggagggccacgtctggagcttcggcagctatgatccctggcatgaggccccgtccattcaccacaggagacgctgcatgaaaacgctcacgctgatcgatggccaggaggtcgccgccatcggccagggtacctggcatatcggcgagcagcccggagaacgcaagcgcgaggtcgcggcgctgcgcgaaggcatcgaactggggatgacgctgatcgataccgccgagatgtacgccgagggcggcgccgaagacgtggtcggcgcggctatcgcgggacgccgcgaagaggtcttcctggtcagcaaggtctacccgcacaacgccagccgcaagggcctgccggcggcctgcgagcgcagcctgcgccggctcggttgcgaaaccatcgacctctacctgctgcactggcagggccggtatccgctggaggaaaccatcgaagccttcgagcggttgcgcgaccagggcaagatcctgcgctggggcgtgtccaacttcgacctgggcgacatgtacgaactggacggcagcgcctgtgccgccaaccaggtgatgtacaacctggaggaacgcggtatcgaatacgacctgctgccctggtgccaggagcgcggcatgccggtgatggcctactgtccggtggggcagggcggcaggctgctacggcacccggcgctcggcgagatcgccgcgcgccacgacgccagcagcgcccaggtcgccctggcctggctactggagcagggggtgatcgcgatcccgaaggcggtgacgtccgctcacattcgcctgaatgcagcggcggccgacctggaactgagcgccgatgacctgcgggcgctcgaccaggcgtttccgccgcctacccgcaagcgaaacctggcgatcgtctga

SEQ ID NO: 344099 - DNA, 282 bp, Pseudomonas aeruginosa
atggttgagtacgccaacgaaagctatccagcctggaaaaagtccaatgaggatatggataagagatacaaacaactcatgaaagaagctgaacaggagccaaaaaaagactcggccagccggcttgcatcggcgaaagaccattgggaacggttccgcgccgatttctgccgctccatgagcgacacctatggtggggcttggtccagtacccacgagtcggaatgtcgagtgaagctggcaaatcagttcaagaacatcatggatgactatggatggtga

SEQ ID NO: 344100 - DNA, 198 bp, Pseudomonas aeruginosa
atggacttcctcgaagacttcatactcagctatctggcgcaccgcatcggtgtccgcgtattacgctttctgagcggtgaccggttcagaggggaaagcggcttcgcctggggctgggcagtcgtggtcggcggcttggttctattcgctccattcgtagcgttcattacctggctgatttatcgcagcgcccattga

SEQ ID NO: 344101 - DNA, 486 bp, Pseudomonas aeruginosa
atggacatcaatctgctaaccgcatccatgcttggtcattggcgtgctccctcgggtgtctggcaatgcgaattccagttcggcaaccgattgatttacgtcgaacaccacaacggcgagccaccttgcaccaggctcggcgctgcgcaacgagtggtcaacgatgtgtgggatgacttgccccaggcactgaggtttgccgagcagcactgtaaagcactgatgcccgaactgatgcggctgtacgaaacccacacgccgtgggagtctccgttgttcgtgtactcaatccattttgaactcgacaaaccttaccctaggtacgctatttccaagaaccctgatttcaattgggatcgtatcctgatcgacgaagatgaactgtcccaagcttatagtgtttgcatggagcagtatgagccaggagatgacttttgggtttacgtcaggcgcttaggatttaagcaattcaatcttgaagattag

SEQ ID NO: 344102 - DNA, 3867 bp, Pseudomonas aeruginosa
gtgcaggcactgccttcggccgttagggctcagggcagcctgcctcgcctcgaagagcggagcgcccttcttgccgagcctccggttgggcagccggcgctgcaaaccctgccgtcggttgcgcgcgttgagggcgtgcccagcaatgccacaccgagcaacagccacaagtatctgatcgagaccaacccggcgctcaccgagctgaagcagttcctcaactcggactacctgctcggtggcctgggtatcaatccggatgacagcaagaagcgcctgggcgacggtctatacgagcagcgcctggtacgcgaagcgatcgtccagcgtacggggcagcgcttcatcgccggattgaacagcgacgaagcgatgttccgctatctgatggacaacgccatcgccagcaaggacgtattgggactgacccctggcgtcaccctcagcgccgcccaggtggcggcgctgacccacgatatcgtttggctggaagaagtcgaggtgaatggcgaaaaggtcctcgcccccgtggtctacctggcccaggccgaggggcggttgggcccgaacggcgcgctgatccaggggcgcgacgtgaacctgatcaccggcggggacctgaggaacgccggtaccctgcgcgcgcagaacgacctcagcgcgacagccggcaacatcgacaacagcggcctgatcgaggccggcaaccgcctcgacctgctggccagcggctccatccgcaatgatcagggcggcatcattgccgggcgcgaggtaagcctctccgcccttaccggagacgtcatcaatgaacagacggtgacccagcaccagtcctcctacaggggaaccggtaccactgaggcatttgccgatagcgccgcgcgtatcgaggctgcgcagaagctgaccgtttcggcaggacgcgatgtagccaatattggcggtgtcatcgacagcaagggcgacctcgccttgcaaggcggcagggatgtcctggtttcggctgcggtagcggagcggggctggacggcaggaagccaggcataccagacccagacgacccagatgggcgccgaggtcgtggcggggcgcgatatcagcgtcagcgccggacgcgatatcagcgtcgtgggcagccgcatcgacgctcgtcgcgacgtgacattcgaggcgggtcgcgatgtgggcctggtcgcggctgccaacgaagagcatgcctatggcaagaccaagaaggtcactttccaggacgacaagatcacccagcaggccactcgcgtggacgctggcggcgacctggcgatcaatgccggacaggacctgcggctggtcgcgagccaggccagcgccggtgacgaagcctacctggtggccggcgacaagctggagctgctggccgccaacgacagcagttactacctctatgacaagaagagcaaaggcagcttcggtagcaagaagacccggcgcgacgaaatcaccgatgtgacggcagtgggcagccaaatatccagcggcggcgacctcaccctgctcagtggcggcgaccagacctaccagggtgcgaagctggaatcgggcaacgacctggccatcgtcagcggcggcgcggtgaccttcgaggcggtgaaggacctgcaccaggagagccacgagaagagcaagggcaacctggcgtggcagtcgtcgaagggcaagggccagaccgacgaaaccgtacgccagagccagctcgtcgcccagggcaacctggcgatcaaggccgtggaaggcctgaagatcgacctcaagcacatcgaccagaagaccgtgagccagaccatcgacgcgatggtgcaggcggatccgcaactggcctggctgaagcagatggagcagcgcggcgatgtggattggcggcgcgtgcaggaactgcatgacagctggaagtacagcaactccgggctgggcgtcggcgcgcagttggcgatagcgatcgtcgtgacttacttcacggcgggcgcagccagcggggcgattgcaacggccggggccggaacctccatggcaggcgcgaccgcagccgctaccgctacgacttcggcgggctggttgaacgcggcaggtaccgcagcgctcagcggcgtggccagcaatggagcgatcagcaccatcaacaaccggggaaacctgggggatgtcgtcaaggacgtgacctccagcgatgcgctgaggggctatgtagtcgctggcacgactgcggggctgactgccggcgtctacgacaaatggacctcgacccagaccggcacctcgaccgctctaccgaacaccggggccgtggcgcccgccgcagggttgggcacctggcaaggcgtgggccagttcacctcgaaccagttgctgcagaatggtacttcggtgctgttggaccgggcgctgggcggcaagggcagcctgggcgatgcgttgcaaaacagcctggcaaatgcctttgcggcctacggcttcaagctgattggcgacaccacccatggcgtactggacgacggcagcctcggcaagatcggcttgcacgccctgatgggaggtctggccgccgaagcggtcggtggcgatttccgtaccggagccctggctgcgggagtcaacgaggcgctggtggatagcctcgccaagcaatacgccagcctgcccatcgatgacaagaagggcctgctgatcatgagttcgcagttgatcggcgtgctggcggcttcgacgcagggcgatgcggacgccaagagcttgcagacgggagcctgggtggcggggaatgctactcagtacaacttcctcaaccatgtggaaaatgaggagcgttggaagtcccaaaaggcctgccaaggaggagacgaggccgcctgtgggcgtgcggatgcttgggataagttggaccgcgaccgagatctagccttgatgactgcctgctctacgggcggacaggcatcgacttgtagtgcattgcgtcaagaagcctggaaggctgctcaaagcctcaagcaggccagttggagcccggaagcgagggaacaatacgcgcaagtcatgcaaaatccggaattgcgtgcttacacgattgagtcagagcttcgaagcatcaatcaggtaaataatcctattaccgctggagattcaaagcgcctcgctaaagctttggccagttttggatccgacttcgtccccgtctacggtgacacaaaagcattttctgaagctcaagacccctttgactatgcaatggcaggggtgggactggttcctggtgctggagatgcggcacagaaagtattgagcaaggcgaaaaagctcttccaagaagggaaggtggcagagtctgctgatttagtagagggattaacaaaaggggtaaaaaacagtagcgctgcaaaaggatttattcctgcagaaaggactgggcttaattttgaagagaaggtaaaaaataaggccggagggtatgttgatgttgagttgtctgctaggcagaagtttgataagtcaggtgttgtagtagatagtaaattcgcccaaagcgatctagttgctcgttactcgcccgatgggaatctgtatatagattggtatggcactactgtgtctgggaagggagttggtagcgagatgatttctagagcaattgaggcagtaggagcaaataaggttaagacggtttcggcgcagttaggaaaagacaatcttgatgcttttaaagctgggtcttcgagagggctttccaaggagcaggcagtatggaatactccactaggtaagacaatgaactctttaggttttacggaagttgaggttcatggggcaagtgttaaatttcttcatttagagtga

SEQ ID NO: 344103 - DNA, 990 bp, Pseudomonas aeruginosa
atgacagcccaaaccgccgcaactatcgctcaagacctcgtagaagagttcgacgaggaacagcccgccaccgtagtttccctcgctgccgaaacgctcggccgcgacctgctccaggccctgctgcaggaggtccgcgtcctgccggatgtctggccgaagctgaccgaaaagaaacaagccgacgtcatcgaccgcctgcgcagcaccgtagagcgcaccgtgaagtatgcagtcaagctgatttccgccggcgagcgcccggccatcggcggcatcctggagtcggtggcgatcaaagaaggcatcaaggcgaccttcaaggtcagccagttcgacccgctgcgtcacgacctaatcgaccgtgccggcaaggtctgcatgctggtggtggccgacgctgaggagtacctgcagggcatggacaccgtcgtacccgatcccgaccagagcgccctggcgctggacgaaagcgacgatggcgacgacgccggcggcactggcgcgcaggacccgctctacattgaagcggtcagccatgtcatcgacacacgccgggtcagcatcagcgggctccagcgctacctgaaaatcggctacaaccgcgccgcgcgcatcgtcgaggaaatggaagccgccggcgttgtatcggcaccgaactccaacggcgagcgcgaggtgatcctgcaatcaccgccggaaccggaaaaagacctgctgagcagtgccgccgagcccggcgccacaacctacggcggccacaccatcgacgacatcaccgtcctggtgctgcgcaaagacgagatcaccccgggctggctgcagtcgcgctttgcgctgagcaccgacgagtccttggctgtcgccctgaagctgctcgacgacggtgtgatcacgctcgccaccgaaggcgaatcgcctgacctcaacacctaccgcgtcgccgttgccaccaaggcgccggccgaagagcccatcaccctggagtga

SEQ ID NO: 344104 - DNA, 504 bp, Pseudomonas aeruginosa
atgatcgacccacgagcgaacagcccggagaaactggtgccgccggcaccgctgccgcacgtaagccgcggcgcgctgaagcgcatcaagcatcctcagccaatccccatcggctgcccgcactgcggcggccaggtccgtttggtcagcaaccgggtgatctacggccgagagtacggcgactggccgtatgcctacgcctgcactggcacgggctgcggcgcttacgtgggcctgcatcccgacaccgacgtcccattgggaacgctggccgacaagcccctgcgcgacgctcgcaaccgctgcaagcggccatttgaacgcatctggcgcgacaagctgatgacccgcagtcaggcctacgcctggctcgccgccgaactccagatcatgccgcccgaatgccacttcggactcttcgacgttgaccggtgcgagcgggccaaacgcatctgcgaccagtacctggaagcgatctacaccagttcagcgaggtggggatga

SEQ ID NO: 344105 - DNA, 861 bp, Pseudomonas aeruginosa
atgtacctggaaaccccgaagaaattccgcagtctggccaaccaggcgcatcaggtcgcggaaaactatttccggccgatctcgcgcaagtacgacaaggccgaacacgcctatccgaaggagctggacctgctcgcggccttgctggacggcatgaacagcggctcgcccgaggctgtcggtgcgacctcggcgagcaagcgcgccggcaagcaggtagaggagggcatcaagaacggcggcaacctgtcggcgttgctcggcgtgatggaactgtgctggggcgacgtcggcctgctcctggccatgccgcgccaggggctgggcaacgcggcgatcgccgcggtggccaacgaggagcagttgcagcgcttcggcggcacctgggcggcaatggcgatcaccgagccgggctgcggctcggactcggcggcgatccgcaccaccgcgacccaggatggcgaccactatgtactgaacggcgagaagattttcgtcacttccggcgagcgggccgatgccgtggtggtctgggccaccctgaaccgcaacctggggcgggcggcgatcaagtccttcgtggtcgagaagggcacgccggggatgaccgtgacgcgcctggagaagaagctcgggatcaaggcttcggataccgcttcgatcagtttcaatgattgccgggtgccggccgcgaacctgctgggcaacgccgaggtcgacgtgcagaagggtttcgccggggtcatggagaccttcgacaatacccgcccgctggtggccggcatggctgtcggggtggccaaggcggcgctggaccggacccgcgaattgctgaagaaggctggctgcaagttcgactag

SEQ ID NO: 344106 - DNA, 249 bp, Pseudomonas aeruginosa
atggccgacaacaagctgcccaactcgaaggaagcgtccatcgccaaggccaaggctggacgggtggccaacgagatcaccctgaagtgcgtggagctggccggcgccctcggctacgccgaggatgagctgttggagaagtgggcgcgggactcgaagatcctcgacatcttcgagggcacccagcagatccagctgctcatcgtcgctcgccgcctgctcggcaagtcttccagccagttgaagtag

SEQ ID NO: 344107 - DNA, 2187 bp, Pseudomonas aeruginosa
atgcccagcagcaagccgctcgccgagtacgcccgcaagcgcgatttccgccagaccccggagcccagcggccgcaagcctcgcaaggacagcaccgggctgctccgctattgcgtccagaagcacgacgccagccgcctgcactacgacttccgcctggagctggatggcaccctgaagagctgggcggtgcccaaggggccgtgcctcgacccggcggtgaagcggctcgcggtgcaggttgaggaccatccgctggactatgccgatttcgaaggcagtatcccccaggggcactacggcgccggcgatgtcatcgtctgggaccgaggcgcctggacgcctctggacgatccgcgcgagggcctggaaaagggccatctcagcttcgccctggatggcgagaaactctccgggcgttggcacctgatccgcaccaacctgcgcggcaagcagccccagtggttcctggtcaaggccaaggacggcgaggcgcgcagcctggatcgcttcgacgtgctgaaggagcgtcccgacagcgtgctcagcgagcgtacgctgctgccccgccatggcgaagccgccacgcccgcggccaggccggcgcgacgcggcaagagcggggggaagacgccgatgcccgaatggatcgcccccgagctggccagcctggtcgagcagcctccgcgaggggagtgggcctacgaactcaagctggacggctatcggctgatgagccgcatcgaagacggccacgtgcgcctgctgacccgcaacggccatgactggaccgaacgcctgccgcacctggagaaggccttggccgggctcggtctgcagcgcagttggctggacggcgaactggtcgtcctcgacgaggagggtcgaccggacttccaggccctgcagaacgccttcgaggaaggtcgcggcgagaacatcctgtacgtcctcttcgacctgccgtaccacgaaggcgaggatctgcgcgatgtcgccctggaggagcgccgcgcgcgcctggaggcgctgctggaagggcgagacgaagacccgctgcggttctccgcgacgctcgcggaagacccccgcgacctgctggccagcgcctgcaagctcggtctcgaaggcgtgatcggcaagcgtctgggcagcgcctaccgttcgcgccgcagcaacgactggatcaagctgaagtgccagttgcgccaggagttcgtgatcgtcggctataccgagccgaagggctctcgccggcatatcggcgccttgctgctcggcctctacagccctgacgaggagcgccggctgcgctatgccggcaaggtcggcagcggcttcaccgcggccagcctgaagaaggtccgtgagcgcctggaacccctcgcggtccgctccagcccattggcgaaggtgccgccggcgcgcgagaccgggtcggtgcagtgggtgcgcccgcaacagctgtgcgaggtttcctatgcgcagatgacccgtggcgggatcatccgccaggcagtgttccacggcttgcgcgaagacaagccggcgcgcgaggtgaccggcgagcgtcccgccggcccgccgccgctgcgcggcgcgcgcaaggccggcgccggtgcgtcgcgggcggccaccgccggcgtgcgcatcagccatccgcagcggctgatcgacccgtcgatccaggccagcaagctggaactcgccgagtaccatgcgcgctacgccgacctgctcctgcgcgacctgcgcgagcgcccggtgtcgctggtgcgcggccccgacggaatcggcggcgaactgttcttccagaagcacgcggcgcgcctgaagatccccggcatcgtccagctcgacccggcgctcgatcccggtcatccgccgctgttgcaaatccgcagcgccgaggcgctggtcggcgcggtgcagatgggcagcatcgaattccatacttggaacgccagcctggccaacctggagcggcccgaccgtttcgtcctcgacctcgacccggacccggcgctgccgtggaagcgcatgctcgaagcgacccagctgagcctgacgttgctcgacgagctgggcctgcgcgccttcctcaagaccagcggcggcaagggcatgcacctgctggtgccgctggagcgccggcatggctgggacgaggtcaaggatttcgcctag

SEQ ID NO: 344108 - DNA, 372 bp, Pseudomonas aeruginosa
atgacgtggctgcaacagggagtcgccgcgcggcgactcatcatcaacgacgccaaggcgctcgtgcatacggtgagcgacaccgcctacctggtcagtcccggcgtgttccatcgctatgcgcaggaacatccccaggtggatgtgctagccaggcaggacaagcaacaggattggcagtgggtgcaaaagcgctttgagaaactgcagctacaccgcaagcactcaaatggcctgaacatttggacctgtgaagtcacgggcccgaggaagtcccgccgactgcatggctacctcctcgaaaatgggtccttggtattcgccgaaataccgcccaacaatccctatcttgctctgactcaggaaggatga

SEQ ID NO: 344109 - DNA, 1137 bp, Pseudomonas aeruginosa
gtgatcagtatggaaatgatgggcaaaattcggcggatgtatttccgcgacaagctgtcgctgcatgagatagccaagcgcaccgggttggcgcgcaacacgattcgcaagtgggtcagagcacctgaggccaagcagccggtgtaccaacgccgcgcgatcttcaacaaactcagcccttttcacgccacgctggagcaggcgctaaaagccgattcgctgcggcccaagcaacagcggcgcagtgccaaggcgctgttggcgcaaatcaaagccgatggttatgacggtggctacagccagctcaccgcgtttatccgtgcctggcgagggggacagggcaaggcgtcgcaggcctttgtgccgctgacctttgctcttggcgaggcgtttcagtttgactggagcgaggaaggcttgctggtcggcggcatttaccggcgtatgcaggtggcacatctgaagctgtgtgccagccgtgcgttctggcttgtggcgtatccgagccagggccatgagatgttatttgacgcccatacacgctcgttcggcgccttgagcggcgtgccgcgccggggcatctacgacaacatgaagaccgccgtcgacaaggtcaataagggcaaaggccgggcggtgaatgcacgctttgcggtgatgtgcgcgcattacctgttcgatccggacttctgcaacgtcgccgctggttgggaaaagggcgtcgttgaaaagaacgtgcaagacagccgcaggcgtatctggctagacgcccaggactgccagtttcactccttcgaggaactcaatgcctggctgggccagcgctgccgcgcgctttggaacgagctgacgcaccctcaatacagcggtctgagtgtggccgaagtgctggagttggagcgcgctgaactgatgcctgtgccagcgccattcgacggttacgtcgagcggcctgcgcgggtctccagcacctgcctggtcagcgtcgggcgcaaccgctactcggtgccgtgtgagtacgcgggtaagtgggtcagcagccgtttgtatccgacgcgaatcgaggtggtggctgacgacgcgctgatcgccagccatgtccgcttgctggatcgcgaccaggtcagctatgactag

SEQ ID NO: 344110 - DNA, 243 bp, Pseudomonas aeruginosa
atggcgcaagttctggctgccgtaccggtcgccgggctcgatgcggtgctggtggctgttgagctggtactggaaagcggcagcctgagcgccgaacacatcctcaatgtcgtggcgcgcctggccgcgaccgaaccaccacccagcgtcgaaacccacttgtcgctcaaggaagcccccgtcgctaacacggcgcgctacgaccgcctgcgtggccaggccgaggaggtcggtcatgcgtga

SEQ ID NO: 344111 - DNA, 1155 bp, Pseudomonas aeruginosa
atgtcgccttcgactgatccgcgttcaccgatgttctacgactggatatccggctatcaggatttcccgttcgacattccccaggtgggcaaggtcattcgactgaacgtcgattcagagaccaatgaggtgctgagccagtcgtgcccggccttccatgctgagggtagctacagcacgaagtttcgcattcaggtggcagggcgccgggtgtacgtcgatggcaatgcgagccgcgttaaccgcctggacaacctctacggcctgaccacgctcgcggacaacatggccgtcatcaactcgatcttgaccgcgccggaaatcggtcttccgccgctcactcgatgcacccggcttgatcgtctgcaggacggttcggctgtggtggacgggttcactttcactcggatcgatgcgacccggaatctcttcgtagggaagggcaacgagtcggcatatctgcgggctctgtcgagccagcgtttccggaactccatcggctacctgtacccggacggcggcaccgttgtgtggacgcccagcgggggagaaaaggccggtcgcctggtgtatccgggttattacaacaagggtctggaattgacccgtcacttgctgccgaaggttctacggcgctacggcgttgagtctgaggagtaccgctacgttagccaggtgcgcgactggtgcgtggaagtcggagttgtccgcgctgaaatcaagcttaagagcgagctgctgaagagggattgcctctgccattggggcctgttcgatgaacagcgcatctgggatcacctgggcgaatttttgaaggtgggcgacaaaatgaccctgaccgcacatgacattgccagcatttctgaagaattgatgcgcgtaggcgtctgcaactccatgcaggcggccactcgtactgcaacctatgcaatggaatggatgaacggcaagacattcgatttcaacaagtctgctgtacagacccatcgcgcccgtcttcgggctatcggattcgatatcaagctgccgttcgacgcctcgcggcacatgttcttcatccacaacgtgcgcgaagtctcccgcaccttcgacgtgcccgcgccgagcttctaccagcgtccggacgtgccgcgccatttgcggctggtggcctga

SEQ ID NO: 344112 - DNA, 1371 bp, Pseudomonas aeruginosa
atgatgggacagttaccgggaggacagcagcgcctgttctactcgttcaatctcgaagatcacgtcccggcccaacatctcctgcgcagcatcgaccagtgcctggatctcagtgatctgcgcgcctatctggcggatttctatagccccatcgggcgtccctcgattgacccggaattgatggtgcgcatgctggtcgtcggctactgctatggcattcgttccgagcggcgattgtgcgaagaggtgcacctgaacctggcctatcgctggttctgccggctgggtctggaagacgaagtacctaatcactcgaccttctcgaagaatcgccatggccgtttccgtgacagcgatctgttccgctggttgttcaatgaagtgctgcggcgctgcatggcagccggcctagtcaagggcgaaggtttcgccgtcgacgccagcatcatcaaggcggatgccagccggcaacgtggggtggtgggagatgaagtcgattggagcgatccaaagctcagcagccgcgccgtgcgcgagtacctcgaagcacttgatgaagatgcgttggctgaggctcttcccaagaagatttcgctcaccgatcctcagtcccgttggacagcagcaccaggcggcccggccttctttgcctactccacaaattacctgatcgacactgagcacggtgtgatcatggatgtggaagcgaccccggcgcaccgtaccaccgaagtcgactcgaccaggacgatggtcgagcgtgtcgaagcgcagttcgacctcacaccggaacgcctcatcggcgacaccgcctatggcactgccccgatgctggcctggatggtcgaagagaaggacatcgagccgcatgtgccggtgtgggacaagactgagcgcaaggacgacagtctctccagtaacgacttccactggaatcaggaagccaatgaatatcgctgcccaaccggcaaaccgctacgcagtgaatggcgcgccttcacccagaaaagatcgcgggtaaccaaggccaacaccatcatctaccgctccagccaaaccgactgcgtcacctgtccgttgaaagcgaaatgctgccccaacacaccgaatcggaagatcgttcgcagcatccatgaggctgcccgcgatgtggctcgacgcatcgccaagacaccggaatacctcgtctcacgttgcgaacggaagaaggtggagatgcttttcgcccatcttaaacggatcatgaaactcgaccgtttacgactgcgtggcctgacaggcgccactgacgaattcaccatggctgcgatggtgcagaacctgcgccgcatggccaagcttttgcctcaagggccaccgctcacgggatag

SEQ ID NO: 344113 - DNA, 1062 bp, Pseudomonas aeruginosa
atggagcgccccttgtacgaaggcaagccaaccgcctatctggatcataatattcttgacttccttttaaagttcccagacaacgaactcgaaatcgtgatttttggggaatatcaaattatttactcagatgagactctgagagaaataaagagaacgggagcgcgcggaacgcagttccttgacctacttaaaaaactctccgcaatgcatatcagcgtggagctcaactcttctttcgactcaacaggtagggcaatcatcaaggaagtggacccaaacatagcctacgcaaactacacggaaaaccttgaaaaagcttacgaagggataattcacagcacctctcaatcacttctaaaattctatggaggccgcgaagaatcgacactggagcagataagcaacgagcaaatcgaatcttttttctcgttaatggaccacatgctggagagcgcatccgaaattcaggaggctcatccatctatccatcaaaaaataatctctcaagttgacaactttaaaaaacaatatataggagcacaacgagaatcactccaggcaatgcagaagcatgaatcccaaaacggagctccgacaatccagacattaagggatcacacgggcctcggccccaagcaactcaataatatttccccgccaaatgtaattgagaaaatctgggaattacacaaagtcgccccaggctaccgcgaacatggttttaacattgagcagtttcttggaatatcaaaaactgactttcaacaccgcgaaatgcatctgcacgaaaaagtcacagcctgctataacgttctaaacgttgtcggatatcatcaggacagcaatcttaagagcgagaaaagatttaccgcggccatgagcgatgcagggcatgccgctatagcgtcttttgctgcctatgtattttcaaacgacaaagcctttataaaaaagacacaagcagtctatgagtatctagatgcagcaacgaaagtaatcgagatcgtgattaatcggatacccagctcgaatgaccaaggactttctgtagagtcatga

SEQ ID NO: 344114 - DNA, 570 bp, Pseudomonas aeruginosa
atgagccgcacctttgcatatggccgcgtttccacactggaacaatccaccgacaaccagttgcttgccctccagcagaagggatacgacatccagccgctgcgctggtttgcagagcaagtctctggcggtgctccagccctccaccgccctcagttcgccaagatggcagaacgcatggaagccggagacgtgttggtagtgctaaagctggatcgccttggccgtgacgtgcaggacgttctcgccactatcgaaaatcttgccgctcgtggcatccatgtgagaagcctcgatttggacggcgtagacctcaccagcgctgccgggaagcttcaactaaccgtgctggcagccgttgcagcctttgaacgcgaccgcatcaaggaacgcaccaaggagggcttgaagcgcgctcaggcagagggcaagaagctgggccgaccaatcgccacgaacacgactactgctgtgcaagcaggcaaagccaaaggaatgtcgcagagtgaggttgccgcagacctgggccttggtattgccactgtgaagcgacattggaacaagctctaa

SEQ ID NO: 344115 - DNA, 1149 bp, Pseudomonas aeruginosa
atggcagcaaaaatttactttgatgagtccggctataccggaaacaacctcttgaacaaagatcagccaatcttctcgtatgcatctgtgtgtagtgatgacgacgaggcgagagattacgtcgagagggctgtgaaaaggtatgggattcagaatggagagcttaagggttctaagctgataaaatttaataaggggcgaaaggcggtatctgaaatattaaaggatttcaggggtaatattaaggtttctgtttcagataaaaagtatgcgctcgctggtaagttctttgagtatatatttgagccagctatatctgatgataatgctttgttctatggattagattttcatcgatttgtgagtaatattttgtatgtagagtttgtcgcgcggggaagtcaagctgaagagctgtttgaggactttgagcggctgatgaaaaccggggactttgatgggcttggagctctgttttcctctacaaagaatgatgcgatatcccctattctttctgaaattaaggaatttgcaatccttaataagggggcggttattgatgaattggatgggtatgttgggacaggtgcgggaaaatgggtgcttgatctgacaaatacatcacttttctcattgctggctgaatggggaaggcaccatgatgagttaacggcgttctgtgataattcaaagcccctatcccaggatcaatcaatatttgaagctatgattgggcgcacagataagatttatgagaatttttcagggggcagttcgccaatcacatttaaccttactggtcccttaaatctcgtggactccaaggtctttcatggtgttcaaattgcagatgcagtggctgctgcgtttgcatattgctgcgatgggcggaatcaggacgatcacgctagggagtggcgtggatatatagaggaaatggttataccagcaagcgtttttccagatgttgatcacgtcgacttgcgtagccctaaggtagtcagaaacgccattctgctccaggagttggtttcaaggagtcaaaaaggacacagtttgattgacgggatgagggagtatgtaagttttataagtgggcagctatcacagaaccccctgaatattacgacttggccgtctaggtcgtag

SEQ ID NO: 344116 - DNA, 1557 bp, Pseudomonas aeruginosa
atgaagggcctgttcccagacttctccagccccaaagatgacagtcaacctgctgagcccatcctttcgaacgaggaaatcgaggctcgtcaacgtcgccaagaagtggcacggctgctgactggctcccatggccggccgatcccgagtgaacaagaggcgctggctgagcaactgctggagctctcccagccgtatcaaccaaccgagctacggggcatattgccgaagctacgggatgagttggtacttaggagcctccgtctagtccgtgacggcgctggcgctgtagatacgccccaagctggtccgagctacgacccagcaatggccgactggacgctctatcaggtatgggaacaccaactggaacgcgacagggctgacacctcgtcaaaaggcggacaagcgaaccacggcggtactcttgcggaaagggagcgcctcgcacgggttatgaccgttctgacgcaacacaaacccgtttgccagttgaccaaaaaagactggcaggccgcgtacgacaatgctcgcaagacgaaggctaacgccgacgcttcaattgctccgccgacgccattgattgaaatcttgaccgatgaccctgagcaacagaccggtcatgaacgcgttcgcgccctcatcgctttcatgaagcaaatccaagcgcatgctcgctaccttgatttgaccacattcaggccagatgacgtgctcatcaagcctgtcgaggagaggaagaacaagcgaagccgtgacggtgttgcctttaacaatgatgacattgaagcaatcttctccggttacatatacaagggaccggtcgcgaatgggcgaaccaaggcgtatcccttttggttctggctccccttggttggctatttcaccggcgctcgaacgaacgagatagcgcagctcgatactgctgacattaaggtcatagacggacatccctgcttcgatttctgtgctgatgctgtcgacgcacctgaggcaaagcgaatcaagacaggtgaagctcggcaagtacctattcatcctcgactgatcgaactgggttttcttgattatgtggacagccagcgacaagcaagacagaaaaaactgtttggtgacggactaacctacctttccccacgagacaacgagaccaagcacaacaaggaaggctgggcgaagagcgccggcaagttcttcaatgaggaacccagggggtatctcgtcgccattggtgttcataagccaaacgacggaaagagcatctactctttccgacacaccctgattactaaattaggtcacgtgaagcgcgacggcgaatcgttggataaaactattacccaagcgattgtaggccacactccagaagatatggcaggaaggcactatgatgaaggggccacagttgagcaaatgctggccgcccttatgcttctgccgatcccggcagctatacaacgactcacaagctatcaagtggacttcgttgagcggtttggaactgtgctaaccaagagtattgcgagccatcggcacaagcaccctaaagttatgtag

SEQ ID NO: 344117 - DNA, 1170 bp, Pseudomonas aeruginosa
atgaaacactactcagccaccctggcactcctgccactcaccctcgccctgttcctgccccaggcagcccatgcccacggctcgatggaaacgccgcccagtcgggtctacggctgcttcctcgaaggtccggagaatcccaagtcggccgcctgcaaggccgccgtcgccgccggcggcacccaggcgctgtacgactggaatggcgtcaaccagggcaacgccaacggcaaccaccaggcggtggtccccgacggccagctctgcggcgccggcaaggcactgttcaagggcctgaacctggctcgcagcgactggcccagcactgccatcgcgccggacgccagcggcaacttccagttcgtctacaaggccagcgcgccgcacgcgacccgctacttcgacttctacatcaccaaggacggctacaaccccgagaagccgctggcctggagcgacctggaacccgcgccgttctgctcgatcaccagcgtcaagctggagaacggcacctaccggatgaactgcccgctgccccagggcaagaccggcaagcatgtgatctataacgtctggcagcgctcggacagcccggaagccttctacgcctgcatcgacgtgagcttcagcggcgccgtcgccaacccctggcaagcgctgggcaacctgcgcgcgcagcaggacctgccagccggtgctaccgtcaccctgcgtctgttcgatgcccagggccgcgacgcccagcgtcacagcctgaccctggcccagggcgccaacggtgccaagcaatggccgctggcgctggcgcagaaggtcaaccaggactccaccctggtcaacatcggcgtgctggatgcctacggggcggtcagcccggtggccagctcgcaggacaaccaggtctacgtgcgccaggccggctaccgcttccaggtcgacatcgaactgccggtcgagggcggcggcgagcaaccgggcggcgacggcaaggtcgacttcgactatccgcaaggcctgcagcaatacgacgccgggaccgtagtgcgcggtgccgatggcaagcgctaccagtgcaagccctacccgaactccggctggtgcaagggctgggacctctactacgccccgggcaagggcatggcctggcaggacgcctggaccctgctgtaa

SEQ ID NO: 344118 - DNA, 489 bp, Pseudomonas aeruginosa
atgggcgagctgttgcgtgaattgaaagatgaattgcagacgctggaggcgcgcatcgctcgactggagcgacagattcaggctcacgtacgtggcgatgcccgcatccagcgcctgctggcggtggaaggcatcggcccgatcagcgccagcgcggtggcggcatccgccggtgatgcacggcaattccgcacgggccgccagtttgcggcctggctgggcctggtgccacggcagcactccacgggcgggcagcagcgcttgggcaacatcagcaagcgcggcgatacctacttgcggaccttgctcatccatggcgcccgtgcagtcgtgcgctgttgcgccaacaagaccgatgcccgcagccgctggctgcaaggtctgctgcaacggcgtcctgccaatgtcgtcgccgttgccctggccaacaagaatgcccggatcctttgggccttactcagccgggagacatgctaccggcccggttga

SEQ ID NO: 344119 - DNA, 549 bp, Pseudomonas aeruginosa
atgaaccttagtcgcattggtctggatctggcaaaacaagtattccaggtgcacggcgttgatcgtcacgagcatgtggtatgtcgtcgccaactcaagcgggcacaggtgcgggatttctttcgccaactgccgccgtgcctggtggcgatggaggcctgcggcagtgcgcactactgggcgcgcgagttgcgggagctgggccacacggtacgcctgatcgcaccgcagttcgtaaaaccctacgtcaagggtgacaagcacgatgcacacgacgccgaggcgatctgcgaagccgccagtcgtccgagcatgcgctatgtcccggtgaagagcgcagagcagcaggccgtgcagtcgatgcatcgggtgcgcagtcgtctagtgcgggcccgcacggcgttgtgcaatgaggtgcgtggcttgctgggtgagttcgggctgatcgcgactcgacgtgggcgagcggcgacgatggccttgctcgaaacggtcatggctaccgaaccggcgtccttgcccggccccgatgggcgagctgttgcgtga

SEQ ID NO: 344120 - DNA, 1008 bp, Pseudomonas aeruginosa
atggctcgcaaagcaactcccgcgaaagtagaccccatgccggagatcaaccaggaagctcttcaggaagaggtcgttgctctgaccatgatgggtgacatcgcacaaggcgcccaggaagagcgcgatcttgtgaaccagattctcggacaagtgcaaatggcgcgatccatcgctcgttttgccgacgtcgtcagtttgagcaaactgtctcatatcaaggaaaccaagctataccgggccctgcagggcaagaaggtgcttgatcctgatggcaatgaaattgccgacgtcggcacttgggacggattctgccaagccttaggtctatcccgttccaaggtcgatgaagacttgacgaatctgaataccttcggcgaagaggcactcaaacaactctccgcaattggtgctggataccgggagctgcgtcagtaccggaagctgccggacgaccagaaaacagccctgatcgaggtggccaagaccggcgacaaggaagccttcgttgatcttgccgaggagatgatcgccaagcactcgaaggaaaaagaagagctgcaggcgaagctggaggacgttcagcaggactacgacgccctgtccaaagtcgaagcggacaccagcaagaaactccgcgacgtcaagttggagctgcagcgcgctcaactgcgcactgctccctggagcgagaaggtcgctcccttccaggaggagatcgccaagcgccaggtgctgatcgacgaggcccttggtcgccatctccaagctgttgaggccctggacgcctggtggatcggcgaagcggtcaaccagccaggctacgaccccgaggcttacgttgagatgccgctcgaagtacgcacggtactgatcgagctggacgatgccatcacccgcaccgcccacctggtggcggcagcccgcgaccaaatcctcaaccgcttcggggacgaactggctctggctcgccagcaccagctgcaacccgaagagcaggcccagtga

SEQ ID NO: 344121 - DNA, 582 bp, Pseudomonas aeruginosa
atgtttgaagacttcatgaccgacacaattagtgtacagaagcaaaatggtgaaaagatcgaagggctaaaagcagctgtccaatcacaccaaattgacctcgaccgagctgatatcctgatagaggtgggtgatctgattgagcgtcgaatgtcgaatggtgctactgaaacctacgaggtgattgatccggttttccatgaggcatttcacggaatccctgcgcactaccaaatgaaggtcaaaaagcttggggtacctgaagcgaaagcacgtattcagagcatcacctacaacatcaacggtaacaatgcgcgggtcaatcatggctctgtcgacaactcaaccaacacggtgactatcagtggcggcctgcaggagcatgtcgactcgcttaggcagatcatcgccaccttgcaggatgtgcaagagcggaaggatgcaaccgacatcgtggatgcagtcgaggtcaatctggcgtctcagaaacccagtaaaaccgttgtatctactttgcttggggctctacctcatgtggcaagtatcagcacgattgcgtccgcaatcatttccgccctttaa

SEQ ID NO: 344122 - DNA, 399 bp, Pseudomonas aeruginosa; identical to SEQ ID NO: 318399

SEQ ID NO: 344123 - DNA, 747 bp, Pseudomonas aeruginosa
atgaaaaaagaaaaaccggactgggaaaaatacgagcgcctggtggcgaagctggtgtctgaacaactctccaccgaatactgtgtaacacccaacgccaaaataataggaaaaattagcaataaaaaacggcagattgatgttttgattgactcaagacacgacaccaacaatgaaaaccgcataatcatcgacaccaagattcgcactcgccgaatcgatattacgcatgtagaggcttttctagggctaatggctgacacaggcgcaacacatggttacttagtttgccccaacggatatacgaaagcagcagaacttagagcccaagactctgtatcaattcgcctactaccactgaaccgcctagagaattttgatccatcgacatggcctaactgccttgccccaaaatgccaaaatggtcgtatattttgggatggctacccctctatagatgtcgccctcgcaccgctaaatggcgggaaagcaacctctatctcttacattcattacgtagggaaatgcgacaaatgcagccgatttcatgtcaaatgtctatcctgcaacgacatactgtccccatctcacgactctgatgaagattgcggaatccaatgcagttgcggcctgccatggttttggctcgcatctattgaagaggattacaaaggacagcgctctgcagagctgcacttagttcgaggccccaatcaaatacttacagcaagccgacgatcactataa

SEQ ID NO: 344124 - DNA, 423 bp, Pseudomonas aeruginosa
atgatagacaccatcagcgccgacgagcgtagccgcatcatgtccctagtaaagggtaagaacacccagaccgagatgcttgttcggcggttggtgcacaaggccggattccgctatcgactgcatgatgccaagctccccggaaagccagacttagtgttctcgcgcaagcgcaaggtaattttcgtgcacggttgcttttggcaccgccatgagggctgtccattttctcgaatgcctaaatcaaatcaggggtattgggtcgcaaaactcgaaggcaataaagcacgtgacgatatcaacctgcaaaagcttcatgatgctgactggcagacattagtggtatgggaatgcgagctgcgggacctaagcttattggcgtcacgcctaacctcattccttttggatgagtccccttgttaa

SEQ ID NO: 344125 - DNA, 5829 bp, Pseudomonas aeruginosa
atgcttgatccaatcggtggttttaaccgtatcagggatttctttatctcgtatgtggagacaaactttcgcattgcggataggagtattgcggcagagcgccgtcgcctcctcgaaacaaccaacgtctttgccacagcatcatttgtggagccggtactgcgttatcggacgcatgacctgcgcattgatcagatggtcggggttgtggacggcccactcgcgaatctgccgtatgatgtgcaggtggcgttcgctgaattggtgctttccggtttattcgaaggcgatgctgcttctggtgaactaacgcgtgtcggccgctatgcgccctataagcatcaggtcgagatgcttcaacgaggtattcagtcagggcatcctggcatcgtcacatcaggaaccggctcaggtaaaaccgagagctttatgttgccaatcatggccgcattgtcccgtgaggctgtcagctggtcgaagccggatgccggatatctcaagacgccctggtgggcgtcatcgaggggaaagtggagcccgcagcgtgatggagagaaccgtccggctgcagtgcgcgctcttgtgctgtatcccatgaacgccctcgtcgaggatcaaatggttcgtctccggcgcacgctagattcggacgaggcaagagcggtaatggatcaccggttcgaagggaatcgagtgttctttggacagtacacgtcctccacaccggtgactggatacgaagatcaccctcgtatcgcggatagcgagggggagaaaaagcggaggcagcgccggcagcgagagcttcgttcggcgatgaggaagttcaaccaggatcagaacgacgcgcgcaatcatgatgccgaggcgcggaaaagcgcagaggaacggggagcgtcccctcctgatatgacccgctttattttcccgtctttagatggcggtgaaatgctatcgcgttgggatatgcaggagacgccaccagacgttctcgttactaacgcatcgatgcttggcgcgatgttgtcgcgcgaggttgagggcccaatcttcgagaagactcgtacatggctccgcgacaatgatgatgcttacttctatctcgtcttcgacgagctccatctcattcgtggctctgctggcacggaggtggccttcctaatcaagtccctcattcaacgattggggctggatgatctagcccatcggcataagctacgtgtcctcgcctcgtcggcatcgttgccgatggatggcgaacccggcattcaatctcggcgatatctgcgtgatcttttcgcaccattcggcacaagcgctaaggccggagaggctggctcagagaacgaggagttttggaccgactgcgtcattaaaggcgaggccgacattccatcttgggaaggcgggtttattgcgtctggaccgttcctcaagttgatggaggctgcgcgcactaacgataaggacttcatcgcgaagattgtgaggagcgatgccttagagaaagctctcgatgctgttgccaacgcgctcaatgtcaccgcatccggtgatgcccgcatcgttcagatcgcggaagtcgcagcggcggttctcactagcgcatgtagggtagatgagggggttcgggccgccagcattgctgatctcggcaagcggctgtttggtgatatagcgaatgctgatgtcgccgtccaaggactaatgctcgcacgtgctctgccagaaagtgggcagtggagtggacgtgtttctcaggggacgccgtcgttcagggttcacgcgttcgtgcgcaatgtggaagggctgtttggcgcgccctccaatgttgcaggcaaagtcacatttacagctctaagtgttgagcgtggtttgtcccacggccagcccgccccgggcgaagctcgtggccgaaggctatttgagatgctttattgcgaggcgtgtggtgacctgctactcggcggtcaacgtggtaagcgcgtcggaaccagctcattgaccgagttgctgccctcaactgctgagctcgaaaatctaccggagcgcgccgcttcggaatactacgatcgtatgtcgtttgatcagttcgccgtgttttggccgagccagcttaccccacagcaggatgcccgcggctgggatgaatgggagccagctcatctcgatccagaatctggcgtcgtgactctgggggaggaggtgcccggcgggcggattggcggaaggctctatcatcagtctacgactgcgtcgcaaaacgggcatcgcaccgctcagccgttctgctgcccgaactgcggcaccgattactcgaataggccgcccagctcgcgttcgcggtcaccaatccgtgcattccgtaccggtgtcagcaaggcatcacaattggtggcgacagaactattcgagctacttcatgcggtgggggcagaggctaagagcatagttttctcggatagtcggcaggacgcggctaatcaatcgcttgagatcgagcgcctccatcttcgcgatttgcgccgcgagattttagtgaccgttgctcgagattaccttcaatgtgcagctgtagcaaaagttgatccgaagtcagctatggctgcagcgcagaagctgctggacgcgggggatatggagggcttccaaaaggctgtcgctgcgatcagcgcgcaggcgcaagacactcagatctctgtagagtctcgaaaagtacaaatcagcagactatttgactacaaggacactaccggcggtgtcggggcgttgatctccgaatacgtgaatctcggcatccatccgttcgatgaggttggtcgcaagccctacgataagcgtccttggttccaggctttccagaagtcaggagaactaatcagctatgcatcttggcttgacgatactcagcaaaaagagctgggcgtgttcattgagcaggagctgatggaactcgtcgacgacgttattttcgccaacaccttctttgcgctagaagaaaccggactcgcctatccatcaatcagtcgcgaatctggccctgacatcgatcgactagacgcttggctccgtgtcttcgcgagcgctactcgtgtccaggagaacaagttctatgatcgcagccgaaccaccgagtgggatcaggcaagcaagattaggccttcaagccgtgtttggaagtttgccgatgctctgaatggagatacaaataaccagcttcagagcgttctcgatgcatttggcaagcatggccatgtgaacggcatcatccgtgtaggacgtgtgtttcttcgggtttctgagccaggtgatccattttggcggtgcagttattgcgagcgcatccatctccatcggggagtaggcaactgtactcgttgttacaagccgctgccgtctgagaagagtggcaaggtggaggagctctgggagaccaatttcctcgggcggcgcatcgtccgaggtcagaaggacggagttgcccgtttccgcctcaggtgcgaggagttgactgggcagactgatgatttctcagagcgtttgcgtaaattcaagaacattttcgttgacgacttcggcgaagtggcgaggctagcgcgcgagattgacatgctgtcagtcacgacaacgatggaggttgggatcgacattggatcactccagactgtctaccaggcgaacatgcctcctcaacgcttcaactatcagcagcgcgttggtcgggctggtcgccgcggtcaggctttttccttcgtcatcactttctgtcgtgggcgaagtcacgacgcatattactttgcccatcccgcagctattactggggatccaccgccaccgccgttcctggcaacaggtcacgacccgattcctcgccgtcttctgacgaaggtttggcttcgcgcggcgtttcagaaagtgcgcgacgactttgtcaatgaagggggggtgtatcccggcgatctgctcgtcccaccggacgtccatggcgaatatgtgccaacggatgactattacgacgatagcgaaggttgtaactggcaggggcggttgaaggacgctcttcaggcgactatcgcgcaacgagacgcctatatcgacgcagcctgcattgatccagttcagcgggagcgcctccgcgcggagtccagtgtcgagaggctgatagaggagatcggtggacagaaggaatacaagccggtcagtcgacaggggcttgctcagttcttggccgaacgggggttgctgccgatgtatggcatgcctactcgggtacggcagctctatctgggagtgcgtgcggaaaccgacgacactaatccggattattcatggtcgaccatggatcgggatattgatactgccgttttcgagtttgcgcctggtgcggtactgacgaaggataagcagcgccatcgtgtgatcggcttcagtggcacgctttcagctccagaaagacgcgggaaggatgtggtgattgaaagcctatcgagttgggcagaatctgagcaccaggtggctctctgccaggcctgcggatccgcccgatacagccttcttcggccgcaatgtgctcaacaatgtgaagactgcggcgccgatatagagcctaacgagttcaacgattacattaccccggctgcattccgaaccgatttcaaagcagctgaaaccgacctcgacactgtgggacggatggcggtgagaacggtcgctacggtactccatttaggggggtggaaggatgctggatcgcttcgggtacgtcgcggtgctggcgtgacgattatgcagcttaacgacggggtggatgatgatactgggaagccaagtagattctccgtgtgcgaggctgaagatagtcgcgtccgtatccctcgagctgcatcaacgactcttacggatgatcaggcgatcgtacttgaagagatatctggctcgagcagtcgatgggtggtgaagtccaatacccagcgtactttcggcctcatcgctaagaaagagactgacgcgctttatctcgaactcctcgatttcgatcccaggctgactctcgataacgttgctaggaaaggtaatttcagtcatctacccacgcgctcagccgcgatcagcgcaacgcagattcttgtgcagaaggctgcgttagatcttgatgtttcccccgatgaattcgaagcactcgaacctcgattgcgcgaaggcaatccgatgctgcaaattgccgattctctaatcaacggttcaggactttgtcgccgtctcggcgaagatcgtagcgatggtactccgcacatcgtgcatcttatccgggagatgctcgcggatcgcgcgatttggccattgattgagttcctaagtgttgatgaggatggcgatcatgccgcacgatgtcagacgtcgtgctaccggtgtattcaacgatacggaaaccgctcctatcacggacttcttgattggcggctcgggctcacttacctacgagcactggtaacaccgggctacactgcggggctggatgcgaaggaccagatgttcccggagacaactggttggagtcagcgcgcccttgcgcttgcagaggccgttgcggggatgcggccggactcgctttcggttgaagtccatggcccttcgaatctgcctgtgcttcgtgaaaagcataaaggaggcgatactttcctgatcgttcaccctctctggcgcgtcgatggtgatttcggaaaaagtttgagtgacggggctgaggtgaagttcctcgatacctttaacctcgaacggagaccattacgggctatcgagctggcgaagattgaccagatgctgcgttag

SEQ ID NO: 344126 - DNA, 2133 bp, Pseudomonas aeruginosa
gtgacagtggatgttaaaatggagcgcagcgtatttgcagcttccgacttaaagcgattcgcgggtcactttgtccgctggcagggacagtatggttccatcgcggttgttggccaattgaaccagaatggtttggacataattgcgaacccgaagcgactattcccacgtgatggtctggttgagatacaagggggggggcagcatggtgacttacaccaaggcgagtgggtcgagtttgatgtaatcaggaacacgcgattcagagctcctgcatttaaggcgcttcacttgaagcgactaccgcgcttcgcggttctaccggagtcaaccttgtcgatttaccgtgatctcctgacccgagacggctggtcgggagatgcgaggcctggtctctgggcgttccgcctagccgacgacacggtgatagtctccgagttggaaaccggtaaggacggtcggctccgcattacgcgaacttccgctcgagaggtgaaacgttacaactacgttcatgagggcgtggtacgcgctaataatggcgtgaagtctgacgacgtcttcatcacttcgatatctggtgagatgacctcattagattggtcggacgatgtggactacgtatcccgcgttgtcagttctcttgcagacatgagcgaccctcgcgtcgcggagatcatcagctggctagagcgtcatcaggaagtcataacgaatcgggtatccaccccggacgacagagaacctgtgcttgacgtgctacgttcggcagctttggcaaaccgccttcgagtcgatcgtaagctgatggaggtttatcttgcggcggtgcttcgcgacgaagccgtgcgcaatgtcgtggctgattatgtgaaggaggggcacggagccgaaggggacaagctgcgtgccgaacttcgtgaggaaatcagtgcacagaggacgcggtgcctcgcccagctatcagctgaaattagtgcggagcgtacggagaggatggctcgcattgaacaggagcttgaaaagtacgaggcagacggtcgttcggagtgtgacgtaaggctacaggatgccgagcacgctgtttccgtccgaatccaggcgctcgaagccagcgccagtgaacgtagcgagcaggtagagcgtcaaattgctgagcagacgcagaggctgatggatatcaaggcagaggtcgcaggtgtagaggctgagcgggggacgctttgggccgaagcggaatatgctcgaacacagcttaccgatgcgaagggggagatcgatcgcttacttgccatcgcagctcagcttagtcctccaatgatcagtgccccgcagcatgcagcaagtaagatcggtatcggtaggatctttccgaactatccgaaggttgacgtagccgctaaggggcagctgatcgcgcgtcaagtgatgctctcggagaaggggaaggatgttctgcggagcctggtcgttatgttgctctcgggagagctgccaatccttgtcggcagcgacactacggatctattgcgtgttgctgagtcggtcatctgtcccggacggtttgtttccgtcgaagcagacccgacgcttatctcactcgacgacctctgggccaggccgggttcgggcgcgcctactctactggcagcagccgctgaggccgttaaggatggtggagcgactttggttgttatacgaggtattgagcggtccggcgcgcgcttctggttgccggccttgtcggaagtccttcggagtggtgggttgccacgcgggctatttgtctgttgtacggtccatgagcccgagcacgaagaggtgcgcgttctcaggggaagcgtcccgtggctcgaaataacgaacgtcttctcgcctggagcagcgttggctggaccgtctctcctgacgcctccccggattgagctggagatactggatccaggggaaatgccgattgatctatctggagctagttcgctcgcgctggagctcggtgaaaacttgagcctggatattgctatgcgtagcgcgcgcatgctcgcggaagcattcatattgctcggtgacatggagttggcgcagcgtctcgtcctcaaagttgcgaagcagctggtcatgagttccaactaa

SEQ ID NO: 344127 - DNA, 2520 bp, Pseudomonas aeruginosa
gtgacgcaaagtgtgcaagtgtcatcggagcttccggttacattgcacgattgggagctgacactcactcgggcgctattgcgcgctgagggcggagatagtgacgccatccgctcgttcgagattactcctgagacgcttgcaatctcctgtgggcttgatatgggggctgccgaggccgcggagtcagcattcaggaatgcgctccgagccgacccccatctgatttggtgccttcagcacggtcggttcaaaaagccagataacgaccagccgaactgcttcgcgatgcttgcgctcagtttgttggtagatagtcttcttgacggcatttacgaagaaaaagggcaatatcgcgccaagcttgccgaatggttgagcattgatcgctccttcacggacttgcacggtatagcgattatgtggcggcagcttgtcgcttggctggacagtcgcatcgctgccggtgcgccgttccgacgccttatcctgccagcgataccgataagctggactcatatcggttataccagatacctgtcttttcctaccaagcgtgatatccgcttgctgtccaagcagatcaatcgcaggggcagcactagcatcgatcctgcaacgttggtgtggcagctcgacccgataatacgcgcttcgagcacctcgcacggactaaaggctgctttcgaagatttcaagatggctctcaggtcgggtgcggcatccgttgatcaccggttctggcgcttggtgcttcgagcgagtatgcagtcggggcatgcggaaccgaaagctggaagcctcgtgatggatttcgatgaggacggtgttcgtcgctaccgggttgggcagttgctggatggaaatactgcgttcaacttgctaggtagcgcaatcgcatcgcccggggtcgctgatagttcaaatctaggaccgtccaccagacgcggcgtcttgtttttccgctccagcgggctcgcgagttggaccgctgctggcgagccccaccctggcagcggtccctttcatgtgggaatttccagtcaacacattggttctgttaggggggtgtgtaccgagttcatatcctccggaagttggttcattactgcacacccaattaccgggcgaattgttgatgacatcctgacccagatcggcatcttgaacgccaagcagacagtgcgaatgatcggtcttgtggatggcgtgcgcgtcggtaattcctggctcggtcagcctcgataccttccataccttggcggagcatctggtgatgtcgtgatcgaatcagtggacggtggttcgcgtgaaggattgtcctggatagacggcgaacttcgagctgatggtcccgtggatgggcagttctcgatctctgatgctggtgcgcattggaccaggcgcgcatcgttcgtggcactggccgaagtccatgctagcttcagcgcttcggcctactctctgccggagcaggcagaatggttgggcgcaacgaaccgaaggtgtgaccactctcatgctgtggcgagggagtgggacgatactccctgcacaaaccaggacatgatcgaagccctctacgcttcgtcgcggtcaggcatatctgagggcgacgtgatttcgattatcgaccgagctgcggggccctttaggtggcaatctctccggctgctccaagaggcctcatttttcgatgctcgcccgctcgctcgttggagaggtcgggtcttcacgctaggacggccgaggctcgtgcagattcaaatgggtagcagaacggcgctgctggtttctggcgcagtgcccgcacgactcgaagccaactttcgctcgacggtgatatcgcagggggggacagcctttcgcaggctttcaaaagagagtttcgctcttccgctgttgggggcgtttggagtggtgcccgagatattgtcgagagctcttgggtggccgctggttgacgcaccttttcagccggatggcaccggcgtcagtcgactgattgaaaccaaggtgattggagaaggctaccaagtatcgtcccattgggattggtctgttggccgattttgtagtggagtaggtactgatgagtcggtagctcttgtcagactcgtccatccaggattacgagaccacgatatctatcgtgttcagggtcgtaaatgcattaggtcattccactcacggcatgccgccattatcgatgcttacctgcaggccggaaggccactatttagatttgacgaagatcatttatctcggctcacctctgagggtgcgctgcccttggaaatatcggctgcactccgcgtacgaactctcttcaatgcagcttgtacaggcagcagctggcgatatgaggtaaccaagcaagacgctgtgtggttggccagacttttgccaggccttattgatggcctgcaaggagaattagtggcagatgctgctacatcgtatcgtcgtgggcggggctaccggcgtcctatttggactgatggaggacttgtggagtga

SEQ ID NO: 344128 - DNA, 1197 bp, Pseudomonas aeruginosa
ttgtattctgaaaagctaaagtattacgagttcttcgcgggcgtcggtatggcgagggcaggacttgggggggattggcaatgcttgttcgctaacgacagcgaccagcttaagagacagtcgtattctgaaaattgggcaggagaagcttttgattctcgcgatgttgcggaggttgaaacaactgacctcgatggaatggccgatctcgcctgggcttcctttccttgccaagatctatctcaagctggctcgaaagccggtatcggggaggccgatggctcctcggtgacacgctctggcgctgtgtggccgttcctgaggatcattcgtggcctggcggaagaggggcgacacccggtcctgctagcactggagaatgtggtcggcctccttagcgcgaatagtggcaatgacttccgttcactctgtggtgccctgaacgagattggctatcgttttggtgcgatcgtagctgatgcctcgcatttcgttccccaatctcgcccacgggtgttcatagtggcgattcgccgcgaggtgcccataccggcagcgctacaggctgagcttccacaatctccatggcatcccaaaactttacttcgtgcccgtgcaggcctttctgttgaggatatggctggttgggtctggtggtccccaggtgccccacctccccaaaaggacttcgagctcggggatatcatcgatctgagtgaggatgccgattggaacaccgaagaggcaacccagcgcctcattggtatgatgagtgagttgcaactcaatcggttggcagcggccaaggcagaggccaggccgatgatcgggagtctctatctgcgaatgcgccccaacggggatgacggtaatgtgcagcgggctgagattgcttttggggccacgcttggctgtctgcgcactccgaaaggaggagcgtctcggccacgcatcattgtcgttgagggcgagcgtatccgcacacgtttgcttaccgtggtggaggccgcgcgtttaatgggacttgaggaggatttcgctctcccggaaacctatcatgactgcttccgcctgatcggtgatggtgtcgtgccggcggtcgttcgttttctggcagatagactgttggagccattggcgaagcacgcgaagggaggaagccttttcgccacacttaaacggagagaattggcgtga

SEQ ID NO: 344129 - DNA, 336 bp, Pseudomonas aeruginosa
gtggttcctggcttggctgaaaaaattgttgactggaccaccactcagacttcccaccggcaggaaatggaagctagatccatcaggattgatgaaaagctttctacctggtacatcgtcgaggtgctggttgggctgattttaggtttcctgattgcgcttctggtcctggccgcctcggtctatctagctctgcacgatagagagctggcggctacggcgctcggcggcctggggtttggcagcatggttatcgcgttcatcaccggcaggcgtaaacgcgactcgtcagatgacaccgaaaaagccactaaggaccaaaaagccaagaaatag

SEQ ID NO: 344130 - DNA, 315 bp, Pseudomonas aeruginosa
atgtctgcctgctggccgctgcagggtctgacgccggcgcagaaggctgtgctgatcagcctggcggacaacgcgaacgacgagggcgtgtgctggccttcggtggcgaagatcgccgagcgcacctgcctgtccgaacgtgccgtgcagcaggccatcaaggtgctgaacgagtgcagggcgctgagcattgaagcgcgccaggggcgctcgacgatgttcaccgtaacccccgcagcatttgcacccccgcagaaggttcacccccgcaggaaatgcaccccacccccgcagatgctgcacccagaaccgtaa

SEQ ID NO: 344131 - DNA, 135 bp, Pseudomonas aeruginosa
atgacgccaaaaaagccggcccctaaagggtatcgctgggtatgctgccgctaccgtcgggtgaaaaactccgaccgcgtgctggatgctcatgactacggccacgaagcttggtgcttcttggtccgggcgtaa

SEQ ID NO: 344132 - DNA, 372 bp, Pseudomonas aeruginosa
atgctaacggcactcggaaaactgttaagaaaggaacgcatcgacaggaatctcctgctcaaggatatggccttggggctggaggttagcccggcatacctctctaccgtcgaaaccggtaagaaaacgttcagtgacgacttcatcagaaaagtcgctcggtacttgggcttcgctccaggaacgcgggagtatcacgagcttgaggatgcggccattcttagtcgaggtcaggtacagataggggttgcaggcgtttcgaataagcacaaagaggtggctcttgctttttctcggcaattcgaggagatgcagccatcggagcttgacaagcttctcgctcttctgaacgagccgcaaaagcaaaggtag

SEQ ID NO: 344133 - DNA, 942 bp, Pseudomonas aeruginosa
atggggcagttaaatctggcgttcgatattcgagcgcttccagcgaaacaccatcgcccagacaccaccataacgaacaagattgtcgttagcgtgagcggtgggcgttcgtcaatgttcatggctcgcatgatccaactgcattgggcggacgagtacgagctcgtcttcatcttctgcaacactggctgggagcatccgcgcacccttgagttcgtgcaggagtgttccgagcaatggggaatgaacatcatctggctcgaagcggagatcaatcagaagcgcggcaagggcgtctcctaccgggtgatcaacttccagaccgcgagccgttgcggccgacctttccgcgagatgattcagaagctcggcctgcccaataaggcgtttccgttctgcaccagggacctgaagacccggccgtcgttcgcatacatccgcgatgcgttgggatggggtggcgaaggcaagctgggcaccaactattacctcgcgcttgggatccgtgctgacgagccgaaacgcctgagagccacgcccggcaggatctacccactgaccggagcctgggagtccgacaagcaggacgtgctcgactggtgggaagaccagccgttcgacctgaatcggccgctgctcaccggagagaccatccccttccccgagcgctacggcaattgcgtctggtgctggaagaagtcgctgcgcaagcacctgctgaacctgcaggagcacccggaatggtacgagttcccagccgagatggagcagcagtacggccaccatggtgccgggttcaccggagagccgcgggtcttctttcgggaaggccgtagcacccaggacatgatcaagctggctgaggttgccacacccgacgaacgcatgggcgtccgcttcggcgaagacgatggctgctcagagtcctgtgaagccttctga

SEQ ID NO: 344134 - DNA, 279 bp, Pseudomonas aeruginosa
gtgagcgacaaccgcgtacaaattaccgccagcaacatcaagaacagcagccaacgccgcagcgcaactgaggcagtgtggtggaacatcattcgccacggctacgaaaagaacctggcgttctttctgctggatttgctgagcacgccgaccgcgtacaaccgcaagtacgaccgtcgcctgaagtgcgttaaggagatggaagcggccagggacgaaatgctggcacaggcgcagcgcttcgcggatgcgttcgctgaattcgaacagctcaaataa

SEQ ID NO: 344135 - DNA, 255 bp, Pseudomonas aeruginosa
atgttttacgaccgtttcggtgtttttttccactgcggtttctgggagaagacagtggcctttcgagtcgacaacccaacaatcaacggcgcaaaggccatcgtttgtgggaaatgcgttggccccgctgagtccggcgacccaagaaatatagggggcagctttctttgcgagaactgcggcctgccttttggccggccggacgcgcatgacaaggcaatcgccctggccgggttggaggtaggtcatgagtga

SEQ ID NO: 344136 - DNA, 1608 bp, Pseudomonas aeruginosa
atgcccagattcctcagcaacagcgcaatacgactcctggaagccagccaagagtctttggccttggcgctgcattgcctcggcacaccaaaccggggaaacctaagagtagaggtagctcgatactcacctgcaattggactaatcggggctgctgctgagcaggccttggctgccatcattgtgcaggttcgcggcgatgaagcgctggccacctctccaactcagtacaaaagtgctcgacagatcttgtctgacatgagggatctactccgcgcaccaatcccagccagctcatttttgaccgctggtgtggacaatcctgcccagcatcgcgagacgattcttcaggcgtcagaagggttctcggtattattcacctacagggcaaccgggctccatgctggccttggtgtttctcgggcagtgacactgaaacaagcattcaaggtttacggcttccttgagctgctaaccaagtcaacgcgcatccgaccttacatggatcgactgccaataccgccggatgaaatcattgatcagaatgtgctggtagatgacctcatacagaaattccagagcaacgatgccatgaccgagcgggtcaatgccttgcggtctttgtttctaatcctacctgaggtacctcaggaagcaccggagtggcttgaagcatttgatcgctccgtggtctcgccccgccctgcagacatcaccttgctattagaaactcttcagcacgcggctcccatgagattccgccgtatcaacgcagacggccaagcactgccggtagttgtccgaccaaacgccccaaacgcactgcctattgccttgcaggatatgcgacaggcctttggacatacacgtgagcaatttggagcagatgtgggcaatgcaaatggccgacttgatcagggaaacctggatttgcccccagaatcgttccttctcgacttatgccttcagggccctgagcagctccgcgagaccctgcagaggcaaacactcacaggacaggaggtctggcctttcgttgccaccgcgttaagccaacagggcacagagcgaccctactggttccttgtatcgatggtcgacgacatcggccagctaataggccagctccgcagagcggtggctgtgtcgcgtcaggatcagttcaaggagcgctgcaacgcagctatcagggcccttgatgccaagcgacaggagcgcacacttgcacccgctactgagattgcaaccttcactgttgcacaaactgctgcagctgaagccgcacgggataacatccccgacttgatggatcgcaacgatggcactgttcgtgaagcctcattggaggcaataccgccactagcggctttatacgctggcgaattcactgcaggccaagcttttcctgcggtttatgcatctgataacccagcctcaaagaagtactggactcgccagttgctcatagcagcaacggatgctggtgatcgctcaatggtcatcacagccctgcgagaaccggagttcgccaacctaaaaacggatgcgcggaaagcgcttcgcctggtggatatcctgacgtttgggccgaatatcgaacttggttga

SEQ ID NO: 344137 - DNA, 1377 bp, Pseudomonas aeruginosa
atgcctcgaacccagcaaaaccttaccagccttagagacaccttcagccagatcctcggcaatcagaaagaccactatacggatacacgaatccctgaattgctctccaggctgggtctagatgattgctcggagtacaactccaagaggcggcatcttgagaaagcagtagaggccgctggtgatactcaaatggtggccgccgcccagagagccctaaagctacttggtttcgaggatcatgagcgcgaccagcttcaagagctcgtctgggacgatgggacagcacctgtaatccctggtcgctaccgtcgagagctggcggaaaggctcaacaccattgacctgtacatggacaggacttcgttcgaacaggtgctcagcgagttctggcgaatcgacacaatctcgttcgtggacttgctccgaccaaccccaacactccgccaggagatcgtccgtcactacatcgaaaatcccgattgggacgcggtaacgctcttcgacaagctcggtgcatttcaatcatcccacgcccggtttggccgattcgtcgaagcgctggcttcgtcacgggtgctacccagcgaacccgctcagcgaaaatttatcgggatcgtcaacgatatcctcaaagcatgtggagtccacattgtcgtaggaatgggagaggatgcgttcctgaccgcctgtttggcctacgtggggtcgggcaagcagtcatcccccaagaacctgatcttcgcttccacaacgaagcccgacctgcgcctgggcaatgcgctggacaatgatgtcgaagtcgtcaacagcatcgaggacgtcctgatttatgaccgccctatcgggagttccggactcctatggcgcgaactccaggcttggtacgcacagacctatggcgtcgatgaaggccaggccaagaatcgcctgtatcaacgactgaaagcctgcctgccaaaatcatcgccccctcaaaggctcgccttttccagcttcttcaaagccttcacaacagcaattcctgagcttccggtcttgctgcccgaagtatggtttcactgggatccccagacagtgtcacgacgcggcaaggacgcactgctgaggtcgcgcatggacttccttctgctgcttcctggtggggtacgggttgttatcgagattgatggcaaacaccactattccacccaagacggacgctcaagcccccgcctctacagcgagatgatggccgctgacagggccctgaggctggcggggtatgaggtctaccggtttggtgcttccgagctcctggagcccaatgccgaggaggtgatgattggattctatcgctcgctgtttgagcggtactcgctgttgccggcatcgtga

SEQ ID NO: 344138 - DNA, 1053 bp, Pseudomonas aeruginosa
atggaatgctttcgaatagatgagagcggctacaccgggttcgacctgttgaacgaagcacaacccttccagggggcggcagcgatcggaatcgatgacgcagaggccgcgcgtctgattcgtgagtatttccccaagcttcaggcacctgagctgaaataccgatcgctttcgaagcgtgcgagcaatcaccccaggttgttgggcctgatcggcgatctgctggctaaccacaagtgcattacctacctctgtgacaagcgcttcgcattgctcttgaagtttgtggattacggggttgagccttattactacgagcgcaacatcgatttctacaaagatgggcgaaattacgccttagcgtgtgtgttgtattacgcaggggctcgattgctgggtgaggaggcgatgaggcacctggaatgtgcatttcaaaatgctatgaagctcaaaagccccgcagcgctttccgatctagttaacgctgcccggcagaccgactggaggaagctcgcagatgctatggggcctctggtacacgctgatcctgattgtctacgcgccattgcaacgccgggggttacgaccgacttcgcattacctgttcttttggcactcatcactcggatggaactgatgagtgacgggccgtatagggtggagcatgatcagtcgaagaatctgctgacctaccatgatctgctccagcgtcagatcgatcacacgggtgaggctgaatttcggcagtctgcgctcgcgagtattcggtatccgctgaagctcagcgaggtgacccaggtcgactccaagacgagtccagccgtccagcttgcggacgttctcatcggagccacgattgagtccgcgcagcgtatgactggaaggatcgctgatgggttggatcctcagcgtcttggtgagttgtatcgcgatgatcagattatccacatgctgccatccgtggatttggatgagcagcgtgaattcaggaagggtacgcaggctgcagcgttgatcgattacttcgcggaaaatttctcatcgccccggtag

SEQ ID NO: 344139 - DNA, 762 bp, Pseudomonas aeruginosa
atgaccactcaatctcaagtaagcgtacgtgacatgaaaaaatgcaattgggcgtttctcgtcaaagggccacgctcgtcattagaatgccttccatcggtcagtccgtggtggtcgatcacatttgtaaccaaccgctcagaatgggaggcattcatacctgaccacccacatgaggctgattcaaaccggcagttcgacctggccatgcaagccataacccgaatgaatggcttagccgtaagctcgggccagccaggcttgatcgaaatgacgcaccttgtggcctacgactcggagaacaacagaactgtagctattccactcaaattagtaatcaccgtcaccaatcttggaggacttggcccgaccaagccagcagcgatggatttatcaaggattcgccctgaaagcctcccgagactggctaccctgatggactattggggacaacccaatgccgagtcgtacgaggggttgtacaaaatcatggagtttatcgagtctggaaacagggagattctcgaaagcgtttcaggcaaagcccttagacgactgagcaatacctgtaacaacttccatactggcctatcagcgcgccactcagatgagagggagccgccggtatccaaacccatgccgctgagcgaaatccggaaaattgttcgcggtttcactgagctttacatcaggtcgataactctgccagaccatccttccaacgagcctgcgccagagcaatctgatgtgcttgtgaaatga

SEQ ID NO: 344140 - DNA, 1818 bp, Pseudomonas aeruginosa
atgtttattgaaagtattatcgtgagtggccctgacctgagagatgcggctgttttttttgaaaagggcgcgaacgttgttcagggtggctccaataccggtaagtcatacattgtacagtgcttgaaatttgcccttggttcaaatgcaccaccgaagtccatcaaggagtcggtgggctacaccacgctcaaggtgaagtttgtgcacgatgatgggcgctcctttaccatcgagaggcacctttcagaaagctccaaacctacattttatgatgaagatgggaaggttttgatcttgggggttaagcacaatcctaagaggatgaactcgatttccaaccagtttttgcacaggttggggttgaatggaaagcttttgttgaaaggaacagagtcgctaaataatgcctcattctctcttcgttattttgagaatgtcttgttgatggatgagacgcgaatcgtggctgagtactctcctttaggtacgggccagaaggatgagcggtttctggaaaaatccattctgaagcttctgttaacgggtaatgacgataccggggttaaacaggctaaaaaggagttggaatcaaagggggcattgagacataaggttactgctgtagaaggaattatcaagcagttttatccaggaaatgatgccgctgaaagccttgaactccagaagctcagctcgtttgtcgacgaggtcgcgcttcggctgacgctggctgagcaggagctggaaggcgcgttccattcgagtgaagacctgttcacccagaaggccaaccatatcaccgcactggagttggtcgaaggcaaaattgctgaagacaaggctctgcttagccgatttgacatgcttggccagaagtacgattcagatcgccagcgccttcagggcattgaacaggcggcagttctacttgatggtgcggacgcggtgctttgtccaacctgtgggaatcatttcgactccgagtcgtgtacgacggacgtagatgacatcaagaaaggtgtctccttcgagttggatcgaatttcgaagaatatccacgagctcgcggaagcccagggatctctgacggcagcgattgagcggaacactttaagcgctgagagcaccaagacgtccatcgcggcagtggagaaggttatcacctcggagctccaggggttggttcaggcagtgagtgacctgaaggagctcgctgcgtgccttaagcacgatcactcggtgctggatagactcgtgaaggataaggccaagctgagggaagagttaaaccgactgggtgttctgctacttgaggagcaaaacacttatacccctgaaagctttgaggactctgccaagcctctggtgaaagagattcaggatatcttgcagcgctggagtttcccgaatcactccccagtggaattcgatttcggtgcgcgcgacatcaccattggtggaagtaagagaggcaatttcggcaaagggtatcgggcgattgcttcctctgcatttgctctggggctgatgaatctgctgaagctttctgggcgccaccctgggtttgtagtgctggattcgccgctgaccacatacaaggaaggggatccggagcctgaggaagatgatgaggaagtagcggcggatgtgatttatgcgttctatcaggatatcgctgataacttcaaagattctcaagtcattatatttgagaacaaggagcctgatatggcgctcatccctcatatgaattatcagcatttcacgaaaagcaaaaaaattgggagatatggcttcttcccattaagaggctga

SEQ ID NO: 344141 - DNA, 1068 bp, Pseudomonas aeruginosa
atggcatttggtgaaaacaccatcaagctccctccgccaccagagtttgagctcacggcactcgatgtggaaaaaggtgagccagtccatcctctagatcgtctgcagattatgtcgccagatgcttgggaggtatttacgctggagtttgtttcttacctaggaaatgattacgagtcggtaactcgctgcgctggtgcgggagacaaaggccgtgacgttatcgccaagttctcatcagggtgggataattatcagtgtaaacactacaaggataagctgagcattgctgacgtagttgcggagttgggtaagctggtttactacacatggaggggcgattacaccctgccgcgtgagtatcgcttcgtatcgccgaaaggctgcagttctcattgcattgacatgctggccaagaaggctcgcatcaaggctgagatcatcaagcgctgggataaggtgtgtaaagataagatcacgaaaacggagtctattcctctccagggtgctctgttggattatctcaatggtctcgacttctctttcgtcgatgaaatgtcctcccaagagttgatcgataagcatgcacggacaccttatcacacgacccggttcgggagttaccacctgaagcgaccaccagctcgaaagccagagcctggccttgctgataatgagaaggtttatgttgatgctctcttgagtgcgttctctgatgccgatggggcggagtattcatttagtagtgtgatggatactgaatacaaggatgacatggagagagctcgaatcaacttctacagtgccgagtcgttagagatgttttctcgtgatgcatttcctacggattgctatgagaaactcaagagtgagtgccatgaaggtgtgcatagtattgtgcgtaaaaaattcgacgatggataccaacggtttctcgaagtgagcacgcagtccgttaatattccatatgactcgcatcccctccgtcacttcttgcagactgcagatcgtaaaggactgtgccaccaattggtgaatgaccttaagttcgaatggatcaagaaataa

SEQ ID NO: 344142 - DNA, 312 bp, Pseudomonas aeruginosa
atgagtgagcaggaacagggacaggaaaacgggcaggaacagaagcaggaatacgttttccatcccgctgatctagtccaatacgccatggacaaacccattggcgcagcccgcgctgcgctggcaattggactggaaggcgctgatgttgaccccgacataatcattgctgaactggtggggaacatggagtttaatcagcgtttcttgaagaagctcacgagcgccttgcggaagaacccaggcaaaattgtcgatgatatgccgaggcatattcgggctcttcaggtggagcgcgtcctcggattatga

SEQ ID NO: 344143 - DNA, 693 bp, Pseudomonas aeruginosa
atgcctaggcaagggcgagtggttttaccgaattatccgcttcacgtggcccagcggggacacaatcggcaagtggtattcgccgaggacgaggactaccagcgttacctctccgatctacgggacctcaaggatgcctttggtatcaaggtctacgcattttgcctgatgaccaaccatgtccatctgctcttggcgcctggtgattcgctgtctgacttggcgcaactgatgaaaacgctggcggcgcgcacgacacgatatcggaatcgcttggagggccgttccggaacgttgtgggaaagtcgctataaatcgagtgtcgtacagagcgatgcctacctgctggcgtgttgccggtacatcgaactgaaccctgttcgggcgcggatggtggacgatgtggcggcctatccctggtcaagttatgggctgcgggcggattggttgaaggagccaaactggttggatatggatccctgcttcattgagctaggtcagacggccgaagagcgatatcggcgatacgtaacgttcatgaaagaggcgataccggccgaggagttgaggctgattcgcgaggcggttcagcgtggacaactgacgggcaatcaacggttcgtggacgagatcgagcgggtagccggggtgagaatagagcggcgtgggcaagggcggccgagattagagtag

SEQ ID NO: 344144 - DNA, 1194 bp, Pseudomonas aeruginosa
atgatttatattcgtactggaaagccgggtcacggtaaaacgcttaatactattcgtgagattgacgaaaaggcatttgctgaaagtagggtggtttactatcacaacattccggaacttaagactgacaagttaaaggcgtcctggttcgaatttgaggacccctataggtggtttgagttgcccaatgacgcgattatcgttgttgacgaggcgcaaggttggttcggtgtgcgcgatccgcgccagaagccgccagagcatgtaagccgcttcgaactgattcggcatcagggccatgaaatgcacttggttacgcaggacccgcgattcatcgacgtgcatatccggcgtttggcgaatgggcatgttcacttctggcgggtgttcaagtcccagcaactgttgaggttcgagtccgatacggtcattgatgcggtcgagaagaaaaccagcttcaaggatgcggacaagaccacgatcaagctcgataagaagtacttcggcatgtaccggagtacgcagggcaagcaccatttcaaggtgcaactgccgaagaagttcattgcggcatgcgtggtcctggtcgttgcggcgttcctggtctaccgggcatatgagcgttaccaggaagaacagcagcaagcggcggcggaagaagttgcagctcctggtgcggcatccgtggttgactcggtgacggacaaggtcggttcgatcctgaacccggtttcggcggcaggtggcggccaggaaaaggtgctgacggaagcgcagtatctggagcttcgcaagccgcgtgtgccggacttgccggcgtcggcgccgatctacgacgagttgaccaagccggtgacgtacccgaagccgttctgtgtgtcgtcgcgcaatgaggacctggtgcgccgcaacgcttcgaagatggagttggggtatcgtgatggcgtgttgaacgggtgtcgctgcaacacgcagcaaggcacgcggattcggctgtcgttctcggcctgcatgaactatgtggagaacggggcgttcgatccggcgattcctgatcgctcgatcgatcagcgcatggttcagcctcagccggcatcgcagcagttccaggtgcagcaggtgcagccgcgggatgcgttcgggacgcgggtcactgtagtgcctgatagcagccgttcgccccgcacgttgtga

SEQ ID NO: 344145 - DNA, 327 bp, Pseudomonas aeruginosa
atgcaatatctatatgctgcacagttgatcctgatgattgttatgccactggtacgcatggtgctgcgcttcctgggcgtgggctttgttacttacatgggcgttaatctacttgtggacactgcgaaagatttcattacgtccaagattagcgcgtcctctgtagagatacagatgattcttggattgggcaatgttgatatagcgatcaatatttgcatggcggctgttgtgactcgtgcgattctttccggttgggataagcgaactgaccgcaagcgcaaacaagtttggaacaagccgggtggaacttcgattgaggcttaa

SEQ ID NO: 344146 - DNA, 1323 bp, Pseudomonas aeruginosa
atgaatagattatttctagctttattggtcgccttctccgcgaatgcctctgccgattattattattggtatcttagttctcacgataggaaagtttcgtcgccctcggcgggttgcgatatttatttcactggtatatctcgcgatccagggcgggtttttgttatggaaccttcgtcaaatccaagtgaggcgggtaaggttttctattgcttggttcgctctggtgattgggttctttttaatacgactgtttatttgaaaggcgataggtgtcctgaaggcagtaatcttgatatgactaccggtgttgccgtgtgcaagcctgataatcaatgccgggataaggctggacaaactacgtcctggtcattgattcgcccggacttgaatggtcttggctcgattgaaaacgtctgcaaacagggctgccgggtcgccttgggcgcttcgacgtgcggcccgatgaataccgacccgacgaagggattttgttctggcacgggcacattcaccggcgatgaatgctcacccacggatgagagttcgggtggcaacaatccggaccccacagacccgactgaccccaccgatcctacggacccgactgaccctaacaagcctgacgagcacggttgtatcccgcctgcgaagtggtccggcacgacgtgcgtgatgcctgatccgggcgatggtggagacggtggtgatggagacgggagcggcgacggtggcggcgatggcaacggtaatggaggaggggacggcaatggagatggcggtggtgatggagacggcaacggtgatggggacggtaatggcgatggagacggcaacggcaacggcaatggcaatggcaatggcgacggggatgaggatggcaagtgtgacccggccaaggaccccagttgcaagccgtcttcggtttctggtgaggcgtgcgaaaccccgttgcagtgcgaaggcgacgccattcagtgcgccatcttgcgacagcagaagcaggcgcgttgtgatgctcaggaaatgaatgatttcgagaagaacaaagagaagatttcgaagttgttccagggcgaagagttcaaagaacagcctgatcaggaagtggaaatcccctcgttcatttcgcagtctggtcggtttctaccgtcgggttgtccgcctgataaacagttcagtctatctactggtggcggtcattccttcacgttctcttataagccgctgtgtgcgtttgcttctgacctgggcgtgctgattgttgtggcggcaagtatttttgcgacgctctatgtcggtcgcggttttggaggtgagtga

SEQ ID NO: 344147 - DNA, 363 bp, Pseudomonas aeruginosa
atgctcgctctcatcggcctgtgccagggctattactgcgaaacccgcaccgtcaacggccagaacggccagcagcaaatcaccgagcattcagtgcttgtccaggtcgagcagccgaacaagttcggtctgatcgaacagaaaattatcgccgtgcggatctccaagcggcacatggatggcggcttgaacaacgcctggaatcagcagaagggcaagacggtttccgtgccggtgttcgtccaggcctgggcgagcagggcgggtaacgccggcttcgacttctggttgtcgggtgatggcttgccgctccagctccaggccgtccagccggccgcgccgaaggcagcagcttcggcatga

SEQ ID NO: 344148 - DNA, 258 bp, Pseudomonas aeruginosa
atggataaggtggcccatcagtcgctccgctgggacctggagcaagacctttcccacctcgtccaggacgagcacctggtgcgccaggtcctggacctggtcatgcgtcgagtcgtccaggaacaggcggccgaggccgttcgccggcagcgcatcaaccgagacttcaagacgttccggcgcggccggagcgtgacgccgcccgcatgggcatttcgtgaaccgggcacaagcccacaagttgaacccctgaggtaa

SEQ ID NO: 344149 - DNA, 228 bp, Pseudomonas aeruginosa
atgaaagcgcctcttcggtttctgctgggttgggttgtcttcatcgccctgttcgcgatgttgacgccgattgtcgccgccattttcgagttctgcgcggcgttcccggtgctggccatggtggttgccgtctgcgccctggtggcgttcctggcgttgttcttcgcgttcttccggcgcttcgtgcgctggctagacgagccgaggagggcgcgcagcgatggataa

SEQ ID NO: 344150 - DNA, 1296 bp, Pseudomonas aeruginosa
ttgctcgacaaactgcatctgttcgtcccgtttcgcctcgagcacatccaactgctcggagtggaaggacgtgcggatccggtgcatgtcgtggatctggaaagcctgggcgtgccgctgcaagggcagatcagtcgaggggagggcggagagctacaggctgactacctgcggcacgcttgggagtcactgagtacgggcttcacgcctttggcgttcaaggtgtttcaccagtccctgggcaagcgcctgatgcccggcgtagagctgaaggccagcccggcgaagttgctccaggggcacaacgtgttcggtccgacctgtatccagaagggggccgaggtgatgttcaagtggctacacgccacgtatcccgacctgttcgccaagctcgatgttccggcgactcaggtctacgccctggactgcacgtattccagccggttgccggatgagcgcaccgcgctccaggtcatccaggcgctgaccaacgtcagcaacggccacaccaagagtcgcggcgacaactaccagacgtccgcctactggggagcgaaagagtcccgtctgaagcgcctgaaggcgtatctcaaacacaccgagtttcaggcccagttggacgaattgaagcgggcagggcgggccgatctgtcggctgctcggtctgctcgggtcatgtctgacccacggttgcaggagtgggtgcgctacctgctccgcatggaggccacggtaatgcaccggtggctggaacgccggggcatcccgtctcggcttgttgatctgatcgcctaccagcagcggctccaagaagaggggcgctgcctgattcaggagtgctggcaagcggttacagcggaccttttcgcggcctttgagggtatccagatgcgagtgattgatgatgaaaaagtgctggccgcactgctcgaaaagcacaccaaggaaggtaaggggaagtggaccaaggccaaggtcgatccctccactggggtgacaattcctccggtgtttgttcccggcaagcctaacgatagctatgccctgaatctctttcgcacataccgaagcctcaaggactacgggtgggaagagaccatggcgtctatggctcgccgaaccttctacgaccatatccgggacatctgcgctgcgggcctgtcgaaagccgccctgcagaagctccacgaagcggaccgggcgaacaacgtcgtaccgctgctgcggttcgtccaggtcgatttcagcgcccagcgccccgactggtacgtcgagccgaccgtggaggcagcgtga

SEQ ID NO: 344151 - DNA, 192 bp, Pseudomonas aeruginosa
atggcgaagacctaccgtctgcgagacgaggccgtcgaagcgctgaacgcaaagaggatcaagctgatcgtcgagcgaaaggaggatgtgaaggaaagcgatctgctgggcgcgctgatctggaaacatctgtccaccctcaccgcccaggatgtgaaggcctacagagagcaggtccttggcaaggactga

SEQ ID NO: 344152 - DNA, 1194 bp, Pseudomonas aeruginosa; identical to SEQ ID NO: 344144

SEQ ID NO: 344153 - DNA, 327 bp, Pseudomonas aeruginosa; identical to SEQ ID NO: 344145

SEQ ID NO: 344154 - DNA, 1323 bp, Pseudomonas aeruginosa; identical to SEQ ID NO: 344146

SEQ ID NO: 344155 - DNA, 363 bp, Pseudomonas aeruginosa; identical to SEQ ID NO: 344147

SEQ ID NO: 344156 - DNA, 258 bp, Pseudomonas aeruginosa; identical to SEQ ID NO: 344148

SEQ ID NO: 344157 - DNA, 192 bp, Pseudomonas aeruginosa; identical to SEQ ID NO: 344151

SEQ ID NO: 344158 - DNA, 237 bp, Pseudomonas aeruginosa
atgaggatcatccgtttacgagaagtcatggctactaccggtctggccagatcgaccgtctacaagtacatcagcgaaggggctttcccgaagccggtgtcattgggggagaggtgtgtggggtgggtagaggaagaggtgcacgattgggtgatggagtgtagtggtcaacccatcccggacagtgggttgagtttttcttcggccaccgcaggcggtagcccgtcgttgaattga

SEQ ID NO: 344159 - DNA, 2058 bp, Pseudomonas aeruginosa
atggaagtagaacaggctctcaaggactcacataattttctgaataatatttttcatgatgcgtgcctagctgtgtctacttcccatgaggaaactcagcgattagtctttcagctgatcagatgtcaacaaagcatgccaactgaacttcgtctgatgccctgtttcgcccaattcatcttcgcaacagaagctctttacaacgcttatgaggaccatgaattgactgaaatgggaaactggatcggctgggctttttctgaagacttgattgagagtcatacaaaggagttacacattggcagaatcaatagcttctatacatccttagtaattagaagctggcctggctttttccctacaatggttaagttttttggtgcattcttcttttatgcgcatgaaagaacagcaatgaacaatatagcgcgcgaactgtgggctagcgcgaagttaagttttgaggtggtgatgagtgtcgcctctgagcacatagatactcctgaggtttttctaggtgtcaatttagcatgctgggccgccaaagaggctcctgatttggctatcgatttcgtgcctcaactagagattctgtctgagaatgacactttccccaaaaaatacagcgcgttactttatggaggcttgtctacaatagctgcaaattactcaagcaaaacttcggccgaatgggcccaaaaagcgcttgacgaatgtgaagactctctgtacgacgctcataaattgcaactactatctacagtattcgcaggcatcgaaggtagtgatccttccccactgctcgatcagatagacctggttcagcgacacatgaaagcgcagctggatgaaattgcatttttccgcgatgccgcgatgcggagtggggctttactgccatttattgtgaagacgataaatgctccagaaatcgagctaacacttcaggggcttcggtcgtggtatcaattgccgtcaggaaaatccagcatcagtgctgagcacctgtatatttcaataccatttggggagcatggctttacgtctgtgctgggatctcaaatagtctcaatcgaacgagattctcaatccgtaattgtagatttggtgcaggcgagcaacagattcctgggggtggcaaagtcgattgcatacgctgataattcgggattaaggattccggatcgaattggttttcctatgtacggtgacgccacacattatgaatccgccatgctgaacgggtattgtccaagtccattttcgttcagttctgagcctttgtatcaactgatcctcgataatgaatgcaacccgttgcaggcgactcagctcaaagcgtgggggaagacttggccgatcgcatcatccctttctgctcccaaacccgatagaaaagctaacaaaatattgatttggtgcgggggtggaagtcttactgaagggcttgaagctgaaacaattagacaaatttttgaaagagttggagcaacagtcgaggtagtgacctttgacgaggcagcgaagagggagtttactactgtttatgaagatgatagctatgatgttatctgggtggcatcccacggaacatacgaccattggtcacccagaaaggtaacaatgcacgttgcagaagaaacaaccgtatccttggctgatctttggaacaaggctccggcacatgaccaacgacggcttttatttttgaacatctgcgatggtgcacgatatgaggaaagagggtatctagctaaaatcggtttggcaccaggtttggcgtgtgccgaccaagctaccatctcgcacctgtggcctgtactcggctacccagctgccgctttcggagcatatctcgcatactacattgcagaaggcacaccattcttcgacgcttataaacttgggatgctgtcagttcggaaaacaacatacgaaatagctgaggatttagcgtccaagatcggggacggatttgaactcatccagcacctgagccgaaaagaggaggactactcatcgatcgagtacttcggatccgccgcattttatcaatag

SEQ ID NO: 344160 - DNA, 813 bp, Pseudomonas aeruginosa
atgctcatacgggacatgggtcccggaatggtagaaacccttgagtttctacacgatcggctctcatatctgaccggtcaccacaacctgtccggaaacaagctactttcttacgctgatgacgccttcgagtttctgcacacctgcagtgaccctcattttctcgacgcgattgagtatcttgtccaccaagaaggatggcgattcatcggcggtcaccatgagccagtgattgaccgccttaacgagtttctgagcattgacgaccttccctacttcgtcacgaaaccggtctggcataccactgaagaaatgtaccgcggacagagcactcaattcaccgaaattcgtgagcatgccaaagtcattccaaaggaaagccaagcaatccacgaaacggctattgagccagccctgaagctattgcgtgagcctgcatttctcaatgcaaattcggagttcatggcagcgcttgaggactatcgtcacggtaaattcggcgactgcgtcaccaagtgcaacagcagctacgaaagcgtcatgaaggttatctgcggccagaagggcttcgggtatgcccagggagatacgaccgccaagctcatccggaccatcatgcagaaaaccaaaatggataccttctgggagcagccgctgatgacggtcggtactcttcgcaacaaactgagcacttcacatggggccggtgaggtgcagaaggtagttccggaacatatggcgaagtacacactaaatatgacggcttcggccatcatatttctgcacgatcaggcttacctgactaagccctga

SEQ ID NO: 344161 - DNA, 1713 bp, Pseudomonas aeruginosa
atgcgtcgtttcgatatcaagcctttgattgcgttagccacggctcccgaagaccaggacgatccctggtacgtgaatgcggagcaggccgtgcagtacatgagggcaaactcggcagctgacgaaatcgtgatttatgcaagcgcaccgtttctactaattgtgggggcgctcgctccagcagaaaatgtcactccgccggacggcggcgcacttcaaaatatgtccctttgtaccgatgcaacatggcgcattcaaaaaacttggtgttctagtgaagggcaccgcgtctacattgagccgccattcccagaggatagtggttctcccttagcagggggtgagccgctagtcattcggcggcgcctcgagggggtccacactgggccaacgccaatagaaattagccagaagctcgtgcattgcctcgacattcattatgtggaggagcgaaaggcctactgccgactcaatgacaatggtgacattgaagacgtcatcaagattttaaagctttctattcctgaccagctggaaggccgcgaagtagtcacaattcttcgcaaggacctggacaactacatggccctcgcggacatggtaatggtcatgaaatttgatttcactcgatacgtgtcgggaagcttcagcggctggcacggagtaaagcgttacaacagtgatgagccggatctatttttccacgttggttcagcaagcagatcgagcttcgcacatggagcaatggtggtcaggccggaaaccactgttgaagctcaagaagagacgtggcgaaaggatttcgaaggtgatccgcatcgtgagtatgcagtcttcaaaatctatgaccgcaagaatgatcgacagattgaaacctcctgcagccccgaacacattgtcagctattttgaggaaagcgatctgccttggcagatttcacccgcttttttcagagcagaggtgctgaatcgcttcaaaggagatcccgagaaatacaccctggaagaccgaagtatttcgtgccgaggggcgtggttcatcaaatcctacgacatcaatgaagctgggcaggtccacgcttggatatgggatctatcaaagctcccctatgaagagcaactgtattggaaggccttcaatgaatggccaaaggcatcgatctccgagcgtgcaaaccgaacggatatcgaggggaattggtacaccgagtatcagccactggatgcgctgaagcagaaggtgcgcgcattagacaagcgaaaacccgcttggtggaacccccgcggtgaagagctgatcgacagcgttcttgcgcctgccactgactcacctaaagaatggggtgatgagattctagccttggatcaatgcttggtagagggctttctcgacaaaccattgcgcaaaatagccgaagaaaaaggatgcgcacttgagccaacctggcgttcgctcaaactgctgtacgaaatcatggtggcaagctcgataagcgccgagcaatccaaggtgattctggcgcctatgagaaaacttcatgagctacgtaatgagatccgcgggcatgctaccaatgaaaagaaagccgttgccatccgagaagcccgcaccacacatggcaatttccgcgctcacttctttcaccttgccgaaggatgtgaccaggcgcttgtcaccgtcctgagcatccttgattttgagttcgaaggctga

SEQ ID NO: 344162 - DNA, 1437 bp, Pseudomonas aeruginosa
atgggcagagctattgatccaactcttttcgagcacggatttattaatgaaagcacactattcaggagaatgttttcccctaacgccctagtctttgcttacagagagaaattcaaaaactcacaggctaaaggcgttgatagaatcaatggctttcaatactcagccaggtcggatttagaattagaagcggtctcacaaaaatgcctggatggtacatttaggttttcgccatttttggaaaaactgaagctaaaagggcgaggtaagcacccgcgcgtcataggaataccaaccatcagagaccgcgttgtactgcatcaactccataagtatctagctatagtatttcctgataccgtacccaggaacgtggccagcaactacgtgcgagccgtagctgaagacatggcaaagctagacgtttcaaaaacgctgatatgttgcactgacattgaaaaattctatgactctattcagcaaccgagactgattcgtcttttaaagaaaaaaatagattgcgaaccggctatttcgcttgtatcgcacgctctgcaaacacccacaatcccaaaaaacacgcgccgatcacaatattccagttaccgacaagagttaggtgttccgcaagggctttccatctccaatatacttgccgccatttatatgactgaggtagacgaagtcatgagggccatccctgacatcacgtattatcgctacgtggatgacgtccttatgtatggtgaccccgacaccattacttctgcctacaactctctacgcggacgcctacgcacccgagggctcaccttacacggccgaaattccgacaaaacctatattggcaggattgatagaaaattctcatacctaggttatgaattccgactaccaactatcacagtacgtgactcgacttttgagcgcttcttacaaaccatagccgccaaggtcagcgactttaagcataactattcgcgcagactagaaaagcacaagtatttgaataaagaacgcctagtagaaattttctttctagagctaaacgaaaaaatcacaggcgccctcagtggaaacaaacgttacggttggatagcttatttcaaccagatcactgacgaaaggctccttcatcaaatggatcaagcgatcttacggatggtcagcagagtaccaactctaatcgaagggggtagcccgcctctcaagaagctggtacgcgctcacttcgaaatgaaatttagtccccgaggtggctacattcgcgattacgacttgaacgtcagcgttgcgcagaaactacgttttctcgaggtccgggggcgagttgacccggccattccattgactgaggcgcaaatcaatgagcgttacgaatcctacgttaaatttgtattggcaaaaatgcatgaggacgagggtgaagtttactag

SEQ ID NO: 344163 - DNA, 669 bp, Pseudomonas aeruginosa
atgtcaacgtatcttaaaagtcttcaagatgatgtctggcgaacatccagtgctcgttatcacgctgcgcgccgattgaaaagaaaagaaaacttttcgacgataagcctggctttcttttctgcattaagcattgctttagctgtcatacagcaaacttacgctacagaggtgattgctacacctgggttaaatagctacttgacatcaatttcaattttatcgggcattttcatccttattatttccctgatggaatggggtgccagaaatggatcgaacgcagatgccctctacaaaaacgcgcaagagctgaatgcgattcgaaaagaaatcagtcttcaagcctccaaaaccaatttatcggaagacgcagcttgggcatcttcagaagaatatctgtcccgctacgaggaagtcaaaagccgctgtgacatcaaccacacgccccttgacgactcttactttgtcagccagcacagagaatcaccagagttcgcagcaagaaatattaagtggtatagcgcttactggacttcattcagatggcagctttctagcatttggtactacttgattctctggtctattattattatttctacgatccctgtactcaaaagcatcgacttcatttccacagtctcatgcggtaacaacctggggtaa

SEQ ID NO: 344164 - DNA, 1209 bp, Pseudomonas aeruginosa
atgaacaagaacggtaagcagagggcattggtcgtgatgggggccggagcctcggtggagctgggcatccccgctacgattggattcgggaatcttatcgatgacgccatcaaggccgacaaatactgtgcccatgtgggaggaacggaggtctatttcgacattcgagacaagttgcgcacctactatgccagcgaggccgaagcccactttgagcgcatctatcacgtcatgcacgaactcagccagttgcgcgcaaagcaaggcgcggttcccaagttcctacccgtgatgtatccgttcctgggcaccgctgtgacgcaccctgagcaagcactcaaggccgcctgcagcgcgatgcttgatttcatctatgcgaaggtctcggaagtctgcgacaacccagccctaccattgaatcccttgtctgcgttcttcgaggtgctggagcagcagtacgtccctcgcgtgtacacgaccaactacgatgatttcgtcgcccaggcgacccaagggcgctacttcaccggctttacgcagcgacatggcgatcactcggacttcgacggaaaggctttctgggcggagtggggcaagccggccttgttccatctacacggatcagtccatatgggattctccgtgcccggcgagcatcagatcggtgacatcgtttggttcgatgacaaggccgtggcacgtcggcaagccagattcaatggctcgggcgttgacaggatggatggcacccacgtcgagcggggcgcgatcatcaccggattggacaaactcggccgccttcagcagtcgccctatgcgttctactactcggcgctcaaccgggaggccatggaggcagacctgattctggtgctaggcagcgggctagcggatctccatctgaacacgttcctgaaggctgcccggcgtgccagacccgacgtgccgattctctacgtcggctattgggggcgagaggcgctggacttctacagcaccatccatttcgagttggaagatcgtgacatcgcgctgttccatgaactaggcatcgatctggtaaacgtcgctgaagcacgcttcaaagcggacgacggctggactgtggatgcccgtggcaaagcggcggtgtgggctgatggcttccaatcgttcctccttgcaccagaagcattcacgaaggtattgctgaaagtcgctgccacgtag

SEQ ID NO: 344165 - DNA, 1707 bp, Pseudomonas aeruginosa
atgaaaaagcaaaaactagaactgacatggattgggaaggacaagcggcccaagctggagccgcgcatcctgctggaagatccggaaaagtcatatcacgccaagcatcgcgtgacggacaacgacatcttcgacaaccggttgatctttggtgacaacctgttggcgttgaaggcgctggagcaggagttctccggcaaggtgaagtgcgtatttatcgatccgccgtacaacacgggcagcgcattcacgcattacgatgatgggctggagcattctatttggctaagcttgatgcgtgatcgactggagattatccggcgactgctttctgaggatggctcgctttggatcaccattgatgataacgaggcacactacctgaaagtgttgtgtgatgaggtatttggacgtcaaaactacaaagcaacagtaacttggcaaaggaagtacagcgttagcaataacttccaaggcatagccagtatctgcgacttcattctggtgtacgcgaaaggcgccgagttcaagaacaatctgcttcctcgaagcgaagagtctgcggcccgatatagcaatccagataatgacccgcgcggtccttggaaggcagttgattatctaaaccaggcaacacctgagaaacgcccgaacttgtgctacgacatagtcaatccgaacacaggagctgtcatcaagaacaccaagaaggcttggaagtacgatccaaatacacacaaacgccatgttgaagaggggcgcatttggtgggggcgggatggtcgcaacaccgttcctgcgttgaagctgtttctttccgaagttagagacggaatgacgccacataactggtggcctcatgaggaggttgggcacaccgatgaggctaagaaggagatgattgggctttatggtccacgcgacgtgttcgacacgcctaagcctgagcgacttctgaagcgaattcttgaaatttccacaaatgagggtgatctcgttctcgactctttcgctggttccggcacaaccggcgcggtcgcgcacaagatgggccgtcgctggatcatggtggaactgggcgagcattgccacacccacatcatcccgcgcctgaagaaggttatcgacggtgaggacaagggcggcatcaccgaagccgtgacctggaaaggtggcggtggcttccgctattaccgcctcgcgcccagcctgatcgtcaacgaccgctggggcaacccggtcatcaatccggagtacaacgcggcgatgctggccgaggcgctggccaagctggaaggcttcacctacgcgccgtcggaaacgcactggtggcagcacggccactccagtgagcgtgatttcatctacgtcaccacccagaacatgtccgccgagcagttgcaggcgctggccgatgaagtcggcccggagcgcagcctgctggtgtgctgcgccgcgttccatggcgttaccgcggccaaggcggcggagcgctggccgagcctgacgctcaagaagatcccgaagatggtgctggcccgctgtgagtgggggcaggacgattacagcctaaacgtggcgaacctgccgatggccaagcctgatcccgttgagccttcggctcaggctgaaacgagcagaaaaaaaagtagaaaagcgtcggctgaggatgcgggccagggcgcgttgtttggggaggatgaataa

SEQ ID NO: 344166 - DNA, 954 bp, Pseudomonas aeruginosa
atgagcaataaaacaagaaagcaactgaaggaaatcaaatccgaggacttcggcggatgggctgcctcattctggctgatcaaaaagagaacatccaaggaaagtccctattctgctttgcgcgtcgatatggacaggaagctccagaatcgtttcaggcgctacctgaaacagcaactgcaaggaaaggacttccatcttgcagagtacgactacaacaatgcggacggcgacgatgcattgttcaccattgacgccgaaaccacggatttcaccaaggtggcggcagagattggaaaagggttcagcaatcagagagtgaccagccacgaagagttgctcagatcgtgggcatacgtgatcctgttcgagaaagatgatcgcaagctttacgcatggaagaaaatcagtgcggacacgcaacccaagaaagccgcggccaaggatctcgccttctttctcaataaaaagctggttgatctcgatgacaaagaggtcttcatgatctatccacgctatgacttctttgtctatggcggaaccacgttcattgccaataagcggcaattcgaaagctcgatgaacttccgcgaaggcatgaaagccaaagctgctcaggtcattcaggattttatcgacagtggaaagttcgagaacaccgagcgcatcaccagatatgtcggcgagaacctccatcacctgagaaagatggcgtccatcttgaaggccggctattacaagcagaccgactatattcagcagatgatcgtggtcagcaagagtgaaggttgggagttgaacgtgaagaatggaaaggttgtggttgaggatgaaaccatagagcttctgttaaagctgctcaacaacgatcgcttgcgctctccgatcaacaacgaggtattcgacgcggcagccaaagcgcgtgtcaacggtagtaaggcagttgcggcatga

SEQ ID NO: 344167 - DNA, 582 bp, Pseudomonas aeruginosa
atgagtgatacatcacttaggttgcgacctctggtttcgttggtgctttttctgagcgcctactcgcccttgatgatcattttgacgatcaaagacctgaatttttcattaccgcatttcttcggctcggcgaccacgagcggcattttgattttcatggccattggcagcagcgttgtgacgctcatgacggtcaggagcgtggaaagcggtctgaccgtcgtagtcaccaaggccgccaacaaatcgggggacatgttcggctataccattccttacatgctctcgttcatgcgtgtcgatctgggggattggcagaccttgctcagcttggtgctgttcttgtccgttctattcatcatggcctatcgcacccagaccgtatttatcaatcccgtcttggcgattgctggatacatgctgatcgattgcacattcaagcgtgatggcaaggaggttcaggcaatggtcgtgacacgggagccgatcagcgcgggagattcgatgcaactggatcaactctctcactacctctacatccgaatcaatactgggcataagaacaccgaggggcacgcatga

SEQ ID NO: 344168 - DNA, 876 bp, Pseudomonas aeruginosa
atgtattccaacaaactgtatagccccttgcgctatcccggcggaaaagccccctttgcgcccttcatcgcggccgtgatgcggcagaatggcctaattggtggtcactatctggagccgtatgcaggcggcgcaggcgtggcgctggagttgctgttccatggccacgccagccatattcacatcaacgatgccgacccggcggtgtatgccttctgggtttccgtcaccaagcattctcgcgctcttctgaatctgcttgaagccacgcccatcaccatcgaagaatggttcaagtggcgagaggtcttgcgcggcgatgtcaaggcgagcatggtcgagacaggatttgcaaccctgttcatgaaccgaacaaatcgctctgggattctcaaagcaggcgtcattggcgggaaaaatcaggacggagattacaagctagatgcgcgattcaagaaggatatcgttgcatcgcggatcaaggaaatagccaagcattccgctaacatttccgtatattgcgaggattcgctgaggcttttagggcggtgctcggagttcttgcctaaaaagtcgcttatctatctcgacccgccttactacgtaaaaggcaaaggcttgtatcgaaattactacgagcatgatgatcatgttgcgatagccaagaagctccagaaaaaaaacttcaagtggccttgggtagtgtcttacgacaatgctgaggaaatctgctccatgtaccagctcagtaagtcacttagctacgggttgaattacactgcgcagcgtcggtatgtgggaaacgaggtcatgttcttcagtcaaggcatcgttgtgcctgatgaggaaattccgcaaaccaaggctgttggatag

SEQ ID NO: 344169 - DNA, 1689 bp, Pseudomonas aeruginosa
atgccaaaaactcagcttaaaaagctggtcgttgaaaaattccgtgcactgaacaacgtggaagtcgaatttggcgaccacatcacagtcatctgcggaaagaatggcacgtccaagtcatccattcttggcattgctgcgcaaattttcagcttcgagaaagactatctcaaaggcttagcgctttcgttccgacaaatcgccggtggtctgttcaaatcccaatacagcgagcatttcagaatttctgatgaatttgaccaacccggttcgatgacggtcaacatagagctgcacgatggatacacagatcagagtgcgaccgcaaagctcgaattgatgaagcggggaaaatcgcccaggccagtagtccgcaacaacagcactgtcgaaaagggcgaaaatacaagtcgcaactttacgcatccggtaattttcctgagcctgaaacggctctatccgattgcagatcgggactacaaagtcattgatttcgattatttgaataaccacaagccacagttcattgggttggtcaatgagttactcaaccgtcaatcttccttggcaacagggacggagggaaccatcagttctgcggtggcgcatggcgacaattatgatcaagaatccgtttccgctggggaagacaatgccggtcagatcatcttggcgttgatgtcgttccgcaagttgaaagaagaatacgccgactacaagggcggtttgctgttgatagacgaagcggatgccgggctgttcccaacggcgcaggtgaatttgttgaaaattctggacagggaatgcaaagatctggatcttcaggtcgtgatgacttcccactctcccacgctgattgagtacgcctaccagcaaagccagcaataccgccggaaatacaaaaccatctatctgagcaacacgtttggtggcgtgcaggtgatgcaggactggtcttgggcgcagatcagtgcggacatcaacactcgaaccgttgcggcaggggcagacgaaaagcttcccaaggtcaatgtttacttcgaggacaaggaagcggccgatttcttcgccgccctgatgaatcggcaatccatcaaaaagttcacgaacccgctgccggacgtgaccttgggttgttcaaactatctgcaactgattgacaaaggcgtgcctgagttttcagaaagaagcatcgtgtgcctagactcggatgctgctcagcaagttaggaggaagaacccgaagaccctggttcttcttccgggaaacctacctcccgatcagttgattttcgagtatctcttcaacctccctgctgagcataatttctggcgaaacgatttagggtatgcgcgccccaatttcacccagtcagcagcggaagtcattcgtgaattttccatcaacggaaatcaggttgatgtgaagacaagcttggcagcataccaaggtggaaagaaaccgcgagaagtcttcaagcgcttctacaaggatgctgaatttcagaagcttgttgccttggcatctaagccctacaacccgtggaagcactggattgaaaacaaccaagatgcttgcaacgacttcttggaaaaattcgagttggcccttcgtggtgtgatgagtggcggctatgctgttgatgccaacaaactggccacattgaaagtaaagctgaaggggggttag

SEQ ID NO: 344170 - DNA, 1290 bp, Pseudomonas aeruginosa
atgcgcgcagaactcaaccagggcctgatcgatttcctcaaggcctcgcccacgcctttccatgctaccgccagcctcgcccgccgcctggaagccgccggctaccgccgcctcgacgagcgcgacgcctggcacaccgaagccggcggccgctactacgtgacccgtaacgactcgtcgctgatcgccatccgcctgggccgtcgctcgcccctggaaagcggcttccgcctggtcggcgcgcacaccgacagcccctgcctgcgggtcaagccgaacccggagatcgctcgcaacggcttcctccagctcggcgtcgaagtctatggcggcgccctcttcgccccctggttcgaccgcgacctgtcactggccgggcgcgtcaccttccgcgccaatggcaagctggaaagccgcctggtcgacttccgcaaggccatcgcggtcatccccaacctggccatccatctcaaccgcgccgccaacgagggttggccgatcaacgcgcagaacgaactgccgccgatcatcgcccaactggcgccgggcgaggccgccgacttccgcctgctgctcgacgaacagctgctgcgcgagcacggcatcaccgccgacgtggtactggactacgagctgtcgttctacgacacccagtccgccgcggtggtaggcctcaacgacgagttcatcgccggggcgcgcctggacaacctgctgtcctgccacgccggcctggaagccctgctcaacgccgaaggcgacgagaactgcatcctggtctgcaccgaccacgaggaagtcggttcctgttcgcattgcggcgccgacggtccgttcctcgaacaggtactgcgccgcctgctgccggaaggcgacgccttcagccgggcgatccagcgctcgctgctggtctcggccgacaacgcccatggcgtacacccgaactacgccgacaagcacgacgccaaccatggcccggcgctgaacggcggtccggtgatcaagatcaacagcaaccagcgctatgccaccaacagcgaaaccgccggcttcttccgccacctctgccaggacagcgaagtgccggtgcagagcttcgtgacccgcagcgacatgggatgcggctcgaccatcggcccgatcaccgccagccaggtcggcgtgcgcaccgtcgacataggcctgccgaccttcgccatgcactcgattcgcgagctggccggcagccatgacctggcgcacctggtcaaggtgctcggcgccttctacgccagcagcgagctgccctga

SEQ ID NO: 344171 - DNA, 204 bp, Pseudomonas aeruginosa
atgaatgcaaatgatccgactgccaccagttgctgcgtgtgctgcaaggaaatcccgctcgatgccgccttcaccccggaaggcgcggaatacgtcgagcacttctgcgggctggagtgctatcagcgcttccaggcgcgcgccaagaccgggagcgaaaccgatgccgatccgaacgcctgcgactcatcactgtcagactga

SEQ ID NO: 344172 - DNA, 1218 bp, Pseudomonas aeruginosa
gtgaagccagctccacgctggccgctgcatccggctcccaaggaaggcgaagccttatcctcgtggctcaatcgtgtcgccgtctgctaccagatggatatgcttgacttgttggaacacgatcttgggcatgacaaggtcgatgacctggacaccgcaccgccgctgtcgctgctgacggcactctcccggcgaagcggcatcgagctggaccaactgcgctgcatgagttttgccggctgggtgccatggctgctggatagcctcgatgaccgggttccgtccgccctggaaatctatgcgttccagttctcggtaatgctgccaaaacgcaaccgcaagacgagatcggtcacgagctggcgcgcgtggctgcccagtcagccaatccgtcgggcctgcccactctgcctgaatgattcagcgaaccaggcggtactgctcgcgtggaagctacccctgatgctgagctgtcccctgcatggatgctggctggaatcgtattggggcctgccagggcgtgtgcttggctgggagaaggccgacgctgccccgcgcatggccagtgacgcgattgcgacgatggaccggcgcacctggcaagcactgacagcaggatacgtcgagttgccgcgccggcccgtccatgccggtttgtggttccggctgctgcgtacactgctggatgagctgaataccccgctctcgcattgcgggacttgcgctggcagtatccgctatgtctgggagcgctgcggccatccgctgcgcgccgggcaaagtctgtggcatccctacgagattctggactcatcggtgcagttgcagatattggaggcagcggcaaccgccatcgacctgatcgaatcgaaggtgttgagtccacgcggagaactggcaacgctgttccggtcagagccacaaactgagttcaccaacggcctgccagcggttgagcggaagaaggaacccgtcaactattggcaacaagccctcaaagcaatcaacgatgccattatcgaagcgcggcacgactccgagatagcccgctcgttattcgcgatggcatcctttggacagcgtgaccctgaatccctggagcgtttgcgcgtcacctttaccaaggagggcattccccctgaatttctgtcacattatgagccagacggcccctttacatgccgtagactaaatgacgggttaagtgacaaattttga

SEQ ID NO: 344173 - DNA, 1677 bp, Pseudomonas aeruginosa
atggcgtcagacgcacgaatcaccgagcacggggtggctacactgtccgacgaggcatgggagcatgcccgccgcagggccgagatcatcgcgccgctggcgatgcttgaagtagtcggtcatcaggctgccgatgccgcagcgcaggcgcttggcctgtcccggcggcaggtgtatgtcctgatccgccgcgccaggcagggcagcggccttgtgacagacctcgcacccggtcaatccggtggcggcaaaggcaggggccgtttgccggagtctgttgagcgcatcatccgcgagctgctgcaaaagcgcttcctgaccaagcagaaacgcagcctggcggcgtttcaccgcgaagttgcgctggtatgcaaaacgcacaaactgcgggtgccggcgcgcaacaccgtggcgctgcggatcgctgccctcgatccactcaaaaccgctcgccgccgggaaggacaagatgcctcccgcgacctgcaaggtgtcggcggcgtcccgccggcagtcaccttgccgctggaacagatacagatcgaccacacggtcatcgacctgatcgtggtggacgagcgcgaccggcaaccaattggccgcccgtatctgaccgtcgccatcgacgtgttcacccgctgcgtgctcggcatggtcgtcacgctggaagcaccgtccgccgtttcggtcggcctgtgccttgtgcatgttgcctgcgacaagcgtccctggctggaggggctgaatgtcgagatggactggccaatgagcggcaagcccaagctgctctacctggacaacgcagccgagttcaaaagcgaggccctgcgccgtggctgcgagcagcatggcatccaattggactatcgtccgcccgggcagccccattacggcggcatcgtggaaaggatcatcggcacggcgatgcagatgatccacgatgaattgccggggacgaccttctccaaccctgaccagcgcggggattacgattccgaaaacaaggccgccctgaccctgcatgagctggagcgctggcttacattggcagtgggcacctatcacggctcggtgcacaacggcctgcttcagccgccggtggcgcgctggtctgaggccgtgacgcgtgtcggcgtcccggccgtcgtcacccgcgccacggcattcctggtcgatttcctgcccatcatccgccgcacactaacccgcaccggattcgtcatcgaccacatccactattacgccgatacgctcaagccgtggattgcgcggcgcgaccgctggcctgccttcctgatccggcgcgatccgcgcgacattagccgcatctgggtactggaaccggaaggtcagcactatctggaaatcccctaccgtaccttgtcgcacccggctgtcactctgtgggaacaacggcaggcgctgacgaaattgcggcaacaggggcgcgaacaagtggatgaatcagcactgttccgcatgatcgggcagatgcgcgagatcgtgaccaccgcgcagaaagccacgcgcaaggcgcggcgtgatgcggatcgacggcagcacctcaaagcgtcggttccgccggacaagccgactccgccagaaacggacgttgctgatccgcaggcggacaacctgccaccggccaagccgttcgaccagattgaggagtggtag

SEQ ID NO: 344174 - DNA, 909 bp, Pseudomonas aeruginosa
gtggacgaatatccgatcatcgatctatcccacctgctgccgacggcgcaggggctggcccggctgccggcggacgagcgcatccagcgccttcgcgccgaccgctggatcggctatccgcgcgcggtcgaagcgttaaaccggctggaaaccctgtatgcgtggcccaacaagcagcgcatgcccaacctgctgctggttggcccaaccaacaacggcaagtcgatgatcgtcgagaagttccggcgcacgcatccggccagcgccgacgccgaccaggagcacatcccggtactggtcgttcagatgccatccgaaccgtcagtaatccggttctacgtcgcgctgctcgccgcgatgggcgcgccattgcgcccgcgtccacggctaccggaaatggagcaactggcactggcgctgctgcgcaaggtcggcgtgcgcatgctggtgatcgacgagctgcacaatgtcctggccggcaacagcgtcaaccgccgtgaattccttaacctgctgcgcttcctcggcaacgaactacgcatcccgctggtaggcgtcggcacgcgcgacgcctacctggccatccgttcggatgaccagttggaaaatcggttcgagccgatgatgctgccggtgtgggaggccaacgacgattgctgctcactgctcgccagcttcgccgcttcgcttccactgcggcgaccctcgtcgattgccacgctggacatggcccgctacctgctcacgcgcagcgagggcaccatcggtgaactggcgcacttgctgatggcggcggccatcgccgccgtggagagcggtgaggaagcgatcaaccaccgcacgctcagcatggccgattacaccggtcccagcgagcggcgtcggcagttcgagcgggaactgatgtga

SEQ ID NO: 344175 - DNA, 1218 bp, Pseudomonas aeruginosa; identical to SEQ ID NO: 344172

SEQ ID NO: 344176 - DNA, 639 bp, Pseudomonas aeruginosa; identical to SEQ ID NO: 185447

SEQ ID NO: 344177 - DNA, 1680 bp, Pseudomonas aeruginosa; identical to SEQ ID NO: 10332

SEQ ID NO: 344178 - DNA, 993 bp, Pseudomonas aeruginosa
gtggacgaatatcccatcatcgacctgtcccacctgctgccggcggcccagggcttggcccgtcttccggcggacgagcgcatccagcgccttcgcgccgaccgctggatcggctatccgcgcgcagtcgaggcgctgaaccggctggaagccctttatgcgtggccaaacaagcaacgcatgcccaacctgctgctggttggcccgaccaacaatggcaagtcgatgatcgtcgagaagttccgccgcacccacccggccagctccgacgccgaccaggagcacatcccggtgttggtcgtgcagatgccgtccgagccgtccgtgatccgcttctacgtcgcgctgctcgccgcgatgggcgcgccattgcgcccgcgtccacggctaccggaaatggagcaactggcactggcgctgctgcgcaaggtcggcgtgcgcatgctggtgatcgacgagctgcacaacgtgctggccggcaacagcgtcaaccgccgggaattcctcaacctgctgcgcttcctcggcaacgaactgcgcatcccgttggttggggtaggcacgcgcgacgcctacctagccatccgctccgatgaccagttggaaaatcgcttcgagccgatgatgctgccggtatgggaggccaacgacgattgctgctcactgctggccagcttcgccgcttcgctcccgctgcgccggccttccccaattgccacgctggacatggctcgctacctgctcacacgcagcgagggcaccataggggaactggcgcacttgctgatggcggcggccatcgtcgccgtggagagcggcgaggaagcgatcaaccatcgcacactcagcatggcctgtcgacaacctctcgcgcaaccaagacatcgcggtcggactgcaagtgatcttgaagccacgggcccgtcccaccccgacatggacctcgatgcccgaacggacgttagatttcgagttctaggcgttctgcgatga

SEQ ID NO: 344179 - DNA, 204 bp, Pseudomonas aeruginosa; identical to SEQ ID NO: 329441

SEQ ID NO: 344180 - DNA, 3954 bp, Pseudomonas aeruginosa
atgagcggcctaccggtttcccatgtcggcgagaaagtctcgggaggggtgatctccaccggctcgcccaccgtgcacgtcggcagcagcgcggtcggcctggccgaccgggtgtccgcctgcgtgccgttggtgggcaagccggtcaacccgatgctcggcagcaagctgctgccggaagaggtcgatttcgccctggcggcgccggacaccttcaccttcgcccgtggctacctgtcgagcaacccccgtatcggccggctcggccggggctggtggctgccgggcgagagcatgcacctggaattgagcgaagacgcctgcgtgctggtcgacgcccagggccgccggatcggctttcctgcgctggctcccggcgcgcagcattattccggcagcgaggagctgtggctgcgccgcggcggttcgagcggcggcgaagcgcaggcctggcgcgggcgctgggcggcggtgccggccgaactgcagacgcaggagggctccgtgctggtgctgtccggccacagctacctgcatttccagcgttgccccgacggtatctggcgcctgcaggccagcttcggccgcgccggctaccgcaccgagttccgctggagcggacgtggcctgctcaccggcgtgcgcgacagcgccgggcgcagctatgcgttggtctaccagcaggcctgcgagccgagcgagggcgacgacggcctgcgtctgttcggcgtgatcctggccagccacgacggaccgcctccggactacatcgatccgcagagcccggggctcgactggctggtgcgctaccagttcagcgacagcggcgacctgatcgccgtgcgcgaccgcctcggccaggtggtccgggtattcgcctggcgcgagcacatgctggtcgcccacggcgaaccgggcgggctggaggttcgctacgagtgggatgtccatgctccgcacgggcgggtcgtgaagcagatcgaggcgggcggcctgacccgtaccttccgctacctgcgcgatgccaccgaggtcagcgacagcctcggccgcgtcgaacgctacgagttcgccggcgagggtgggcagcggcgctggaccgcgctggtcagggccgacggcagccgtagcgagttcgactacgacctgttcggccgcctggtcgccatgcgcgacccgctggggcgggagacgcggcgccggcgcgatggccaggggcggatgctcgaggaggagtcgccgggcaaggcgcgctatcgcaagcgcgtcgacgaagagaccgggctgctggtcgagctggaggacgcgatgcagcgccgctggaccttcgagcgcgacgaacggggcaatgtgacgacggtgcgcggcccggccggcagcacccgctacgcctacgaagacccgcgcctgcccgaccggccgacgcgaatcgtcgacccgcgcggcggcgagcggcgcctggagtggaaccgcttcggcctgttggccgcgttgaccgattgttccggccaggtctggcgttacgactacgacaacgaaggacgtttggtcgccagcagcgacccgctgggacaactgacccggcgccgctacgacccgctggggcaactgatcggcctggaattggccgacggcagcgccctgagctatgaatacgacgcccttgggcggcagacccgtatcgccgatgccgaagggcacgccacgctgttttcctgggggcacggcgatctgctggcgcgggtttccgacgccggcggcggcgaattgtcctacctgcacgacgaagccggcaggctggtcgccctgaccaacgagaacggcgtccaggcgcagttccgctacgacctgctggaccgtctggtggaagagaccggcttcgacggtcgtcgccaacgctatcgctacaacgccgctgacgaactgatcgcccgcgaggatgccgacggtcgcgagaccacctatgcctacgaccgcgacggccgcctggcgagcatccgggttcccgccaccgagcacgcaccggccctggtcgagcgttaccgctggttggccgacggccgcctggccagcgccggcggggcggattgcgaggtgcgctacacgtacgacgaggtcggtaacctgcgcctggaaagccaggtacatgccgacggttgggtctacagcgtcgagcacagccacgacgcgctaggcgtgcgccagaccagccgctacggcgacgcgccgccggtcgcctggctgacctatggcccgggtcatctgcacggcgcgctggtcggtgcggtcgagctggccttcgagcgcgatgccctgcaccgtgaggtgcgtcgcgacgcccgccgcgacgggcaggatgacgcgttgttcacccaggagcgccagcacgcgccgctgggacgcctgcagcgcagccgcctgcgtctggccggcggtttcgactggcagcgcggctatcgctacgacggacttggacaactggtcggcatcgacgacaaccagtatccgtcggtgcgctacgaatacgacctcggcggtcgcctgctggccagccggcgcgctggcgcggcggccagcacctaccgctacgacgccgccggcaaccgcctggagggcgtcggcgagtacgcgcgcgaggacgctcgccaggcattcgccgagaacgaactgtaccgctccggtttcagtcgctccgaggcgcgcgcgagccaggccggcgaaggcccggcgcgctgggccggcaaccgcgtggagaggatcgccggcaaccgctatcgcttcgatgcgctgggcaacctggtcgagcgtatcggcgccgacggcgagcgcctgcgcctggcctacgacggcgcgcagcgcctggtccatctgacgcgcgattacgccgacggcacgcggctggaggcgcgctaccgctacgacgcgctgtcgcgacggatcgccaaggtggtgctgcgcgacggtgtcgagcagcaggtgcgcttcggttgggacggcgatcgccaatgcgccgaagcctttgcgcgggaactgcgcaccaccgttcacgaaccgggcggtttcgtcccgttgctgcgcctggagcaggcctgtgagcccgatcccccggagctgctgcaactgcgccaggcgttcgccgccgagggccagccgctgccggcgcaatgcgtgccggcgctgggcgaggcgcggatcgctttcttccacaccgaccacctcggtacccccctgcagctgagcgacgaacgtggccaactgcgttggcagggcgttccggacgactggcgggcggtagcgccggaacgacagccgggtgcgcagccgatccgcttccaggggcagtaccacgatgaggaaagcggcctctactacaaccgctaccgttactacctgccggaagccgggcgctatgccagccaggacccgctcggcctgggcggtggccccaacccctatgcctacgcgctgaacgcgcccacgctggcctacgatcccaccggcctgatcatcccgctggtggtgatcggcgccttcgccgcccgcgccgcgatcggagcggcgctgggcgccggcatcgagctggggatgcagaccggcaagcaggtgctggggcagatgaaggacaactgggacagcgatcgcgacctcaccgatatcaagtggaagtgcatcgacatcaactggaaacacgtcggcgcctcggcggccatcggcaccgtggcgccgggcatgctcagcaccggcaagaccgtggtgcagtccgccaaggcgatcaggaccctttccggacaggcggccaacaccgccaaccgcgcggccaagctggccgcgcgcaaggccgcccatgccgataccatcaagaaggccgtggccacccaggccgcctggcagacgggcaagcagatcgtcaaatgcccgctgaaggacgaagaagaggagtgcccgccgcaatga

SEQ ID NO: 344181 - DNA, 183 bp, Pseudomonas aeruginosa
gtgatcgaccgctcgccgcgcctgaacaacgtgctgatggccttcggccacggccaactcggcctgaccctcggcgccaccaccggccgcctggtcaccgacctggccgcggatcgccagccggcccaggacctgacgcctttctgcgcccatcgtttcgcccttatcggaggactcgcatga

SEQ ID NO: 344182 - DNA, 1218 bp, Pseudomonas aeruginosa
atggacgatctattgcaacgcgtacggcgctgcgaagcgctgcagcaacccgaatggggcgatccgtcgcgcctgcgcgacgtgcaggcgtacctgcgcggcagtccggcgctgatccgcgccggcgacatcctggccctgcgcgcgaccctggcgcgggtcgcccgcggcgaggcgctggtggtgcagtgcggcgactgcgccgaggacatggacgaccaccatgccgagaacgtggcgcgcaaggccgccgtgctggaactgctggccggcgccctgcgcctggccggccggcggccggtgatccgcgtcgggcgcatcgccgggcagtacgccaagccgcgttccaagccgcacgagcaggtcggcgagcagactctgccggtctatcgcggcgacatggtcaacggccgcgaggcccatgccgagcagcgccgggccgatccgcagcggatcctcaagggctacgcggcggcgcgcaacatcatgcgccacctgggctgggacgccgcgtccgggcaggaggcgaatgcctcgccggtctggaccagccacgagatgctgctgctcgactacgagctgtcgatgctgcgcgaggacgagcagcgccgggtctatctcggttcgacccactggccgtggatcggcgagcgcacccgccaggtcgacggcgcccatgtggcgctgctggccgaggtgctcaacccggtggcctgcaaggtcggtccggagatcggccgcgaccagttgctggcgctctgcgagcgcctcgacccgcgccgcgagccggggcgcctgacgctgatcgcgcggatgggcgcgcagaaggtcggcgagcgcctgccgccgctggtggaagcggtgcgcgcggccggccacccggtgatctggctgagcgacccgatgcacggcaacaccatcgtcgcgccctgcggcaacaagacccgcctggtgcgcagcatcgccgaggaggtggcggcgttccgcctggcggtgtccggctccggcggcgtggccgccgggctgcacctggagaccaccccggacgacgtcaccgagtgcgtcgccgattccagcggcctgcaccaggtcagccggcactacaccagcctctgcgatccgcggctgaacccctggcaggcgctcagcgcggtgatggcctggtccggcgcagaagcgatcccgagcgcaaccttccccctggagaccgtggcatga

SEQ ID NO: 344183 - DNA, 1437 bp, Pseudomonas aeruginosa
atgactgtgcttcgccgccttgaccacgaagttgccgggcatgcccagctcgatgttgccgcccttgagggtcaggtaggcgccgccgcacatcagggtgatgtgctccttcgcggtgaccagcacgtgctgctggctggcgctgacctccacgctctgctcggcctccaggcggatgtcgttcttctgcgcctgcagcagcatcggcccctggtgggtgatctggcgcagctcgccgccctgggcgaacaggccgatgtcgctgccggcgttgatcaccaccttctgcccggcggtcacctgctggttctgccgggccacgctgtcgacgtgctcgccggcggccagggtcaggctcgccggcgtcgccgcggcgatccctgccggaccgctcaaggcgatcgccggcttgcctccgttgctcttgccggactcgtcgttggcaccgtggccgaggtcgcgcacggcttcctggagggtttgctgcggcgccgcgtcgtgccccacgccctggtgctccccggcgtagtcgcccagctcgcgggccagctccaacgccgcctccagcacctgcaccacgacgcctcggtcgagatggccggcgccggccctgagctgctcctcggtgctcagcagcaggcccctggccgcacgcaccgcgccatgttcgtcggtgcgcagttcgaagccctcgccgcgcggcttgccgccttcgggccgaggatgggtcaggtagcccaggcgcagcgcgctggcaccgtggtcgctcatcagcgccgcactgatctgcgccgtggtgtcgtcgatgcgcagctcgttggcccggctgcccttgtactccttgctcttgatggtgctgaggatcttgtggtcgggcagcgcgtagggcggccggttggtcgcccggtaggtacgcccggtgacgatcggctggtcgcagtcgccgtccaggtaatcgacgatcacctcctggccaatccgcgggatcgccatgtgcccccagtcggcacctgcccagttctgcgcgacccgtatccagcaggtactgaactcatcgtgacgtccctcgcgatcccaggggaactggactttcacccgcccccactcgtcgcaatggatctcttcccctgccgggccgactaccgtcgcgatctgcggaccatcgatacgcggccgaggcagcggtgcgggacgccattcgacgtcctcgggcaccagttcggcgcgcaggtcgtagctcacccccagaggggcgtcggcggactcttcctcctggccggcatactgggtgccgcgatggaccacccgcaccggccgccaccaggcgttgaagtcggcacgcggatgaccttccagggcaaaggcgtggcccgggatcagccgcgggtcgtcgccgctgaccgatgccacccgcgcatcgcgccggtgccctcttag

SEQ ID NO: 344184 - DNA, 837 bp, Pseudomonas aeruginosa
atgccggtttcgttacccttcgagcaagtcgatgtcttctccgaacagcccttcaaaggcaacgccgttgccgtggtgattggcgccgaccgcctgagcagccagcagatgctcgagttcgccgcctggacccagttgagcgagacgaccttcctgctgcggccgaccgttgccgaagccgactatcgcgtgaggatcttcaccccgttgcgggagttgccctttgccgggcatccgacgctgggaagctgccaggtctggctgaaccaggggggcggcaatgctgctgacgagatcgtccaggagtgtctggcgggcctgatccgcatccgccgcaagggcgccttgctgtcgttcgcggcgcctcccctgcttcgtggcggagcggtcgaagacgaggtgttgcgacggatcgagagcgggcttggcctgtccccggggcaggtactcggcagccaatgggtggacaacggacccggctgggtcgccgttcggctggccacgcgtgacgaggtcctggccattcgcccggactacgcgaagctcgacgggctcaacgtgggcgtggtcgcgccctggcaaggtccccaggcggaggcggatgtggaagtgcgcgccttcatgggcgaggaactcaatgaagaccccgttaccggcagcctcaacgcgagcctggcgcaatggctgatcggcacgggagtcatgcccgggcgctacacggcgagccagggcacggccttgggtcgccgggggcggataagtgtcgagcagatcggcggcgatatctggatcggcggtgaggtgcagccgggcatgtcggggcaggtcgtgttctga

SEQ ID NO: 344185 - DNA, 1035 bp, Pseudomonas aeruginosa
atgacagcatatgctttctggaataacaaaggtggagtgggaaaaacctatctctcatttattgctgcgtcagaatacgcgcacacttatcctgactccgatgtatatgtaatagacctatgccctcaagcaaatgtttctgaaaccttacttggaggaaacattgctagctcgaaagctatcaatcaacttaccacccacacccctaggaaaacaatcgcaggatacctagaagcgagattaaactcaccattctccccactagacagtgtagaagaattcatatgcagcccaaactcatacaatagcaaaataccagaaaacctctatctaatatgcggtgactactttgttgaaattttagcagaggccattcgtcaaacagcagctttaccaataccattcgatgcttggaaaaaagttatggagtgggtaaaggatttggtaagcactttaaaaatgcgaagcgggaatagagactgcatattcataatagattgcaaccccagtttctccatatatacacaactcgctcttgttgctggtgaaaaattgatcatcccctatacagcggatgatagttctagacgtgccatagaaaatatttttgctctactttatggcgttggcgacgcaagaacagaggcttatgcacgcctgatattcagcaaaaaatcacaagaaaacgctgtagaaacccctaaaatacatacatttataagcaatcgacagactatatttgacggcgaaccaagtaaagcattcaaaggcataaacaaaataattaaagacatggtaaacacttaccagaagaaacataaaagccttttctcttcaaagtcaaaaaatgcttcagaaaacttcatcgaaatcccggactatcatggtgcctgcatcgtatcagcctttacgggaacacctttattcaaactaaaagccggccccaaaactattggggaagagcgggtacaactcaaccctgagcccttaaagaaatacaaagcagcactttctgaatttgttgagcttctataa

SEQ ID NO: 344186 - DNA, 738 bp, Pseudomonas aeruginosa
atgacccagaccgccattacccgcgaacccgtcgccggacgccgcctgaaggccgagcgcctgaacggcgcccgcgccctgcgctaccgcgtattcagcgccgagttcaacgccaagctcgaaggcgccgaagacggcctcgaccgcgacgactacgaccgtcactgcgcgcacatcggcgtccgcgacctcgacagcggcgccctggtggccaccacccggctgctcgaccatcgcgccgccgaacgcctcgggcgcttctacagcgaagaggagttccacctctccggcctcgacgccctgcacggcccggtcctggagatcggccgcacctgcgtcgctcccgaataccgcaacggcgccaccatcgcggtactctggggcgaactcgccgaggtcctcaacgagggcggctaccgctacctgatgggctgcgccagcattcccatgcgcgacggcggtatgcaggccaaggcggtgatgcagcggctgcgcgaacgctacctgtgcaccgattacctgcaggccgagccgaagaacccgctgccgccgctggacgtcccggaaaacctcaccgccgagctgccgccgctgctcaaggcctacatgcgcctgggcgccaagatctgcggcgagccctgctgggacccggatttccaggtcgccgacgtgttcatcctgctcaagcgcgacgaactctgcccgcgctacgcccgccacttcaaggcagcggtctga

SEQ ID NO: 344187 - DNA, 591 bp, Pseudomonas aeruginosa
atgcctgttgtattgtgtgtcctgttgttgctcctcagcccgctgctgtcggcggcggaatggcaactggagccggattactcgcggatcagcttcgtttccgtgaaacgcgcgaagatggccgaggtgcagcgcttcgatcgtctcagcggccagatcgacaagcagggcgtcgcgcgcatcgtggtgccgctgggcaccctggacagcggcctggccctgcgcgacgagcgaatgaaggacaacttcttcgaaacctcgcgcttccccgaggccaccgtggagagccgcctggacatggccggcttcgacgacctgcgggtcggccagtcgcgggtcgagaagctcgacttcaccctcgacctgcacggccagcagcgccgcctgaaggccgacgtgctggtcacccgccagggcgaagggctggtccaggtggcgaccctggagccggtgctgctgaagctgctcgacttcgacctggaagagaagctcaagcccttgaaggagatggccaatattccctcgatcactcccgaggtaccggtgttcgccgtgctgaacttccgcgaagtgccgccggaacagttctga

SEQ ID NO: 344188 - DNA, 222 bp, Pseudomonas aeruginosa; identical to SEQ ID NO: 319174

SEQ ID NO: 344189 - DNA, 216 bp, Pseudomonas aeruginosa; identical to SEQ ID NO: 319175

SEQ ID NO: 344190 - DNA, 756 bp, Pseudomonas aeruginosa
atgcacgagaacaagaatgatgcacccacatcgaaggtgttctaccgcccgatcgaagcatccatccgctgggccggactgttgcagtatgagcaggtgatcctggcctcgatttcgtcgccacggaatctgccacaatcgctggactgcccgcgttggggcgaactgcggctgtacaccgatcgcatctacgacggcatcctcaatggggaactgcctttcgggcgggacggcatcacaacgcgcgatgccgcgctgatcgacacccatgatctgacggtgcgtcacgtcgatctgaaacgctggatgcaccagcactatcccgagcagcggccccgttttctcttctcccgcagcgagcgcatcgcccatcccttcatctcgctggagaccggccaagccatgctggtcgagcgtctagccctcaaatccgcccaggagcagtgcaagcgccaactgcgcgcactgcaagacaagcacgacgcgctgctcaagcaatccacggtgattcctgcatgcgcgcaatgcccgatcagcgaccgggccgaggcgacctacctgcacatcatcggcaccatgctggagctgatgctcggccaatccccatcgggcacaccgtactccagcttcaacagccaggaaaccatcgctaccgcgatgatcgcgcatcacggcgaactcatgggcattactgatcggacacttcaagccaagtttgcgcacgcccgccgcaagctgcgcgccgccgtttcttga

SEQ ID NO: 344191 - DNA, 213 bp, Pseudomonas aeruginosa
atgtcgcaaacacctgtactgccgccgaacgagcgccgcatcctgcgcctggaagaagtcgaagcgaagtccggcttcaagcgcgcccacctctacaacctgatgcgcgcaggcaagttccccaaagcgctgcgcttgggcgtgcgcgccgtcggctgggattccatcgagatcgatgagtggatcgccgagcgcctcaacaaccgggcctga

SEQ ID NO: 344192 - DNA, 249 bp, Pseudomonas aeruginosa
atggcgaacgcacatgaactggcccgaggccacaagcggctgcgcgccctgatcgagttcgccgtcggcgagggctggcacgtcaagcgcacgccaggcggccacctcaaattcaccaaggcaggctgcgccgcgatctacaccagttcgacggccagcgaccaccgggccgccctcaacgcccgcgcgcagatccgccgcgctgagcgcgaggcccggtccccagcgcagggaggccgccatggctga

SEQ ID NO: 344193 - DNA, 1626 bp, Pseudomonas aeruginosa
atggctgagatgacctcccagcagatggccggcaagctgctcgctgccggattcgagcgcagcggcccatccacctcggccttgagcgacccgatcgccgacacgcccatggtcgtgaccctggaccagttgcgtccctacgaccacgaccccaggaagaagcgcaatccggcctacgaggacatcaaggcgtctatccgcgagcgtggccttgatgcagcgccggccatcacccggcgcccgggcgaggactactacatcatccgcactggcggcaacacgcgcctggcgatcctgcgcgaactgtggtcggagaccaaggacgagcgattcttccgcatatcgtgtctgttccgcccgtggcccagccgcggcgaagtcgtgatgctgaccggccacctggccgagaatgaattgcgcggggggctcacgttcatcgagcgcgccctcggcgtcgagaaggcgcgcgagttctacgagcaagaaatcggcaccgccctgagccagtcggagctggcccgccgcctcgctgccgatggcttcccggtccagcagtcgcacatcagccggatgaacgacgcggtgcgctacctcctgccggcgatcccgaccgtgctctacggcggtctcggccgccaccaggtcgaacgcctgtcggtcatgcgcaaggcttgcatgctcgcgtgggagcggtacgctaagggccgcacgctggtacaggacttcgacgacttctttcaggaggtgctgtcgcagttcgacacgcaggccgacgagttcgccccccagcgcgtgcaggacgagctgatcggccagatgtccgaactgctcggcatcgactacgacgtgctggcgctcgacctcaccgaatccgaaagccgccatcgcgccctggtcagcgatccgaccccgccatcggcaccgcccgcgctgcctgagcctggcactttggcacgcgcgccggccccatcggcccctacgccggcggccacacctggatctcgcgagcacgagggcggctcagggacggacggctcgcccgcaggaagccccgtggcggctcctgatgatctgctgcaggggcacatcgtttcgcctgcaccgacgacggagaggctgcaatccattcagcggatggtcgccgacgagctgggagatgcgctgcccgatttctcggccaatgtcttgcagtccattccagtccaggcaggcggtctctacccgatttccgacgtctggcacatcgacgcgggcctggacacgcccgatcgcctgcgcatccacatcgcgcagttcgcgcgcgagatcgcgggcgaggcaggcctcgatcagtgcatcgaggaacgcgcggacggtgttggcttcgcatgccatgccagcgtgcagcccccatcaccgcacggccgcgccgtgctggcattgctggcgagcctggctggccagagcttcaccgatgccgatctggacagcgggcagcttgccgccgagctgccggcgctgctgcacggccaaggcgatgcgaaccggcgattgagcgacaccgcgctggtcaagctgttccgattgctgcgcctggcccggcgcctgctggacctggaatctggtgccgcaggccctggggcatga

SEQ ID NO: 344194 - DNA, 561 bp, Pseudomonas aeruginosa
atgtccgccccgcacccgctcaatcaagccgtcatcgcgcaggcgctctacgatctgcgcaacggccaactccgccgctgcaaggcgatgggcttcagcgaggccgagctggatgcgctcaagcatcccgccatggtgagcgtgctggccaacgccaatgtctcgtggtgttccgtgtccgtgaaccgcgaggtgctccggcgtctgctcgcgcaagcgcaggacgtggagaaggaaatcgcgaccgtcgatcgcatgttgcgcctgggggccagcacggagatggtcagccgcttctatggcctgacccatcaggaagtcgccctgcgccgtgaggtgctgggcctacccaagcgcaagggacgccaccctgtcttggacgagaaacaggacgtcgaactgtggcggcgctggaaagccatcaccagcagcaggaatgtggacttggaggacgagacctcgattctcgacgcggccatggatctggccgaaggcatggatttgcccctgtcggtggtctgggccgcgatcaagtcgtgggtcgatcagggactaggttga

SEQ ID NO: 344195 - DNA, 1251 bp, Pseudomonas aeruginosa
atggctgtggacgacaccacaccacgccatggccccgtcgcactcgctgacctgttcgacgcagcgctgaaagaccttgcgcccaggcccagcccgcccacgcccatacctgcgtcgtcacctgcgatacacgcagcgttcggcgatgcgttcctcttcagcggcaaccggcatgagaccgtaccgcggcggctgttcctcgatcgccgcctgacgccgctggagcgcaacgcctggcaggtgttccggctgatgctcaacgacgacggcgtgaccgcattccccacctacgagcagttgcggccctggctggcctcaatgccctacgccgggcaggcgtcgcacgaaaccgtggcgcgagccctgacgctgctgcggctgacccgatggctgagcctggtgcggcgacggcgcgacgccaagaccggccgcatcctcggcaacctctatgtcctgcacgacgagccgttgaccccctttgaagcgatgcagctcgacccagactacctgcaactggtcagccaggcgcttggccattccgccaaagccgtgcagatcgtgggcctgcacacactcaaggaaatcagcgaagaccccatgctcgccgggcgcgccttgccgtcaaggctgcaagttctggccgaacacctcgccaaccagggcgtcggggcgcacgacagttatccacaggaggacgccacgcacgaatccgaagaaggggcgacgagccttcttcggaatcctgatgaccccacttcggaatccgaagcagggtcgaaacccacatcagacgcctctcttcggaatccgaagaaggcccgtacagtacgtagtagtcgtattaatgaagtacgtactaccgcgcaggcacaggcgcaggcgcgcgcgctgggcgacctgcaatggcccaaacgcttcgcggaactgaaggcagagcagcagacaggtgcgcgggtggcattgcagcaggtcgatgccgcgctgaggcaggccgtgctggacgaatgggccgcacgatgcagcagccacggcatccgcaatcctgcggggtatctgttcggcatcatccagcgggccatccatggcgagttcaacgcctgggccaagaaggacgcgccagcggcacccgttccgccgaatgagcggccaccaccagcaccgccgccatcccagccgcagggcaagccggtgccgccagaagtcgccaggcagcacatcgagcggctgcgcaacctgctcgccagcaagtga

SEQ ID NO: 344196 - DNA, 1578 bp, Pseudomonas aeruginosa
atgagcaccatccgtctccagacgaaccagaaccgcctgatcgaaacttttcgccatgcgttcacccaagcctcaatgctgggcgagctgctacagaacgcccggcgcgcaaaagcccgccacatccacatcaccaccgaaggcgacacactcaccgtcagcgacgacggcgaaggcatcgccaacctccagaccctcatctgcatcgccgaatccggctggaacgaggaactgaaggcccgggaaaaccccttcggcatcggcatcctctccacgctgtacttcgcgcgcagcctgcgcgtgcattcgctggacatggcctttcgcgccaccaccgccgcgatcatcaacggcgaggacatcgacgtcatcgccgcgccagcgcgcgtcggcaccgagatccgcttgtgcggtgtcgagcctccctacaagggcccgacactgtcccagtgggtcgcgcagcaactggtgcggctgtgcgaagccttccccgtccgcgtgacgttgaacggcgcggaggtcgagcgcccgctgtcccggccagctctggcctggcgggacacggacgtcggccgggttctcatcgacctggaaggagcgcagtcacagtaccgctgctacctccaagggcttcccatcggaagatggccctcttcgcaacgacaccagatcgtggtgctgcgcgatgacatgatcgcccgcccgccggatcgccagcatctgctccacgaggaagaggacggcaagcgcatccaggctgcggttgcgcaggccttccgtcaggcgttgatcgaagccaaggagcgactgtccggtgccgagttcgtgatgctgtacgcatccacgtgcctgtcctcatcgaacgctgatctgctcagcagcattcccttcgcgccgcgcagttggttccgcgactggacccatgagccgccaggctttcgcagccactgggccaggcactgggatcgccatcacgccgagggcgttgtcgctcgggaagcgctccaagaggtcggtgtctggtccatcgacgccgaagacgatgatgatgtgccgaccgccgaggtctatctggcggccagacaggcttttctgctggaggagcaccgcatcgatggtgaccactggctgcgcgacttgctgcactacgcagacccggatcaggtcggcatccaccacggcgaagtgctgcacgtggatgacagcctgccattcaacggcgacatcatcggtgtcaccttggtcggaaccttgtccgccagctttggcggagacacccgcgagtatgcggtggctgccatccgcaggcatggcaggctctacgtgacgcctcatgcgggagacgtcaccaggctcttgtccgactacatcttcgatgaccgctacgaccaaggccgcgaggatgcggatgcgcagaccatcgccacgttcatcgcggtcggctgctcggattcgcccgcccgcgcaatcgaggaactgctgcccaagtcctggcgatacacccagcagcccaagctcgcggatgccaccgtgtgcctgagcttcgacgccgagggcaagctcgcgagcgtgcagtga

SEQ ID NO: 344197 - DNA, 462 bp, Pseudomonas aeruginosa
atgccccgaaatccatctttcgccgtcgttctcgaaggcggtctggtccaggcaatcctcgtccaggattggccggcccacctgccgctgccgccgttcgcggtagtggactatgacaccgagggcgccgacgacgacgagatcacgcgctttcccatcggcgactccgaagccgaagccgtctgtcgcggcgaatcacctaccgtccacgaggtgctggcggattccctgtcgccacgcgcagtcctcgccgcattggacgagcctgtcgtcgatgacgggcccgatccgctggcgatcgcgcggagcgtgcgacaggacatcctcgacctcgacgccaagctcaacacggccgaacagccgccgtcgggcgaggactacaaccacctgtatgtgctggccaactgcggcctgatcgacgtgctcaaggcattgggcgacccgaccgacttcggcgaatag

SEQ ID NO: 344198 - DNA, 216 bp, Pseudomonas aeruginosa
atgttcgaggcgagcgagtgctgggtggtgtattcgcccaacgagtccgccatcggcgacagcgccggcttctggtccaacgagttcggctgggtccagttcgaccaggcgacgcgcttctcgacgcaagagaccgggagcttgcagcttccgatctcgactggcggggaagcgcgcttcgttccctggcaggaagcccagcagcactgcggctga

SEQ ID NO: 344199 - DNA, 918 bp, Pseudomonas aeruginosa
atgagcaccacgtccaacgagaaatcgtatttcgacctccacacctcgggcatcggctacatccagcgtgcccgcgaggttcccgtccggggcggccgccgtgcgcagcctttcctggcttgcaccatcgccgcgctggtcggtcccgccaaggacccgacctaccgctacttcgacgtcaaggtctcgggtgccgaggccaagaagctggtcgaacgctacatcggcgttgacgatccgaagcagcgtccgctggtgcgcttccgcactggcgatctgcgcggtgatccgtacatccgcgacaagggtgaaaagaagggccaggccggcgcgtccctcaaggcacggctgctcaaggccgagccgcttgaccgggccgaactgccttcgatcaagcagcacgaactgatcacccgcggcatcggctacctcagccgagtgaaggacgtcacccccaaggatagcgaccccttcctgtcatgcaccatcgccgccctgagcgggccggtcgaggaaccggaatatcggtacttcgacaccatcgtcgccaccccagaggccgagcacctggttcgccggtgcgttcaggccatcgaaggggaccgcaaggtgctgatcgccttccgtctgaacgacatgaagatcgatccgtacatccgcaccaagggcgagcgcgccggggaaccgggagcgagcctggaatcgacgctggtccacatcggtctgatcaagatcgacggcacccaggtctatccgacgagccaggcgcaagccgaggcgccgcaggccgaggacgcacccgcgcccgaagccgaggttgccgccgacaccgctgcctaccagcctgttgagcccgccgagcgcgagcccgcaggtgaagtcgaggagcaggagccggcattggctgcttcgttctga

SEQ ID NO: 344200 - DNA, 324 bp, Pseudomonas aeruginosa
atgtccaccatcgcttgcgatacacctcattccacgctggacgaacccgcgtggcgcgctgtctgcaagacggccgccgagcatgcccagcgtggttgcggcctgtcctgggatcactgggtcacgctcttcagttcggagatcgacgcgcaagccagtcgattgccggaaaaccagcgggctcaggccctggtaatcgcgacccaggaatgggactacgcaacgcctgccgaacggcaggaaacccgggactggaacgctgcaaacggctactgctcccatggcatcgaactgggctactgcccagccggttgcggttcctag

SEQ ID NO: 344201 - DNA, 408 bp, Pseudomonas aeruginosa
atgggctggtatttctccccccaatcgcggtctgaactgatcgcggaactgatcgcaccgcaagagaccgagcgcgccagcgtcaaggtcatcgcccacgcgctgcgcggcaacgtcctctggtccgtcgcggaagtgacggccaaggtcgaaggcgtgcatcgtcatctggcgccgggccaatccctgcgctacatccgttgcgatctgctcgaacgcagcggcaaccagtggggctacaagccactggacgagtccatgcacccgtactactactcgtgcccgctgtcctatctggacctcgcaccggagcagtccgccgactggcgtgcaggcgttcgcgcctaccacgcgcggcggcgcacacccacggcacctgcggcacccaccgcagcgctgatggcctga

SEQ ID NO: 344202 - DNA, 651 bp, Pseudomonas aeruginosa
atgcccgcaaacacttcttccaccacgctgtatcgcatcgacgaatgctccgacgtgacggccgacgcttgcgtcggcgatgaccagggcaatctgatctttctgtcgatctgggcgcgggacaccgccgtccagcagttcctcgctcgtctgaccctcgggcgcgacgaacagggcctggaccagttccacgtcatcaccgaccagggcggcagcgtcccggtgttcgtcagcaacgtcgatcgcctggaaaagcgcatgacccgcgcctaccggcgaacgctgttcggatcgctgtccaacgtgtggctgttcgaccgacgctgcgtcaagcccgacaaggccaacgccagcgcactggcattgctgcccaagggcagcgcccaccggcttgaccgcctgtggatgctggtacgggacacctgcccactgccactgctcgaccactggcgcgaacccgtgctggaactgctacagacccgcgagatgctggcccgtcttccgttcgccctcgggccgctggaaggccatcggctcgccatcgacgtgccggcgctgaccctggcgctgggctccctgatccgcagtgacgtgctcaccgtctatccctatccggccaagatttggacgccggaaacggtagcggcttga

SEQ ID NO: 344203 - DNA, 321 bp, Pseudomonas aeruginosa
atgttctcaagcctgttcaagcggcccgcgccgcagaagcaaccgttgttcgcaccaggtacgttgcagttgagcgagaaggtgcattggctggcccgcagaggcctgatcgaccccttggcttttgtccagcgacatgtgcgcggtgactggggcgagaccgatgaggccacccgccaagccaacgatgttgcaatccggggggacgatccgctgatctcccacttcaggatcacacccgagctggtgctgatcgtgagaaccagcgaggaccaccagaccacggtgatccagcttcccgaagaacgggacatgatctga

SEQ ID NO: 344204 - DNA, 1821 bp, Pseudomonas aeruginosa
atgcagtcgtctagcgtcagctcggcctacctggcgcaggccgcagacctggctggtaatcccggccagttggccgcatacgaatcgcaggggcactgcgtggtgctcgccggaccaggcagcggcaagacgaagaccctggtgctgaagctcgcacgcatcctggccgaggacgttcgtgcgccgcgcggagcggcatgcatcacctacagccaggaatgcgcccgcgaactgacccgccgcctcgaaggcctgggattgcgagaggcaccgaacctgttcattggcacggtgcatggtttttgcctgcgccatctgctgatgccctacgggcgcttggccaaactgccgattccgtttccattggcggtggcaacgcagcgggtgagcgaccgtttgctgaggcagtcgggggacgcgctcttcgggcccaatcatccgtacaaggccatcgatctggggcggcaccgacgctctgttctcgaccgaaacagcgtcgtgtggcgcagcgaggaggagcttgccgcttgggcgatcgcctacgaagcggcgttgcgtaacgagggattaatcgactacgacgacatggtcgtcttcggccagcggctgattgtcgagcacgactgggtgctgccattggtccaggcgaagtttccggtgctcgccgtcgacgagtaccaggacttgggcgtcgcgctgcatcggatcgtcaagcgcctggcgttcgatggcggggtccgcttattcgcggtaggcgatgcggatcagtcaatctatggtttcacgggggccgacggcggcttgctcacggaactggccgcacgggacgatattgagcgggtccagcttcagctcaattaccgatcaggtaccagaatcgttaacgcctcggagctggcgttgggcgaggcccgcggttatcgggcgtacgacccggcgcgtcaggcgtccatcgcgttcgtgctgcgtcctgggggcttagcggatcaggccgcgcatgccattgcgcagatcattccgacggctctggcggccaagcccggtcggacgcttggtgatatcgcaatcctctacaaggactaccgcgcaggcgatgtcgtcgccgaggcggcgacggccggcggaatcgactacatccgggtcgacaatgccgcgccctatcgcaaggtgagcctgacgagttgggtcgaggactgcgcagcctggtgcgctggcggctggcgcatcgggcggccgcagttgcgtggtttgatagaacgttatctggctttccaccgtgcgcatctggacgagagccaggccagacgcgaggggcaagtgctgaccgcgcttctttggtccctgcgccaggatgttcaacctgcgcgtgagttcgttgcagcgcttcggaccggtatcctcgatgacctgctggccgcagagagtgcgctcgccgaccagaaggagcagttggaccgtatgacggcggcactcgcggaaggtggcgcgttggcttccctggatatcgtgagcctcggggggcgagatgggtcgccagcgcatctcaatctattgaccttgcattcggccaagggctgcgagtacgacgtggtcatcatggtcggtctcgatcttgggaatctgccgtggcgcaatgagagtcccgagaaactgcgcgaaagtcgtcgcctcttctacgtgggcctgacccgcgcccgtgacgaggtccacatgctctattcgggctttgtcgatggtcgattcggtccgatgcggcttggacgctccccgttcttggacgagctggagaatcggatgcggaccgccggcttgcagcagtag

SEQ ID NO: 344205 - DNA, 1785 bp, Pseudomonas aeruginosa
atgcggatttcacgcgtcaggctagtcaatttcgccaatttctcggacgtggatgtcaagaccggcgacagcatcgtcatcgtgggggagaacaaggtcggcaagagcaacttcattcgtgctctgcaactgatcctcgatccagcattgtccgagcgtgaccggcaattggggcttgagcacttttgggacggcctcggcgcagacaagctcggcgaaaccatcgaggtgtcggtcgaccttaccgatttcacggacgatccacgactgatggcccacctcaacgactgcgtgatcgaggctgggccacccatggtggcgcgcttgacctatcgctttcagccgaaggccggactggccgaggagcccgattcgctgagggactacgagtacgtgatcttcggcggcaacgaccccgagatgcgtatcggcggcgggctccgtcgcatgttgccgttggacgttcaggttgctttgcgtgatgcggagaaggatcttgcaagctggcgtcactcaccgttgcggccgctcatcgaagaccttgcagcgtcgctcgatgaagacgcccgagaggagatccagcagcaggtcgacgaagcccagcaggaacttgccggtcacgacgaggtaatagaggccgcggaacggatcagcgaaaggctggtcgcccttgcgggagcgcagcatgccgtcccgctaggcctcgggctggcgccgacgcgcgtcgatgccctgttgcgcagcttgaggctgctgatcgacaacggagctcgcggcatcggcgacgcaagtctcgggacggcgaacctgatcttcctggcgctcaagagtctcgaactagaccggctggtgtcggacggcgagcgtgaccacaccttcttcgtggtggaagagcccgaggcgcacctgcatccccacgtccagcggctggtttatcgctacttcctgggcaccggtgcacagggcgacgaggacgtgcctccgctcacgacgatcctgaccacgcactcgccgcatatcgccagtgttgcgccgatacggtcgatcgtcctgcttcgtcacgatgcgtcagaggggaagaccgtggcggtctctacggcgaacgctcctttcactcaacgcgacgaggaagacctgcagcgctacattgatgtgacgcgcggcgagatcttcttttcacggggcgtcattctggtcgagggcgatgcagagcgcttcctcatccctgcattcgcggaagcgctggggatcccgctcgacatgctgggaatcacggtatgttcggtgggtggcaccaacttcacgccatacgtgaagctgctggggcctcatggcctggacatcccgcacgtgatcttgaccgaccgcgatccggttgacggaaagccgccgcgcgtgcgtcgtcgactcgccaatgtcctcgacgtggtcgagcccgaggacgaccacagcgggtgggatgtggacgatattctggagcgtgccggggaactcgggtacttcgtcaatgagaacacgctggagcctgaattgttcgcaggtggtttggccgagtcgatgcagcaagtgatcgaacgagagttgcctttgaagcaggcgagcttggacgacctacagtcttgggtcgatgatccagatgaactcgacgaagaccgtttactggggatgatcgagcgcattggtaaggggcggtttgcacaagcgcttgcggtgtcggtatcggatgacacgtgcccggactacatccgcactgcgctcgagtacatccgtgatgcagtcgtctag

SEQ ID NO: 344206 - DNA, 582 bp, Pseudomonas aeruginosa
atggaagccatttgtccgatccggcgtctggccagtgccagcctgctggcagccaccgtcctgaccaccggctgcgcgacgaccgccgcaccggtcgtgccaccgcccatcgagcaggcgatctcgatacccgagccggccgcgccggaactcgtgccggtcgtgcgctatggccgctatacgctggtcgaactggctcccacggcagcgcagcgcgacttgctgttgcagaccatcgacgtgtcgatgcccgaggatgcccgcgccacggtcggcgacgggctacggcatgtgctcaagcgcagcggctacggcttgtgccagacggcgcacgcggtgatcgagctgtacgcactgccgctaccggcggcgcacctgcacctcggccccatgaccctgcgcgatgcgctgctcacgctggctggtccggcctgggaactgcacgcggatgaccgcgcacggcaaatctgcttcgagcggcccagcgacagcatgaccgccgacaacgcacccgcgccgcccgccaccgaggcggtgcagacgttaccgtcggcgcctgcggcatcgggaggccagccatga

SEQ ID NO: 344207 - DNA, 642 bp, Pseudomonas aeruginosa
atgaacgccccgcagcccgcccagcgttcaaccgccgccgtggtggtgcagagcctgatgtggctctggctgcttggcctcagtgttctggtggccctgggctaccaggtcatgaacgaccaggtcgaccagaaacgactcgatacccggctgcaacgcctcgaagcgcaggcgacgggcctggccgagaccatggaggctatccagcagcgtccggccgtcgccacggcggcggacctcaaggacacccgccaaatcctggaagcacgcgcggcccaggtcgagcaatcgctgagcggctatgccgctgccgacgatcttcaggcgttgcgcgcagaagtcgagcagatcaagtcgcgccagaccgccgcgcgcgccgcagcccctacccagccgcgcgcagcaaacaaggccgcctccaagcccgaaccaccgccgctgccgttccgcatcgtcggtgtcgaactgcgtgccggcgagcgcagcgtgtccatcgcgccgagcagtggggacttcacgcccggccagcttcaggtgctgctgccgggtgatgcggtcggccaatggcgcttgcaggccgtcgagggcaacaccgcggtgttccaggccggcgaccagagccgccgcgtggcgattccctga

SEQ ID NO: 344208 - DNA, 591 bp, Pseudomonas aeruginosa
atggcagcgccagccgtagccgcatccctgcgcgcactggtgcttgccgctggcctgtacgctggcgtcgcccaggcccaggaggttccgccaccggcctaccagctcgccgcgcagcgtgcaggcatcccctcgacggtgctctacgccgtggccttgcaggagagcggcatccggcgcaatgggcgcatcgtcccgtggccgtggtccctcaacgtcgccggccaatcgcaccgctacgcaacccgcgccgacgcctgcgccggcttgcagcgggcgatgcgctccacgccccacacgcgcatcgacgcgggcctgggccagatcaacctcggctaccaccagcagcgctacgccagcgcgtgcgacctgctggacccgtaccgcaacctcgccatcgccgccgagatcctgcgcgagcagcacacccccggcgaggactggttgctggcgatcggccgctaccaccgtcctgcgggcggtgagcccgccgcccgctatcgccgcagcgtgtcgcgccaccttgcccgcgtacagggcgcgcgcgcaaccgccgcggttctcgccgcacgccaggagacatccccatga

SEQ ID NO: 344209 - DNA, 540 bp, Pseudomonas aeruginosa
atgacgaaatcccatccggccttgcggggcctgctcgtactgctggcgggtctgccgctggcctcgcttgccggcgagccgctgatcgtggtcgaagaccgcggcggcgcgtcggcgctgccgtactacgaagccctgaacctccagccgcgcgccaacgcgccggcccggccgccgatcccgacgccccaggttcccgccacgccggcagacgaggccgcgatgctgccggtgcgcagcgccaagctcacgcccggcaccgtcgtgcggcgggtgattgaggcaccgggcctgcggcctttcgtggtcgtcggcgacgacgaaacttcccgggcttggctgcgccgccaagcggcgacgctgcgcgagcgcggcgcggtcggcctggtggtcaacgtcgagaccgtacagggcctggcgcggctgcgcgccctcgtgcccggtgtgccgctcgcgcccgtgtccggcgacgacctggccgaacgcctgggcctgcggcactacccggcgctgatcacggccaccggcatcgagcaatga

SEQ ID NO: 344210 - DNA, 786 bp, Pseudomonas aeruginosa
atggaaccgaaacgtccttccatcccgatccaggtccaggcgttccgccgccgcactcggcggctccgctggccttgggtattggctgctgcgctggtcgcgctgctgctgatctggctggtgttccggtcgcccggcgaatccccgcctcagtcgcccgcgccggtcagcatgatgcacccctccgggccgccctggcagatgggcaacccggagggccgcttcacgctgacgctctatgccgacctggaatgcccgttctgccgggagtacttcccgcagctcaagcgctgggtcggcaacaacaccgacgtggcgctgcaatggcaccaccagccgctggccgcgcacgagccggccgcgtcggccgaggcacgtctggccgagtgcgccgctgaagctggcgggcatgctgcgttctggcaaaccgtcgaatgggtctatgcccatacgcgcagcgacggccaaggattgcccgatgggcttcagtaccccgaatccacgccagccatcgagcagtgcatggcaagcgaacgtcccggcgccgccattcgcgtccaggcctcagaagccaccaagagcggcgtgaccgccacaccgtcgctgcggctgctcgatcgccagacgggccaggccatcctgctgcaggggcctatcgagggcgatgccttgctgtcggccatggacatgctggcggctggggacatggccagcgacgcggcggctccacccgccaccgccacatccgaaatgcctgccgacgttgtcggcgacatgcccaggtag

SEQ ID NO: 344211 - DNA, 891 bp, Pseudomonas aeruginosa
atggaattaaggcatcttcgtcgattccttgtcttggccgaggaattacacttcactcgagctgcagttcggctacacatggagcagccaccattatcccgtgctatcaaggagcttgaagatgaactgggcgtggcgctctttagtcgaaatcgacgtggcactcgattatctactgcgggtgtcgtgtttctgaaagatgtccgtaaactattcgccgtattggagcaagcacgagagaatgcaagggcggcggcggcaggacttctgggccgcatacacattgcaatctcggacggagcaatcgatcaaaggctatcgttactcctcgctcgttctcgcgctgaagaacccgaggttgaaatccgagtctcagaagtttctttgtccgaacagttgcgtggtttgcgttccggcgactttgccatcggtttcgcgcatacaggcgatgttgaggaaggtattatcgctgaaccggtttggactgatagcctcgtagtcgtcttacctgctcgccacccgttactttcgcacagagcagttccacttgaagaactggtatatcagccgcttgttttaggtgatcctattatttgcgaaggtttcagccgagagctagtacagctatttagtgttctgcagcgcgaaccgaaggtggttgaacacgtgttgtcagttagcatgatgcttacgctggttggcgcaggctacggtattggcattacgacgtcaactaagacaacagcatgcactcgctccgatgttgttattcgtccgcttgctatggaatccccggcgatttctacctatttattgcgtttgaaagccgatcatatctcagatccacttgaacgtcttattagacgacttcatgatcaaaaggagatttga

SEQ ID NO: 344212 - DNA, 744 bp, Pseudomonas aeruginosa
atggatatttctggaaatacggttctcgtaaccggaggtggcacggggatcggactgtcaatagcggccggattcctcaagacgggaagtcgagtcatcatttgcggccgcaacctggatgcgcttgtggctgcacaagaggcaaaccccggtcttgaaatcgtgtatggcgatgttgcggctcaaggcagtcgcgaagagttagcggaagtggtcctcagtcgttttagtagtgtcaacattctggttaataacgcgggaattcagcgccgggttgactttttgactgatgatgctccatggcaagatcgggtcgaggagattgccattaattttgaggccccggttcatttggcggcattatttttgccccatctcttaaagcaaaagcgggctgcaattgtgaatgttacttcgggcctggcttttattccgagtcgacaggtcgccgtttattcagcgactaaagctgcgatgcattcctttacgctatcgttgcgttcacaattggaaggaagctctgtttcggtggttgaagtaattccgcctgcggtaaataccgatttgggtggtaccggcttgcatacttcgggcgtgccggtcagtgagtttaccgatgcagtcctttcgcgcctggctgcaggcgacactgagatcgggtatggcacatcggagacgttccgcactgcatctagagaggaggcgcgtcgaatattcgattcaatgaatcgcgcagatccatga

SEQ ID NO: 344213 - DNA, 963 bp, Pseudomonas aeruginosa
atgaaaataatagcacttgaagaagccttctcgatacatggcctgaaacttggcgacaagattcatgccgttcccgatgtgcacgcttccgatgaattcaaaaacctgacgggtcctcgcctgttcgactttagcgaatggcggctgcccgacatggacgagcatggcatcgatgtccaggtgctgtccttgaccgcgccgggtatccaggctgccgattccgctgaggtcgcgattgccgacgcacgtaccgccaatgattttctttacgatgtcatcaaacagtcaccggaccgttttcgcggcttcgctgcgctgccgatgcaggatccggcagcggcgatcgaggagctgcgtcgctgcgtcctcgatctgggattttgcggcgcgttgatcaatgaccataccggcggccactacctggacgagccgcaattcgatgctttttgggctgccctcgtggagctcgatgtgccgctctatatccatcccggtgctcctcgagtcgatcactggcacattctggatgggcatccgaatctagtcggcccaacctggacctggggcgtcgaggctgccggacatgccatgcggatcgtctacgggggagtgtttgatcggcatcccaaggcaaagctcattctcgggcatatgggcgagtacctgccgtttcagttgtggcgacttgattctcgctacaaaacccttgccaatcaaaaccttcaacatttgccgtctacgtatttcgggcgaaatgtattcattacgacaagtggcgttttttctcacgcggctttggtcggggcgatcatggcaatcggggaggatgcggtgatgttttccatcgattaccccttcgagtcgtcggccgaagctgtggagttcctgcggactgccccaattacttcggaacaacgagagaagctcgcgcatctgaatgccgcacgtattcttaaactctaa

SEQ ID NO: 344214 - DNA, 1497 bp, Pseudomonas aeruginosa
atgacttcagatgatctcttgaaaacctaccgttggtcctccaatgatcccaaggacaaattctctgtcgagaatccggcgaccggggaaatcattgcatgggtgcaaggtggcggcgcggcagaaattgacgccgccgtcaaagctgcccacgaagcttatgaaactgactggcgacaccgttcgccgacggagcgcggcgcattactgttgaaatgcgcggatgtgcttgaggcgcatgccgatgaaatcgcgcgcatcgaaaccctggagaatggtaagccgttcactcaagcgcgcacgtttgatgtcaacgctctcattatgctgttccgctatttcggcagcattgtcgacaagatccctggcgatcacatcgatcacggcaacatttcgaccacagtagtgttggaaccgctcggtgtggtcggtgcgatcattccgttcaactggccgcccattcataccgcggggaagttggcacccgcgctggcggttggtaacaccgtcgtgttgaaacccggcgaacaaaccccgttgaccccagcctacattgtcgaactgcttcaaactgtactgccggaaaacgtggtcaacattgtcccgggtgccggtccgattgcaggcgctgcattggccagccaccctttggtcagaaaggttacgtttaccgggtcgaccaaggcgggtgctgcagtcctgcatagcgctgctgacaacattacgcccgctctactcgaattgggcggcaaaaatgcctacatcgtgttcgacgatgccgatctcgatcgggccgtgcgagatggtctggaaggtggctttttcaatcaaggtgaggcgtgcaccgccgcatcgcgcatggttgtccagcgtggcatttacgaccgcttcgttgagcgtctggctgaaggtgtgaaaaagctcaaggttggtgacggcatgaagccggagacgcacgtcggcccgctggtcactgacgttcaccgcaagcgcgtccagtcgtacattgatcttggcatcaaggatggcttgagcatcgctgcacaggcggagcttcccagcgatccagcgctgaaaggcgggttttatgtcaagccgactcttttcaccaacgtgcccgcagatcacacgcttttcgaggaagaaatctttggcccggtcgtaacggtcacgcccttcgataccgaagaagaggcggtcaagttgtgcaatcaatccgagtatggcctggtgtgcggcatctacacccaggacatggagaagggattccgggtagcgcggcatgtggatgtcgggatcacgctattcaacacgtacaaccgcggtggcgtgggcatgccttttggtggcgccaagcacaccgggttcggccgtgagcactgcctggataccttgaaagagtttggacgtctcaagacgatccgtcatccctccggactgggcaaactgaccaattggttcgccgtcgatgagatttacggtccccgcaacgtctaa

SEQ ID NO: 344215 - DNA, 741 bp, Pseudomonas aeruginosa
atgttggctgtgctacatcacgacgtgaagccacaagatgttctggtcgtttttggactcgcgaataaggtgtttgcactgcacagtgcaatgtattactatgccagcatgagagaaaagacagcacaacccgctttgcggggcactcctacaaacaggaaggttcttgccgctgcgcgtgaggcgtttctacgtaacggtttcggcggaaccagcatggacgagctcgctttggcagcgaatgtggctcgtcgtacgttatacaaccaattcggcagcaaggaaaatttgtttcgtgctgtcgttgctgacatatgggggcgtatagatcctggagagttaatcgaagaagctgcagcgggaaaggggccgcaagaagggctacaggctatcgggttcgcgcttgccagtcattgggcgagtcccacggttatcgcattcttacgtcttgcaattctggaaggcgagcgatttcccgagctgccgagaagtttttacaagtacggaaaggagcctattgttcttgcggtaagtgcgtatttggagcggatggtgcgggaaaatgccgtgcatctggaggattcattgattgcaacccagcagttcattggcatgatcaatgagcccctgctttggatgcgccttatcgatacggaaggcaacgtggatgcagaacggcgtgccgacatcgtaaaccgtgcggtacgtctgttcttcgctgggtacggtctcaaaacctaa

SEQ ID NO: 344216 - DNA, 1182 bp, Pseudomonas aeruginosa
atgagagaagctgtgctcgtctcgaccgcccgtacggggataggtagggcgtacaaaggctcgttgaacctgaccaagtcgcccaccttgttggcgcatgcaatgacgcatgctgtacagcgtgccggcgtcgatggccgcgagattgaggatgcggtgttcggctgcgtactggcgagtggaacagcgggcatgaatctggctcgcaacgcggtcctggcggccggtttaccaaacgccttaccggcacagaccatggatcggcaatgtgcctcgggcctgatggctattgcgacggcggcgaagcaggtgatcgtcgacggcatggatatcgtcttggccggtggccacgaaaacatcacggccgtgcagaacgaatatttccaatgggtgcagcgtgagcgggatccgcgtgtgatagcgcaggcgccgcatgcctacatgccgatgctggaaacggcggagtttgtgtcgaggaaatatggcatttcgcgtgaggcgcaggatcgctatgcgctgtcgtctcagcagcgcaccgctgctgcacaaagggcgggccgttttgacatggaaatcgtgccctttgccacgacgatggtccttacccagggcaatgagcaaggcgcaacgcaatctgtcgtgattggcgctgatgaaggcaatcggccgcagacgacgctcgagggtttggccgcgctacaaccagtggtgaaaggcggtgtggtgaccgcgggcaatgccagccaattgtcggatggagcctctgcgtgcgtgctgatggagcgcgctgtcgccgagcgtcgggggctaacgccgctgggcgtatatcgaggcatggccgtggctgggtgtgcccccgaagaaatggggttgggcccgatattcgcgatcccgaaattgttgaaggcgcatggtttgacggttgcggacatcgggctctgggagctcaacgaagcgtttgcctgccaggctctgtattgccgggacttccttggtattgacccggacatttataacccggacggaggggccatcgcgattggtcatccttatggcatgacgggcgcacgtctggttggccatgcgttgatcgaaggtcgaaggcgcggcatcaaatacgcggttgtcgcaatgtgcgtgggaggtgggatgggcgctgcggcgttgttcgagttgggctga

SEQ ID NO: 344217 - DNA, 927 bp, Pseudomonas aeruginosa
atgaatacgacattgaaaggtcgcgtggcgatcgtgacaggagcaggaagtggcttgggccgagctcatgccttggcgttggctagttatggcgcgcgggtcgtggtcaacgatttgggtgcagacagggcgggtgcggcagcgcagtcggtggtcaaggagatccaggcacagggtggggtcgcgatggtcgatggtggagacgtcacggatgcgtccgctatgcaggctatggtggagcgtgcatgcgaagcttggggccaggtcgacattctggtgaataacgcagggatcctgcgtgacaagagctttgccaagttgtcgctggaggattttcgccaggtcgtcgaggttcacctgatgggggctgtgaactgcaccaaggcggtgtgggacaagatgcgtgcgcaacggtatgggcgcatcgtcatgacgacttcgtcgtcgggcttgtatggcaacttcggccagtcgaattatggtgcggccaagatggcgttggtcggattgatgcagacgctcggcctggaaggcgaaaagtacgatatccgtgtcaattgtctagcgcccaccgccgccacagcgatgaccgaggggctgatgtccgagaacgcattggctgcgctgcgacccgaggccgtgagcccggggttggtcgcgctggtcggtacgcaagcacctaacagaagtattctgctggcaggtgcggggtgttttgaaagcgcccatatcaccatgacgcagggcgtgttcttagggggggagggtgatcttgcagcagccgtggaggcgagttttgccgatattcaacatcgaactggcgaaaccattccccattcggcatttgctcaggcccaactggagttgagcaaagcaggcatggatatatcggcctcgtcgtttggtcaggcggctacacgttcttga

SEQ ID NO: 344218 - DNA, 768 bp, Pseudomonas aeruginosa
atgaatttcgattctctgtttggtctgaatgggcgtgttgtactggtgaccggtgcctccagcggtattggtctgcatgcagccaggctattcagtgatgcaggggcgacggtggcgttggccgcacgccgactggagcgtactgaagagctggccagcgcattgcgtgcgcaggggcgacgtgccgtagccgttcgcatggacgtaaccgatgccgcgacgatagccccggccttcgacaccatagagcaggagctacaggcgcctgttgatgtgttgttgaacaatgctgggctgatttatgccaaacgctttctcgaccaggagcaggctgacgtcgatcggctgttcgacacgaatttgcgcggtgcgtttcgcgtcgcccaggtggcagcgcggcgcatggcggcacacggccaaggcgtcatcatcaatgtcgcctcgacggcggctttgcgtgctgccggaacgctcagtagctacgccgcatccaaagccgcactgctgcgtttgtccgaggtgatggcactggaactggcgagcaaggggatccgggtcaatacgctgtgcccggggaatatcgagaccgatatgcaagccccgttggcccagttcgaagaggcgttgattgcacgtacgccgatgcggcgctttggcaaggtgcacgacctggatggtgccttgctgttgttggcgtcggatgcggggcgctatatgaccggcgcaatggtcacggtcgatggcggccaggcattgagttggatgtag

SEQ ID NO: 344219 - DNA, 1062 bp, Pseudomonas aeruginosa
atgacgtggcgcgacaatccgttgagaaactggacgttgagccgtgatgcgattcatcacgtcgggcatgacctgcaacggcccgagtgcgtgctcgccgagcccgatggcacattgtgggcggcggacgcacgcggcggcgtgatgcgtgtgggcaccgatggcgcgcagcagttgatcactcaagccgtcagtgggcagtttgcctcggcgaaaaacatcgaggcgagcctgctgcatgggacgttgcccaatggcttggccttcgatgcgaatggcgattttctgatcgccaattttggcaccgacgtgttggagctcatgagccgcgatggccatactcgcacgttgtacgacagcatcgatgggcgccccatcggcaaggtgaacttcgtaacacgggactcgaagaatcgcctgtggatttcggtatcgactcgcgctaacccctggagcgatgcggtctgttctacgttgaacgacggcttcgtggcactggccgatgaacatggcttgcgtatcgtggccgacggctttgcctttaccaacgaggtccgcctggacgcggacgaagcctatctgtacgtggcgcaaaccacggccaaccgtgtcagccgcctgcgcgtgcaaagcgatgggtcgttaagcgggtgcgaaacctacggccccagcgatcttggtccgggcttgatcgacggcatcacattcgatgctttcggcaatctgtggggcgcgatgtgtttgtcggaccggttgatcgccattacgcccgaaggcgatctgctgactttgttcgaagacggtaacccagaggccacacggcgtttccaggcggaattcgacagcgggcgcccggtcagtttcgacactatgagcgcgtgcgtcggcacggtggcgccgtggatggccagcattacgttcagcggcccggacttgcgtacggcctgtatcggcagtttgaaaggtacgaccatcccatgctttaccgcaccggtggccggtttaccgccggttcattggagtgaacggcggggccagcgcaaagtaaggggggcgccatga

SEQ ID NO: 344220 - DNA, 1176 bp, Pseudomonas aeruginosa
atgttcgaatattttcccggaaactatgtgtggaacctatctaccaacatcgcactgggcgtaggcggaaacatcggcgaagtcgaccggatctgccgccagttggtcaaggcggcgcaacgtggggacgacaaaggtaccgatgatttctttcgtgcctggtgcggccaggccgaccagttgtgtgaagcggcaggcgtcgatgagcaagccgggcgccgcttgagcgcaggcgcgaagtatggtcgcgcgtcggtgtactacatgaccgccgagcgtatgcagccccctggctatcctccccgcaaagcggtttaccagaagatgctcgacagcttcgcggattacctggaactgcacgaagaaaagtgcacccgtgtcttggtcccatttcgggataaggaaattgccgggctgtttgtgcctgccgaccggcctgacggttcgccggcgccatgcgtcgtgctaggcaatggcttggatagcaccaaggaaatgatctacggttcgggcattcagcaggcgctggcacaacggggcatcgcaagcatttcagttgatcatcccggagttggcgaggccctgcggctacaggggttgaccgcgctggtcgaatccgaaatatgggcgggcgcagtgatcgactacctggaaacgcgtgcggacgtagacgcctccatgctaggcatctgtgcttggtcgctcggtggctattatgcgcccagagccgccgcgatggaaaaacgcttgaaactgtgcgtggcctggggagcgaacttcgattggggcgaaatgcaaaaacgtcgcctggccagggagggtgatcagccggtgccgcattactggaatcacgtgcagtgggtgtggggttgcaagacccaagacgagttcatggcattttcccctgcggtgacgctggcaccagtgatcgagaagattgaggttccctttttggtgacgcacggctccaacgatcggcagatccctttggagtacgcctacaagcagtatgacggtgcggtgaacagtcccaagcgggaactgaaaattttcatgcccgaagatggcggtgtggaacattgcagtgccgacaacctgacgaatgcacgcgattacatcgcagactggatctcggtcacattccacgagataggcgcccagggagtacgcacatga

SEQ ID NO: 344221 - DNA, 930 bp, Pseudomonas aeruginosa
atggacaaagtcatcatcagttgtgcagtgacgggggccgtgcataccccttcgatgtcccattatttaccgatcacgccagacgaaattgcgaagcaggccatcgatgccgcgaacgccggtgcggcgatcctgcatctgcatgcgcgcgacccgcacaccggccgccccacacccgatccacgcatatttgatcagttcgtgccgcgcattgcggaggctacggatgcagtgatcaatatcactaccggcggcggcgtcggaatgtcgttggatgaacgcctggcctatccgctgcaagccaagcccgagttggcgtcgttgaacatggggtcgatgaacttttcgattcatcccgccgcgcgcaagatcgaggcatggcgccacgattgggaaaagccctggattgaaggtacggaagacaatgtctttcgcaatagcttccgtgacatcaagtatatcctgcaaacactgggcgatggttgcggtacgcgctttgagtgcgagtgctatgacctgggccatctctacaacctggcgtattgcgtcgacgaaaacctaatcaaaccgcccctgtttattcagacctgctacggcattctcggcggcatggggccagatgcggaaaacctgacgatcatgcgtaccacggccgatcgcctgttcgggcgcgaaaactaccgtttttccgtgttgggcgcaggccggcatcaaatgcctttactgacgatgggcgcggtgatgggcggcaatgtgcgtgtgggtctcgaagatagcttgtatttgggacgtggccagatggcggtatcgagcgccgagcaggtcgacaagatccgccgcatcctgcatgaactgtcgctggagatcgcgacgcccgatgaggcgcgcgccatgcttggcctgaaaggccgggattccacccatttttga

SEQ ID NO: 344222 - DNA, 1140 bp, Pseudomonas aeruginosa
atgtcccaaaaagtaacgcgcgtactgatcgttggtggcggtattgggggcctcactgccgcaattgccttgcagcgtcaaggcatcgtggctgaagtcgtggagcgcaaccctgcgtggtcggtctatggcgtgggcatcatccagccgtcgaacgtcctgcgcgccttgcgtgctttgggattgggcgatgcttgcctgactcaaggaaagggatttcagggctggcgtttctgcaacgcccaaggcgaggtgttggcccagatgagcggtgcgaacgtcgcgggtgctgggtatccggcagtcaatggcattacccgcccagctctgcacaagatcctcgtcgatgccacactagcgcaaggtacgcgagtgcgattaggcgagacgttgtccaaatgggaagagcgcactgatggcatacgtgtgttctttagcgacggctcgcaagatcaatatgatctggtgatcggcgcggacggcgcgtattcgcagatacgctgtcagttgttcggtgacgagcacgtgccaaggtacaccggccaagcggtctggcggcacaacttcccccggcctcccgagttggagtggggcatggtgttctacggccaaaaaagcaaggctggtttggtgccgctctcggacaagttgatgtatttgttgttggtcacccctgagcctggtaacccgtaccaacccgtcgagcagcaacacgaaatgctcaaggagcgccttgcagaatacggaggcatcgtgggtagtctgcgcgaccagatcaccgacccaagccaaatcgtctataggcccatcgaaacgctcatgctgcccgtgccatggcacaaagggcgtgtcgttctgttgggcgatgccgcacatgccagtacgccgcacttggcccaaggggcgggtatggcgatcgaagactcggtgctgttggctcagatgttgggtgagggcggcgatcttgacagtgtgttgaccgcgtacgcgcaacgccgtttttcgcgcgctgatctcgtttaccgggtcgggcagcaagaggttgagtgggagttggccgaatgggatggccgcccttcgggtgatcacgaggcgctagtggaacatgcactggcgcaattgatggaacccgccttttaa

SEQ ID NO: 344223 - DNA, 1035 bp, Pseudomonas aeruginosa
atggcgatcatcggtattcagtcattaatctatggcgtggaggatgtcgaggagagtacgcgtttttttgtcgacttcggcttgcctctggtgtgcggcgacgccaatgaggggttgttcaggctcgacgatggcgccgaagtacgaatattggcactgtcggatacgcggctgccccaatccagtctggttggccctggtgtgcgtgaagtggtatggggcgtggacagtggcgtcgcgcttgatgcgttggtggcggatttgcagctcgatcgagatgttcgggtcgaagatggcaccgctcgtttcctgactgatggcggtttgccgatggcgttgcgagtttttgccaagcgcgccgtggtcaatgcgccggaccccgttaacgcacctggtgcggtgcggcggctgaatacgcaccgtaaatggcgccaacgtgcacgacccaagaccatcagtcacgtagtgttcgcgctgccagacttcatccaatgcagcgcgttcttgcgtgatcggctgggttttcgggtgtctgattaccagcatggcgttggtatttatctgcgcgcggacggcagtaacagccatcacagtttcttggcggtgaatgcgagcgcgccgtttcctgacatggacgggcaagcccgcttccatcacgccaacttcgccgtggaagacattgatgagttgatggtgggtgtgaaccacatgggccgtcagggctggccaaagtcggttgtgggcttgggtcgccatcgcgtggactcggcgctgttcgtgtacttgccgtgccctgctggaggcgaggctgaatacggtgccgattctgattgtgtcgatgatacctgggtgccgcgagaatggccggtaccccttttcgcatacgcccattggacacataaccaacccgcttttttaaatccgccgcccgcttgggagttccggtacctggccgatggtcagctacctggcgaagccgtgagtcaatcccaaatcggttcagatagtggcggtgcatcatgtcccaaaaagtaa

SEQ ID NO: 344224 - DNA, 948 bp, Pseudomonas aeruginosa
atgatgtctcgtatgcgattcaataaacttgatcttaatttgctgctcgttctggatgcgttgttgaccgaaggcagtgtaaagaaggccgccgagagagttttcctcagcccgcctgccaccagcaatgcactggcgcgtctacgtgcgtattttgatgacgacttgctgcagcaagtcggcaaaagcatgatccttacgccaaaggccatcgccctgcaaaaacccgtgcgtgacgtgctgttacggattcaagccatcaccacgacgataccggtgttcgagcccaagacgtgcgagcggcacatcaccatcggcgcatccgactatgtcatgcatgtgtttcttgccgaggtgctgcaacacattgtgcgaaaagccccactgatgacattcgacctgcgcctggtcgacgccaagtcacatgccgagctggaaagtggcacggtggatctacttatcgcgcccgaagcgtttactgcgcctgggcactcggtcgaacagctgttcaatgacaactggtcatgcgtgacttgggcaggtaacgacgacttgccctgcaaacttgcgctgaacgattacctctccttgggacacgtgatcgtccgctggaatgatgtcagatttacctcttatgaagagagagtcatcgctcagcatggctacacgcgccgaatagagattaccgcgccgggcttcgccgtattgccgcaatttttgatcggcacacgccgtatagccactctgcaaactcggttggcgcataaacttgcggtgcaagcccctctacgggtgctaacctgcccactgcccatccccggcgtgatcgaacaactgcaatggcgtaagtatcacgaactcgaccctgccatctcctgggtacgcgacgtcatgcatgaagttgctggagggttgactgacgcgaaacgactggcggataagcgctga

SEQ ID NO: 344225 - DNA, 1035 bp, Pseudomonas aeruginosa
gtggatcgcaccttctcatcccaggccgtgggcagcagaccttcgacgtcggcattggcactggacggcatcaggttcgatcttgctgacgagcgcaggctcgatactggcaagcaaggggccaggactcatcagccaagcccttctgaacgcctagcccccacgacattgttctcctgcgattggtgcgccgtgcatcacctcgccgcaggagccatgccgcatcacgtcgaaatgcagcgtcagtcacccaccttactagtgttcgataacggcagccacagcgatggagagcgcctggtgaacggtgctcgagtgggtaccagtggccctttggattacggcgtggatatcgtcccggcacatgcacatttggccggctggtccggcaccacggccagtatcggcgtcagcttcatctttctcgacaatgatgccctggcgaaggtgatcggcgaacaagcaatggtggacggcctgcgctccgacatcaatctgcgcaacgacttactgacgcccttgttggcccgtatacgccgctggcccatggagcagcagctggaaatcgactcgattcaatgcgagaccattttagcgctggtaacgcaagagatcgtgtgtcagcagtaccgtcggcccaatacgcacctcatgccacatggaggcctttcgccacgcgcgcgaaggctcctaaaggaattcgtagccgctaattacgacacgagaatccagctgcagaccttggcggatctcgtaggcatgagccggtttcatttttctcgcgccttcaaggcctccttcggcgtgcctccgcaccggtacctgatcagcgagcgtatgcaggtcgctgccgccaaactgcaaaaaacccaggaccccatcacggagatcgcgatgcaagtagggttttcgtcttccggtgaatttacccgcctgttcaggcagcgaatgggctgcacacccagcgaatttcgcaccacacatcgtatctcggtaaccaccgcgagcattcacactcataaagaacagcggtag

SEQ ID NO: 344226 - DNA, 762 bp, Pseudomonas aeruginosa
atgcatatgacggtggatacctatgtggcccgtgcgagcgagcatgtcgacggccaaggcaacaaaacctcgattaaagttgaaaaccacgtcatcgctccgtaccttttatggtcaaccgattggactgtgctgggagcgcgatacggcgccggtattctacaaccctttgcccagcacaaactcgatacctcgcgcgttggcggcacttccacgagtacccggggcctgttcaataccatactcatgcctgtgattctttcatgggatttggggggaggcctgtttacctctggtgggctggctgtatatgttccaaacggtcacaagcactaccaggatgacaagccaactcaagaaaactacgccaatgactattggaccttggagcccaacgttgccatcagctatttgaaagacggttggaacttcaccgtcaacaacgtctttgacttcaaccgtaccaacaggagcactgactaccagtctggaacggcctactacatggatgtcaccgccgcaaaaacactcgaccgctggacggttggcctgatcgggaactactcaaggcagattgccgacgatcgtcaatatgggcaggtcgttggcaacggcaatcgattcgagcacgttttactcggcccgatgattggctatgacttaggcgacgcgaaccttaagcttcgctacctgcacgatgtgcgcacacgaaacgatctcgccgtttccatgctccatgtttctatttcgttcaagctctaa

SEQ ID NO: 344227 - DNA, 915 bp, Pseudomonas aeruginosa
atgcgcgctatcaccgacattgagattttcatcgaggtcgtgcagcagggcggcttttcagcggcgggccgtaagcttggcttggcaccatccgttgttgctgatcgcgtgtccaacctcgaaaagcgattgggtgtgccgctactgttgcgcagcacacgccgccagtcgttgaccgagattggcgaaaactattttcaggaaggcaggcgcatcgttaacgatctacgcgcgttggagagccatgttatcgatagtgcttcttccatgcgcggcatgcttcgtatcaccgcgccgaatccgctagggcaatgctgggttgccccctttgttgggcaatttgcatctagctatcccgatatcgttcctcatctgacgctagacgatcgcttttctgacatcgttgccgacagcttcgatattgcgattcgaggcggacctgcaatcgattctaacttgatcgggcgacacctgttcgatacacgacgcgttgtcgtggcaagccctgcgtacctcgagcgccaaggtgcgccaagccatcccaacgagcttgccgcacaccgctgcctggtgttcagcacgcaatccaacctttacgcagaatggcgtttcaagcaggctcaggtcgagaaaaaactgcgtgtgacaggcgccctggtcacaacgaatgcggccttgccggtttcttgggcggtggcgggattggggttgacccagaagtcttggtgggaggttgccgatcacattcgggctgggcggttggttaccgtgctcgatgcttttgagtcggagccggctagtttttacgcgattcacccggttagccgtaagcagtcgcgaaaagtcgcactgttcgttgaaggcttacttgcattgttttccacaatagaaagcggaatgccctattctaaatga

SEQ ID NO: 344228 - DNA, 2403 bp, Pseudomonas aeruginosa
atgaacgacgtgccgcttgccccgaaaactggctacctatgggtttggagagtattgtgctggctcttggttgccctcggttcatttaatcttatcgctggatttctcttggcacggttgggtgggagtttcttctatttaatatttggtgctaccttactgatctccagcttcctattgctgcgccgccgcctccttggtcaggcaatttatctatgcttgctgattgcaactgcaatatggactatttgggaatcgcagggggcgttttggtatatattccctcgcatttttattccacttctgttcggggttgtgctttttgcgctagcgccactacatatccccaggaccaaggatcggatgtcgtatgcgttagccattctttttgcctcaatatcggcttatctattcgttaaccttttcatcaatcacggcctgctggggcctgctcaacaaacacaggccgaactaagcaaaattaccaatgagcaatccggggcgtgggatcagtacgctggttctttggagcggcgttcggcggttccgtatacacagatcaataaggggaatgtcggtaacctcaaggtagcttggacatttcataccggggaaatacatactgacggcggattaattatcggggaagatcaaaatacgcccttgcagatagacgacaccgtttttctatgcactccgctggataaagtatttgctcttgatgccgatactggcaagcagaaatggttatacaatgccaagggaaattctccgctctggcagcgctgtcgttcgttggcctatgccgatatcagtcatgatacctttcatccgatttcaaccgtgcagcagcgaggatcggattgtgctcagcgattgttcttaggaacgatcgatgcgcgtttgatcgccctggatgctgccacaggcaagctatgccgggattttggacaatccggcaccgttgatttgacacatggcatgggcgacgttgctccgggcatgtatatgcaaacttctggtccgacggttatcgaaaacggcttagtcgtcatagcggggtggatcatggacaatcactccgtgaatgagccttccggtgtcgtgcgcgctttcgatgcacgtaccggcggtttggtatgggcctgggacctcgccaatcctcagtcaacaggcgaaccgcctgccggccagacctatactcgggggacaccaaacgtgtgggctttcccctcggtggacgaaaagctcaagatgatctatctcccgttaggcaacgcaacccccgattactggggcggctatcgaacgaaaacggacgatgcttacaactcttccgtcgtggcgctcgactatcgcacaggacgtgagcaatggaagtttcagaccgtgcatcacgacatatgggattacgacgttccgacacaccccgtcctatatgatcagcccgacggcaagggcggtacagtgcctgccttgttgcaagcgactaagcgcggtgaaatttttatgcttgatcgtcgcaatgggcatcctcttgccaaagtggaagaaaagcctgtgccgacccatgatgtcgctgcgggtgactacgtttcgcctacccaaccgtattcggtcgatatgccgcagattcgcgcaccacgcctgaccgaacgcgatatgtggggaatgacgtcaatcgaccagctcatgtgtagaatccgcttccgcatgctgcgctacgatggtgactttacgccgcaatcagtgaagggaatcatccagtacccaggcaatttgggcggaatgaactggggcggaatgtcgctcgacaccgagaataaccttctcatcgtcaacgatattcgtatcgccatggaaccccatctgattcctcgttctgaatcggacaaatttaaggcgggtgatggccatttgggttattcgcctgcgttgggcacaccatttggtgttaccaccaattatttcctatcaccactcggtgttccttgcatcgctccaccgtttggcacgctctcggctgtggacttatccacgaagaagattcgctggcaggtgccgcttggtacctcgtatgattcggggccccttggcataaaaaccagattacccatgactatcggcctacccacgcttgggggggctttgactacggcaggcggaatagttttttatagcggaactcaagattactatctacgtgcattcgacgtacacactgggagggaactctggaaagggcgcttacccgtcggtagccaagccacaccaatgtcttatatatcaccgaagacacatcgccaatacatagttcttacagcatcaggggctcgcggccaaccagaccgaggggactatgttattgcctattcgctgaatagtgaggacgacacgccttga

SEQ ID NO: 344229 - DNA, 2346 bp, Pseudomonas aeruginosa
atgggatatctgcagcaggtacatcgcccccgatattcagcgggcctgctggagaatacgcaagcaagtcatccagccaggtcaggtgcatgcacagctgaccgaagcccaggtccggcgggccgcggcatgagcattgttgacgcccgctatgaaaggttgatgccatcactagacctactggccgatgaggcagttctggcacaggcttggaaaaagtctgatgcctacattcgccgacataattggtatgctgacattctggagctggagcaggtttctctgctgctaccgcaaacactaaaacaatggcagcaacagatttccactagcgaccatagggcagcaagccctctgcgcctggtgccagctccaaaaaatggcaagtggtactttccatccaaggctgaagctgaaggcggggactggaaatttaaagccatagtcaagaaaaatggagaagttcaacaagcagagcccgacttgcgtccactagcacatgtcagcattcgtgagcaggttttagcctctgccgtcatgctatgtctcgctgacgctgtcgaaacactgcaaggtaataccgaccccgcgagctaccgcagtaatgcacaagccagacagcgagtttgcagctacggcaatcggctgttctgcgactggactgaagagtctgatggcaagcagcaagcacgttttcgctggggcaattccaccacctattcgcagtttttcgtggactatgagcgcttcttggagcgccccgcagaggcttgtcgcgaagtactacccagcctgcatgacgagcgtctgtttgtggtcaagcttgatctggccaagttttatgattgtgttgaacaatctgcggtggtcgacctattaaagagactttatcagcgttatgcccaagaattcgctatcccttactccgaggacgaagctacaccgttctgggaagcgactgagaagatccttagttggcaatggcaagagagcgattcagatagccgcagtgatctcaagttaggcttacctcagggtttagtggcaagcggcttctttgccaatgcttacatgcatgatttcgaccagttagtcgctgcacgaatacgcaaaaaaactcacatccgtatgaagtccactggtgttcgggttaagctgcttgactattgccgctacgttgatgacatgcgcttagtcgttgcaatctcgaatgaatcagcgcaagacttagcacttgaaacacttgcgaaaagtataagcaactgggctaacaaacttattaaagagtgcttcaagggcgcagacaatggtttggcagtaaaacaagaaaaatctgaagcagtcgcttgggaagacttcgccgttcagggtagtacctcccgctttatgcgaggcgtgaatgggcaaatcagcacagcccccgaccccgcagctttgctgcaagctactggcagcctagatcacttactttggcttgctgacgcactggatgatgccaatgatgtcgatgagaaccccttgtcgctagcccgtatatccctaccgcgagcggacgtgcgggacgatactgtcaaacgctttgcggccaatcgattacgccaagtgctacgcatgcgccgcagcatgagcgatccagagctgcccgccgaggacgtgctgaccaatactgaagtcagtgagcgccaggcacttgatcatgaaatggaaacgattgcccgtaagctgatcgcttgctggtcacgcaaccctgccttggccagcgtgttgcgctgcggcttggacatattcccctcagctaagctcctgcgaccggttctccaggcattgatgttaaagttagagcctgccgtccctaaaactgagcgggaagtcgcattgtttgtgcttgctgatctactcagggccggcgcagtagaaacagggttgcaccgtccagaaagttatccagattcggcggacataactggctatcgtaaggagttactgcaggcagccctacaggcaatcgagaacgaaaaacttccgtggtatctgcatcaacaggctgcactctttctggctgtcatgcagtatccagtacctttgccgctgactagagaactggcttcctacagagcactgcatgacgctttacgccttactccgccaacgaccgcagaagtatccaattcacttacagcagggctgcttgtgatgcgaattaccggccagcgggataagttcattatttggttgggtaattggctgcaaaagctgaagaccaaagatgcccgaaaactgattgatgatatcgcaatgatagatatacgaatccttggagagttacatggtgcatggcgtgagtaa

SEQ ID NO: 344230 - DNA, 1674 bp, Pseudomonas aeruginosa
atggtgcatggcgtgagtaaagggaaggcaggttggctcaaatacctagaacgctacttacctaaagaccatgcacaggacatatctatacgattaaaagactggcccaagggtaggcgttcgttattaaaaatcgtatcccatccagaaaacccattcgttcaagaaaacgcactactcaaactgaccgctgagctgttgaaagctgagcactccgactgccttaatagcgatggcctgggcttggattggctatcaatcgactgtagtgactggaacaagattcagcatccagatacgccactggctttgatcgtcaaagaacctaacacgatagtccccccatggagtaagaccccatcatggtgttcagaggaaatggcttgggcctaccgtttaggacgtcttttgcgctcagccatcatcggcgaaagtgacttcaccactcgttttttcccaatacgagaagagcagtttgatcgttatcgcggcctgcaaagcagctggtataaacgacgcatggggctgatgccgctgagccgcggtttaggtgaggagccaactccaatctcgccatggctcaatgagctggttatgcgtcttttgcagtggcccggcttggagattaacaggacggatattgagagctttgctgattttcgtcagccgtcggacttgctcaaactagtaaaagctcgcttggctgagcagggccgcatatacggcagtcaatctaatcttccagcctacctgttgcctgttgactgctctcccaaatccaacttacgtgagttcaaggtcgcgttggtgcagacgctaatgcctcgggacaacgacttctcaagtggcgacccactgatgtggactgcctcctaccgggctaggcatagagcacacctcgctgccatgtgccgcttgcttggacagcaactggcagcaagccgcttcgcaaagcgtaagacctcagataagcagaaaaaccagctcgatctcatcgtctttccagaacttgctattcatccggatgacatgtggctgcttcatcggctgtcagacagcacgggagccttaatcttcgcggggcaaacatttatcgaacatccctacctgaaaaaacctattaaccgtgcggtatggctgctgcgacaagaaagtgctgccggtaggcagatcatccgtgcatatcagggcaagcagcacggcatcccctgggagctatcttctggtgtggcagggcaccgcccctatcaagtcattgttcagctcaaggatcattcaggtgccgaagccaaactgactggggcagtctgctacgacgcaacggacctcaaactgggcgcagacatgcgcgacatcagtgatggattcgtcatcagcgctttgaatagagacatagggacgtttgacaccatgacaaccgccttgcagttccatatgtatcagccagttatgcttgccaacactggccagtttggaggctcaagtgctcaagccccgttcaagcagcactatgagcggcagattgcccacgtgcatggtaacaaccaggcagtgatcagcatctttgaggtggatctgctggcattccagaacactcgtaaaattgagccgcaaaaagagaaaaaggcagcaccggccggattcaaggggcgcaatttaggggctgtttcgtga

SEQ ID NO: 344231 - DNA, 708 bp, Pseudomonas aeruginosa
gtgagcgaaacctttaatatctactgcgatgaatcctgccatctggagaacgatggccagaaggctatggtgctaggtgcggtctggtgccctgaggccaagcgcctagagatcgcccaacgcctgcgtgagatcaaggtcagacatcggttgtcggcggacttcgagatcaagtggaccaaggtaggggcgactaagctgcagttctacttagactgcattgactatttcttcgatgacgacgacctgcatttccgcgcgctgatcgtggctgacaaggcccgcctcaatcatcagcagtaccggcagagccatgatgactggtactacaaaatgtacttctcgatgctcaagaccatattcgaaccggatgccggatatcacgtttacatcgacatcaaagacaccctggggcatgagaagatcgccaagctccatgaggtgctggcccacaacgcctatgacttctcgcgcaggatgattcgccgggtacaacgcatccactcccatgaagccgagcaactgcagttggcagacttgctaatcggcgcgctgtcctacctacatcgcgggcttaccggcagcgaagccaaacagcgcctgatcgaacgtatccgcgagcgcagccgctataacctgaagcagaacacgttgctgcgtgagtccaaattcaacctattcctctggagcgggagcagcgggctatga

SEQ ID NO: 344232 - DNA, 486 bp, Pseudomonas aeruginosa
atgagcttgccaagatggctgccgcctctggaggaactgaaggcttatggaggcgatttctcacgttacttggaagctatctaccggatcttttgtgccgacttcgttgagtcaaaacctgtgttcgcgggcaaacgtctgggcttgaagcatcacccggttatacagggcaaagaagctaccttctggcacatgatttccgaaggcaacgacgaggcggaacgcctacccgacttgcgacgttgtgagcgcattcgctggccaaggccgattatcgaaaatgctgcggacgccgcgcttaagatctggcgcgaaccgaagggttcaggtcatcgcgtgctgatctggtttgccgaagctgaatacttggtggtcttggacgagcgcgaggactatatcctgccgtggacggcatacccggttgagcgggagcatcagcaaagaaaactggaaaggcgctgggagcggtataacgaggggaattag

SEQ ID NO: 344233 - DNA, 309 bp, Pseudomonas aeruginosa; identical to SEQ ID NO: 327388

SEQ ID NO: 344234 - DNA, 567 bp, Pseudomonas aeruginosa
gtgctacgcagccaggtcaaccagttgttcagccagagttggggctcggccggcagccgcagcatcctgggcatgctgcgcgaagagggcgtgaccatcggccgttaccgggtgcgtcggttgatgcgtgagttgggcctggtcagcaagcagccgggctcgcatgcctacaaacaagctacggttgagcggccagatatcccgaatcggctgaatcgtgagttcgctgtccagcgtcccaatcaggtgtggtgtggcgatatcacctacatctgggcgcaaggccgctggcattacctggccgcggtgctggatctgcacacacggcgggtaatcagctgggcgttctcggccaagccggacgccgagttggtgatcaaggcgctggacatggcctacgaacaacgcggccagccacagcaggtgctgtttcattcagatcagggcgcccagtacgccagtcgtctgttccggcagcgactctggcgctaccggatgcagcagagcatgagccgtcagggaactgttgggacaattcgccaatggagcgcctgttccgcagcctga

SEQ ID NO: 344235 - DNA, 852 bp, Pseudomonas aeruginosa
atggctttcgatccaaaaaaaattccagatgcgttgaaacagtcctatgctgctggacgttgtgccgtattggttggggcgggcgcgtccaagggggcaggccttccgctttggagtgaattgcttaccaagatgattgatgcagctgtggcgcatcgtgtcatcgataacgcccgagaggcggagtatcgagcgctcgttgcacgtccagagaaatttttgatggttgcgtctggccttaaagataatctcagaagtcatttcgacccatttatcgaagagacttttctagctcccaagccgaagccgacaccattgcatcaggcgcttgtttcgttggataagttgcagtttgttgtgacaacaaattatgacactttgttagaaagagcataccggaagcttgatgatgatgtgtctgtatgctcatttaccgacacgggtgaggttcagcgcagactgtcgaggcgggagtttttcatcctcaaagctcatggggatgcgacaaagttggggaataaaataatattaaccgatgccgactatcgtaatttattgtttaaccagcgcgcttatcaaagtctgctttctgcaatgtttacgatgtttacggttgtattcgttggtgcgtctatgactgatccagagatttccttgttgctaagctatatcgcagactcattctctccgggtgcaggcccaacccattatgccttgatggcagaggaagatattacgcaggttgagcgtgatcggtggttgaatgattttaaaattcagttgattactgttagtaaggcagataactatgctgagctgacagagtttctgacagctcttggtgaaagttag

SEQ ID NO: 344236 - DNA, 1032 bp, Pseudomonas aeruginosa
atgaaaattaagcagcatacatggcccattagcgagctggttggcctgcaggaatccattaatttgaatccggtttggcagcgtggtgctgcgtggaaagcgccacgcaaatctctcctaatcgattcaatccttcgcagtatggatattccaaaaatttatttgcgaaagcttcctgaaaatggggctcaccactacgatgcagtagatgggcagcagcgcataagggcaatttgggagtttcgttctggtgagtttgcgcttgagcacccagacgtcctgccgcctattgatggacatgtggttcaagggaaaaaatttaatcagctccctaagatcttaaaagataagtttgacttctttgaggttagtgtcgctgaaattgtttcagcaacaaatgatgagatcactaatctctttgctagattgcaattgggtgtggcgcttaatcccgctgaactgcgcaatgctatgttggggcctgttcgccacatgattgattctattgcgacaggccatgtgttcttctcggcatcaaggattccagatactcgctataagcgacaagattacgttggtcatgtgtttgctatggctgcttatgatgggcagaaaaatatcaaagctcctgatctaaagaagatggtcgcagagtttggtgtcgatagggctgccgaggttctcagtatatcgtcaagagttaatgatgccttgactgtattggcggaggttgatgagtatcttggtcatcgactgacgcagaagtggctatttgttgatcttgcgtggctgataatgcaggagcaagctgctggtattgatgttgatgcagaagaattggcaaataactttagggagtttgagttgctgcggcggcagtacacaagacaaccagagagtctgcttcaggccactaagcaacctcgaacgaacaagctcttgtatgactacatcatggcattccgagcccaaggggccacgcatgcgaatttaaaggtgcgtaacgtttcactgcgcgccttttgcctttga

SEQ ID NO: 344237 - DNA, 297 bp, Pseudomonas aeruginosa
atgagcaagcaacgacgtacgttttccgccgagttcaagcgagaggccgcgcccctggtgttggaccaaggctacagccatatcgacgcctgccgttcgctgggggtggtggattcggccttgcgccgttgggtgaaacagctccagcaggagcgcgacggcgtgaccccgaagagcaaggcgctcgcccgaacagcagaagatccaggagctggaggctcggatcaaccggctggagcgggagaaagcgatcctaaaaaaggctaccgctctcttgatgtcggacaaactcgatag

SEQ ID NO: 344238 - DNA, 126 bp, Pseudomonas aeruginosa; identical to SEQ ID NO: 319740

SEQ ID NO: 344239 - DNA, 702 bp, Pseudomonas aeruginosa
  misc_feature (551)..(551): n is a, c, g, or t
atggacaagcaaaaagtcctcgccaaggtcgagaagctgatggccctggcgaatgccaagggggccacgccgaacgaggcggaaaccgcattgcgccaggccgcgatcctgaagcggcagttcgacctcagcgatgcggagatctcggcccacacggtggaaaccgcgtgcgttcccactcgaaccaggcgctctcctgccccatggctgcatgaactggccgggatctgcgccagttccttcggctgcgactacctggcggcatacgcgatgccagcgggctggacgttcaagttcatgggccgagggatcggccctgagctggccgctcacgcctactctacgctccaccaccaactggtggcggcgcgctcggctcatgtcgcccaacagaagcgctgcaagctgtcgaccaagcgtcgtcgcagcaagctcttcgtcgaaggctggcttctcgcagtgcgttcgctggtacgtgactttgctggcaggccggacgagtcgactcaagcagccatcaaggcctacctcgaactacaccatccggcgtngaagtacctggagccggcggcgcttacgaaggcccttgcctatgaccaggcctcgctgcaagcaggctgggagcacggcaaaaacactcgcctgcaccgcggcgtcagccggcaagttcagggggcgctcgagcagggaggttcccgatga

SEQ ID NO: 344240 - DNA, 378 bp, Pseudomonas aeruginosa; identical to SEQ ID NO: 337891

SEQ ID NO: 344241 - DNA, 333 bp, Pseudomonas aeruginosa
atgccaactaatcgcaccagcacgaccgagcccaccgttatccgccacacctgggagcatgccgaccgcttcggtcgcaagattggactgaacgtcattacctgggaagcgcagtacgaagccaagggcgccgacgatccgtatccgcgctgcggctacagccacgccgcaggctactacttcgtcgcctgctgccagccgtcccgcgacggcgagaactacggcgccagccaggatgaccgccactttgccaccgaggccgagcgcgccgactacatagcccgccgcatgaaggacagccagaaggccgccgcgaagaaagccggcaagtga

SEQ ID NO: 344242 - DNA, 870 bp, Pseudomonas aeruginosa
atggcggctaaatcgttcaagcagatgatcaaggacggcgacctgaagcgcgcggatgcgatgaaggctcgcctcgaagaccttcacgaagaacccggcttcaacctgcgcgccgaaggcgaagacctcgagcagagcatcgcggatctggccgactacctgcatcagggcggcatcgttcctgcgctggaagtgcgaccgcgcgaagaagggggcatgtgggttgtcgacggacaccgccgccggcgcgcttacctcaagctcgacgccgagggccgtctgccgcgtgacccgaacggcgagttctgggtgcccatcgttgcgttcgccgggaacgatgctgagcgcgttcttcgagtgatcaccagtcaggaggggcgcaagctctcccctctggagctcgcacacggctacaagcggctcattgcgttcggatggaccgtcgaacagatcgcccagaagatggggaagacccggcagcacgtcgaccaggtgttggtcgtaggcaacgcgaataccgatgtgcagcagttgatcagctccggcgcggtagcggccaccaccgccgcgcggatcgtcaggaagcacggcgagaaggccggccaggtgctcggccaacagctcgcgaaggtcattgcagcgggtggaaccaaagtaacccccaaggtggtagctgagccggccgtgccccgctccattctcgaagatctactgagggtctctcgggagatcgtcaacgcattcccgacagcccttcgcgctggactggctgaagggccggaagcgatcaccctcaccaccagggcatcccacatcgagcgactgattgaactggtcgcgagtgccgaggaatccctcggcgaacagtag

SEQ ID NO: 344243 - DNA, 909 bp, Pseudomonas aeruginosa
atgtcaggcgcctactacaacgaaatcgacccatatgccgctcagtggctgcgaaacctgatcgccgccggtcacatagcacctggcgacgtcgacgaaagatcgatcgaggatgttcacccagatgacctcaagcactacacacaatgccacttcttcgcaggaatcggcgtctggtcgctcgcccttcgacgcgccggatggccggatgatcgacctgtttggaccggttcctgtccttgccaacctttctcctcggcaggccaaggcgctgggtttgatgacccacgtcatctctggccaagctgggcctggctcatcagggagcgccgacctgcagtcgtgcttggagaacaagttgcgagcaaggctgcagaaccttggatcgacgctgtacaaactggcctggaagacctggactacgccgtcgggtgtgtgccgttcccggctgcgggcgtcggctctccgaacatccgagacaggctctactgggtgggtgagtccgcaagcctccgatgcgcacggcagcggaaaaaaccagaacacagcgagcctgtgcaaacaggtaaaggccttgtccggctggggtacgccgacgcaggacgaggctggcggaacgccagatcaattcctagccagaaaggcggcgttgaacggggcgtgtggggtttctctgacagcattgaaccttcaagtgcaactcgcctgccagggccggttaacggcctgtggcgagatgctgactggatctactgccgggatggtaagtggcggccagttgaacccggcacattcccgttggctgatgggacttcctcccgagtgggacgcctgcgcgcctacggaaacgccatcaatgctgaagcggcgacgcagttcatagccgcatacctcgacgctacctcatag

SEQ ID NO: 344244 - DNA, 642 bp, Pseudomonas aeruginosa
atgaccgacaccccctctgagttaagcgatcagcattactatcttgctggctactcagccgaagacgacccctacgtccaggacaacggcgtccttacgaacctaggcggctttaccgacacagaatctctctccgcattcgagaatgacttggccatggcccgcatgcttgagttgcaggagacccctattctcggtgacttcaacctatcccacctatgcgctatccaccactggatcttccaggacgtttatccatgggcgggtcaaattcgcaaggttgatatcggcaaaaacgacactcgcttcctgacgcacacggccattccagaatcctttgaccaagttcaggagcggatactcaagacagattgcttcgcaagccttcatggtgacctggcagccttctcagccgaggcaggcgctatcctcgggcagatcaacatcattcacgcgttccgcgagggaaatggccgcactcagcgcgaacttcttcagttgctcgccttgcgggccggattcagtctccgatggggaggcgtttctgacatggccatgaagcaagcctgtattgctgcagagtctgaccctgactgtaaagacctgaccagaatcatcagaatcagcgcatataaggtttaa

SEQ ID NO: 344245 - DNA, 534 bp, Pseudomonas aeruginosa
atgacggctaagagcccttctcataaggcaatgggggaactactcaaggccattcgagtgcggaataaactgaccctacaagacatcacaagggatttgaagattgagacaagcgggctctccagggtagaacgagggataggcggctttacccaggaggtactggtaaagctcctagcctactacggtatttctcttccagaagtaatcgcgaaggctgccggaattaccgaggaggacatcctcaatgcccgcgtgaagggacggacgccccaagaggaaaccgctactggtgggccatgctttgagcaagctgccgacggttgggcaaccatcaacccagttttatctgtccggcaatatgctggctcagacatgtacctatgtcgtcgttcgtttgagaacacggagtatgagctgatctacaagggcaaaatcgttggaggcctgtcctcgatggtcgccgccaagcaagcagcgcccaactttgccagaagcgtgatcagcgacgagtgcaagcagatcctcggctag

SEQ ID NO: 344246 - DNA, 639 bp, Pseudomonas aeruginosa
atgtgcagtcactatgaagctccgacgccaacaaggcttctcaatgacttcggtgttacccctactgggccgtttcaagaacaaatctggccaacttccattggggctttcattcgatcccaacctgatgagtccactaacgacaaccatccgccgatcgcggcccttaccggacagttcggtttgttgccgttctgggccaaggacaggaatcttggtcgacacacctacaacgcacgcagcgaaaccgtcgcggataaaccgtcatttcgggctgcctggaaggctggacgccattgtgtcgtccccgctgctgcaatctacgaacctgactggagaagcggaaaggccatcgccacccggatcaccagtgatgatgggagcatattggctattgctggcttgtgggagcactggatgacgcctgaaggtgaaacgttatttagctacaccatgttgacggtgaacgccgacgatcaccagctaatgcgaaacttccacaagcatcaaaatgagaagcgtatgcccgttattctctctaacgacgcaatcaatgactggttaaatgcgacagctctacaaagtagcgaattcatgcgccagtacccttccaatcggctgcaggcctctgcgacctga

SEQ ID NO: 344247 - DNA, 1149 bp, Pseudomonas aeruginosa
atgagcgctacaaacccaaaggacaacaataacgtgccgatcgaggctgccgaaacggatcaggacagtgtgtctggccgtcgcactcggctgatcaagaagctcgatttcgagtcctctcagggttatctgcccttcaccaacgaagagtttttcgagcagtcgaaccctatcgttcggtcagcgcttttttctgttggcaacacgaagggcgtttacgaagagtggacaccgatcttcggcattggagccgggaacattttctaccgcggcccttttctatcggttgaccatgagattgttcttgcgcgcctgatggttctcgccaggggcaaatcgcttaccaagccgatcgctttgtatgtggccgatgtagtgcgttggctgaagctaggcgaatcaggcccaaactttgcgaaggccaagcggatacttgatgacctcggtcgagcacagctcagagtgtcccaccgccctgccctgcgccgtctgtaccagttgcttacagcacctcaagaaggccggcctgatggcaaattcttcaaggactatatcgacaacctgtacggtcctcatctgaagtccttggcatccgccctcgaaaagaaagaagagtacgagatcgatctgcggttcgtgatgaagatgtccaagcacaacatcacgggtcgaatgctggtcaacctagatcctatggcagccgtattctttgacggcgtaaacacgactctagtgccatttgaggtttgggaggagctggatggttacggcaagaaattgttgccgtatatcgcgtctcatcgagacggggtattcccagttaagctcgaaaattacttccggctccagggctccaaatccaagtacgagtcggtacgccggcgtttcaaatcagagctgatcaaacgcctcgaggattgggaaagccgcaagtacattgatgctggctggaaaatttaccgcggcgctgatgaagactgggtgctgggcggcactgtccgggcaggcgaagcaatccgtatcagggcaaatgagactcttcttggggtcctgacggaagacgctttcgatgatgacgttgacggcgttgagtttgccgaagatgtcactactggcgacatgttcaccgaagcagcgcctgaggcttaa

SEQ ID NO: 344248 - DNA, 279 bp, Pseudomonas aeruginosa
atgacctctacgatttcagctacagaattctccctggaccgcgacacccaatacgtaatgacgattggcgacgaaccagagggatgtattttccagggaggcctttatgcatggcctgtcggagcgtgggaacctgatctatcgaaacaggttggccacttcatcaacgacttgctgatcattgacgacagaagagcaggcagagtgtccggaaacaaactggtgatgttcgatggccgagaatacctgctttctgaacgggacctgcaccaagactga

SEQ ID NO: 344249 - DNA, 252 bp, Pseudomonas aeruginosa
atgagctcgatcactgaggatgacaagacagtttgggacacgccatcaggctatgtcctgacgtgcaataaaactctctgcatggaagaaactcaggtgcaggtgttcaccgaagggaagcgttaccgcgttgagtccatgcacccaattgccattcccgcgttcgttaaagtgattgatgaccaaggtgaattacacatgctcgatggaagccatctgcgtgagtggttcaatcgaaagcctaggagctaa

SEQ ID NO: 344250 - DNA, 1371 bp, Pseudomonas aeruginosa
atgagtgggcatgacacgatgggatctatagcgacatccttcccggaactctcgggcagtcagcagcacgaggcctctaactcacggccagtcggcgcacccaatctgaatatcgggccccagccactgttcgacacctttgaagcgttcgagaactcttccgcaagcgagtacgccgctgatcgcccgtcaatcgtcgactacatcaagctctttgagccgaccatcaacgcgcaccaggactaccagtacgttcggtcattcctcacatcctacaatgggcgggaaaccaccttccgtagctacaggacccaggttgaacggcttcttctctggtcctggatcaaatgcgggaagtcagttacgtcactcaagcggaccgatgcagaggcctttatgcagttctgctgccagcctgacccggactggattggtgatgcggttcggcagcgatttctgctcgctgagggcgtctatagccctaaccctcaatggcggccgtttggctctctcagcaaaaaggctacccgcaaggtcgccgccgagaacatggtcgagctcgacacaccccagtatgcaatctcagcaggttcgacgcggcaggtcttcgccatctgctcttcgttctacaagttcctgattgaagaggaagtgcctacagggaacccattcaaagccatcaagcaaaagagcaaatgggtcagcaaggagtcccgcaaggtaacccctaaggtcctgtcgcggctccaatgggactatgtgatcgagaccgccgagctgatggcgaatcaggatccgaagcacgaacgcagcctcttcattctcgccacactgtttgccatgtatctccgggtttccgacatcgtcggtatcgctgactggaagccgaccatgggctccttcgtcaagctgaagggcacctggtggtatgaggtcacaggcaaaggcaacaaagaggctcgcgtaagcgtcaaggatgattacctgaactacctgaagcggtaccgggtatcccgcaacctcactccactgccgtcacctggcgagaccacaccacttcttgtgcacttaaatggaaaggcagggcttactgaccgtcacgttcggaaaatcgtccaggtgattttcgaccaggcgcttgagcgcatgaagagtgagggtcgagacgaagatgagtacaacgaactccgaagcgcctctctacactggctccgccacacaagcgccacctttgatgcaccgtttcgtgagatgaagcatcttcaggccgacttgcgacacgagaacatgtccaccacgcaggacatctactacgaggccttggatgatgagcgtgcagattcaaaccggcggttgaggatcagggactaa

SEQ ID NO: 344251 - DNA, 1026 bp, Pseudomonas aeruginosa
atgtccaaaggcggcgtaaccttcactgaggtgaaaaatgcggtcgagcagctccgcaagcagggaatcaacccctccgtggacaacatcctgaagttcattggtcatggctcaaagaccactattcacaagcaccttaaggccttgctgcgctctgagaggggcttgctaggggagctagggctgatcagtgatgacctggccgggctcgtcattcagctgcacaaccagctgaaggctgaatcccaaaaggtcattgatgtggccgccgaacgaaccgcggccgtaatcgctcatgtgaaagagcagctcaaagatgagatggcgcagaccaaagagctgggcaaggagctgcaatccagagcaactgaactgaccgcagagcgccagcactctaacgacctcagctcaaagctcggtgctgcgcagcaagaaattgcgcgcctggcacagcagctaacagatctgcagggcacgtttgaagatgccaaacgccacattgggaagctcgaccacgatctgaaaaccgcccatgagaacaaccggcactttcaggatgccgcggctacccagatcaaacagattcgcacagagcactccaccgaggtttctaagctccaggccgaaaagcacgacagagaggcgacaattgccgagcttcgtacttcgacagttgaactcaaccggcagaactcagaactcatagcccgactcagcagcgagcaagcgtccacccgcagacttgagaatcaatcttccaagctccagtcagaaatcgatcaactgcgaagggatctgagcgcctctgaaatcgaacgcgcaacagctgcagccaaaatcgagatgctgaccagccaagtccagcacaaccaggaagaattgaagtcactcaacgcggctctagttgaaagccagcgcgggcaggcgcaacaagaaattcagaactccaccctccgaactgaactggccgctctgcaggctattgcggccgcaggggctgacacgcctgatcggactgaatcatga

SEQ ID NO: 344252 - DNA, 678 bp, Pseudomonas aeruginosa
atgagcaacccctaccctattcaaaccctcaatcactcttacctgggcagtggcatctacgagttgctgcgcgaggcactgatcaccgggcgtttccagcccgatgaccgcctgcgcatccgcgacctggccgaacaactgggcaccagcgtcacaccggtgcgcgacgcgatcctgcaactggccaaggaacaggcgctgatcctcaagaccccgcgtgacatccgcgtacccatcctcaccgccgcgcaatacggcgagatccgcagcatccgcctggcgcttgaaggcctggctgcggagacggccgccgcgctggtgaccgacagcgaactcgcagacctgcaagcctgcatcgaaaacaacatcgccgcgatcaacgcccaggacttgcaagccgctctcaagtgcaatcagcaatttcactacgcgctgaccaccatcgcgcgcatgccggtgctggcgggtttgctcgatagcctgtggatgcgcaccggcccactgatcgcccgtgcctatggcaacttcaacgagcgcatggccatcgaccatcactgggaagtgctcgacgcactcaagcgccgcgatggcgcggcggcacgggcggccatctgccgtgacattctcgatggcaacgagaagatgctcgagtacatcgagatggcgcaggcggactga

SEQ ID NO: 344253 - DNA, 855 bp, Pseudomonas aeruginosa
gtgagcatgccgatagagcgaacagttgcggtcctttctaggcacctcgtcatggtcccgatcgagcttttgaacaacaccattcggatcgtccaaggcgctggcgaactgcttgctgcggaatggcggcgtccatctggtccccgtgggtgcggggacaaggcggacgtcgacggagagattgaagtcctgctgcgagcagagcttctagcgattctggactgtgatttctggggagaggaaacgggctcgaggttgactggtgcagactgctgttgggtggttgatcccaacgacggtactgctgactttctccgtggtcgaaaggggacagcgctttcggtcggcctgttgctgaatgcacaacctgttttgggcgtggtttatgcgccggtcaccaacgatcgaggtccagactgtatcgcctggtgcgaagggctgggcggcatctatagaaatggccaactcctaacgagctccatcagccatcgtcagctggaagccggcagcaaggtgctggtgagtacaggagctttggcgaagccgaagatcaatgaagtgctatgcgctcccgcagagtacaaaccgatgcccagtatcgcgtatcgcctcgctacagcggccgcaggagatggcgttgcggccgtctcgattgttccagtgtccgctcatgacgtggtggctggtcacgcaattctcagaggcgctggcggtgttctggtcgaccaggctggggaacacatcacctacgaaagtgaggcgatgttctcgaaagtgtcgactcgttgtttcggtggagcaccgcaggtgtgtgctgctctggtggctagagattggggcagggttttcgcctag

SEQ ID NO: 344254 - DNA, 435 bp, Pseudomonas aeruginosa
atgtgtggaggcgtagaagcccgcgaggcggacaaggtctggaaaatctactttcccaatcccaaggcagccttacccgtcatgtttccagatggaggccagatcgattggatccactgggggcgccgcagggaggagatcggcggcagtccacctggtggctgggcaaaactcgaatcgatccacacgggagtctggaagaagcaccacccccagcgagccctagccatggtgcagcggttcatggagaaagaaggccacgtgggcgacaagcatcggccctcacattggttcgatgtgccggaggggtacgccttggagtgcctggtgatcggagaagaggatcagcgacgtgtatacgtagtgaccacagaaccaccagaagagtacgcctgggtacatgatcgatggccgagcatagtgtctataacataa

SEQ ID NO: 344255 - DNA, 210 bp, Pseudomonas aeruginosa
atgggatatctgactctctctcgccgcgaaggcgagatgattcgccttaccatcgaccctggcgtcgataccgagaaactcctcaagcagctgctgcgcgatgggatcaccgtgcatatcggtgctatccagcgccacggtcgagcgcggatcagtatcgaggcacccaagcagatgaccatccttcgcgatgagttgatagacgcctga

SEQ ID NO: 344256 - DNA, 822 bp, Pseudomonas aeruginosa
atgccactgggtgccggccttggtttgaaggccgagcactacgacgccgcccgggactgcagcgcagccgggctgtggtttgaggtccacccagagaactacatggttggcggtgctcgcctggcccacctggaagcggtgggcgaacggcatccgctgtcgctgcacggggtctccctgtccctggcggcggacgccgcccccgacccgacgcacctccagcgcctgcgcaggctggcagaccacgtgcgaccggcgctggtatccgaacacctcgcctggtccacctggcgcaatcactattacccggacctgttgccattcccgcgcagccacgaggccctggtacgcatcgcagacaacatacagcgtacccaggatgccctggggcgcagcattgccatcgaaaatcccagccattacctgcacctggacggccacgactgggatgaaatcgactttctcaccgagctgacgcagcgcactggttgcgccctgctgctcgacatcaacaacgtgcacgtcagcgcgcacaacatcgattttgatccggccgcctacatcgatcgcttcccgggccaggccgtcgcggagattcatctggcggggcacagccatgacgccggcggtgcgttgctcatcgactcccacgacgccccggtcgctgacccggtctgggccctgtatcagcgcttgatccagcgcatcggcccgcgcccgacgctgatcgagcgcgatgacaacgtacccgcgttcacggcattgctcggcgaacgcgcgcacgcccaggccatgctcgaccgactgggagcgacgcaatga

SEQ ID NO: 344257 - DNA, 756 bp, Pseudomonas aeruginosa
atgatcagacgtctcgaacacttccaggacgccttcatcgaggccttgcaggtacgtgccgccccggaactgtccgccctcaccgcgcaacccggctttcaggtgtaccgcaataccgtactcaagggctgcgtcgaggcgctgtgtgacaacttccccagcgtcgaacgcctggtcggccgtgactggctgcgcgcggcggcggtcgttcatgccaacgcctgcgcaccaagcgatgcccgcctgatcttctacggggcggactttcccgcgtttctcgcggccttcgagccggcccgggagctgccctacctgggcccggtggcccaactcgactacctgtggatagaggccttctgtgccgtgcaggagcccgcgctggaacttgccagcctggccggcgtgtcgcccgaggcactggcaacctgtcacctgcgcccgcgcgccagcgcacgctggcggtggttcgacgagcaaccgatctacagcctctggcgctgcaaccgcgaaggggtggacctgcctgacaacctgccctggcagggcgaaggcgctttgctggtgggccattgcgatggcgtcacctggcacgcgctcgaacccgctggctgcgtgtttctggacgcctgcgctgccggacacgatctggagcgggcctcggccctggccttgcagcggcaaggcgacctggactttaccgacctgctcagccgcttgctgggtgcccgcgtgttctctccccttgttcttgcatga

SEQ ID NO: 344258 - DNA, 474 bp, Pseudomonas aeruginosa
atggatatcacccagccgtcgtccaacaacagccgcgccacagtgcgtcaacgctgggaccaggtgtgcgacctgcttcagcgcctgatcagcgactcgacgctcagcctggtggcgcgcatcagcgttgcggcgatcttctttctctcggggcgcaccaaggtcgaggggctgttgaccatcacccccggtacctatgagctgtttcgtagcgaatacgccctgccgctgctgtcaccgcacctggccgcccacctggcgacctatgccgagcatgtgtttccgctgctgctgatcgtcggcctgttctcgcgcctgtctgccctggcgctgctgggcatgactgcggtcatccaggtattcgtctaccccgatgcctggccaacgcacctgtcctgggccggattgctgctggtcatcatcggccggggcgccggggcgtggtcgctggacaggctgctgcgcattcgctga

SEQ ID NO: 344259 - DNA, 708 bp, Pseudomonas aeruginosa
atgatcgagctctactactggccaacacccaacggccacaagatcaccctgtttctggaagaggccggcctggactaccgcatccacccggtggatatcagcgcgggcgaccagttcaagcccgatttcctcgcgttctcgccgaacaaccgcatgcccgccatcatcgacactgcgccggccgatggcggggaagcagtgacggtgttcgaatccggcgccatcctgctgtacctggcggaaaaaaccgggttgttcctgcccaccgacctgcgtggccgcaagacggtgacggaatggctgttctggcaaatgggcgggcttgggccgatggccgggcagaaccatcatttcgggatctatgcaccggaaaagatcccctacgcgatcaaccgctacgtcaacgaaaccaaccgcctctatggcgtgctggatcgtcgcctggcggacagcaccttcgttgccggcgagcagtacagcattgccgacatggcgtgctacccctggatcgtgccgtggaagaaccagcagcagaacctcgacgacttcccccatgtgcgccgctggttcgaggccatcgcccagcgcccggccacggtcagggcctacgccaggggtgagccgttctccagccgcccgacggtgaccgaggcgggcaagaagatcctcttcgggcagacggcgggcaatgtaccggccgggcaatga

SEQ ID NO: 344260 - DNA, 615 bp, Pseudomonas aeruginosa
atggctcggccaagagagttcgatgagagggcggtgctcgatgcagccgttcaatgtttctgggcccgtggctatgaggccacttcggtgcgtgacctggcccagggcatggggctgaccagtgccagcctgtacaacgcttttggcgacaagcgctcgctgtatcgccgtgcgctggaccattacgtcgaagagggttttgccgaccgggtgcggcgattcgaaggcgtcctgccgccgcgccaggccatcgaggcgttcttcgacgagatactcgaacgctcgctcaacgacccccagcacaagggttgcatgctggtgaattccgcccttgaggcctcaccggacgaccccgacttccagcgcgccgtggctgctgtcctgatacagatcgaggcctttttccggcgctgcgtgctggccggccagcacagcggcgccattacctgcgcgcagccggcggacgatctggcgcgcctgctgctgggcattctcctgggcgttcgcgtcctggcccgaacgcggccggagcgtgaactgctcgaaggcatggtacggccagcgctgaccctgcttgacagtcacttgaaccttcacggggaccaccaacgatga

SEQ ID NO: 344261 - DNA, 699 bp, Pseudomonas aeruginosa
atgattcatttctactaccaccccacgcccaacccggccaaggtcgccctgtttctggaagaaaccgggctgccctaccagctggttcctctcgataccggcaagggcgaacagcacaccgcgcagttccgggccatcaaccccaatggcaaggtcccggccatcgtcgacagcgaaggccccggtggccgcgaggcacgggtgttcgattcgaccgccatcctgctctacctcggcgaaaagaccgggcagctcatgggcgcgccgaccgacaaacccgaactgctgtcgtggctgatgttcatcgccacgggtatcgggccgttctccggccaggccgtgcacttccagtatgccgcgccggagagcatcccctatgcaatcaaccgttaccggcgcgaagccgaacggcactaccaggtgctggatgagcacctcgccgggcgcgactacatcgtgggcgacagctacaccctggcggacatctcagcctggggctggatcgaccgtgcctcgcgcgtgctcaagggcgaaagcgacccgctggccgcctaccccaacatccagcgctggttccaggccatcgatgcgcgcccggcggcggcccgtgcccgtgaagtgggcaaggaccacgccttcaagaaagacctcgacgagcagatgcgccgcgcgctgttcccctccaactacccggcgtaa

SEQ ID NO: 344262 - DNA, 675 bp, Pseudomonas aeruginosa
atgcaacccattgaaggcatcgtttttgatctctacggcacgttgtacgacgtgcactccgtcgtccaggcctgcgaaagcgcctacccgggccagggtgaggccatctcccgcctgtggcgacagaagcagctcgaatacacctggctgagcagcctcatgggccgctatgccagcttcgagcaacgaaccgaagaagccctgcgctacacctgcaagcacctggggctcgccacggatgaaaccactctgcggcagctcggccaggcctacctgcacctggctccccacccggacacgaccgcggccttgcggcggctgaaagcaagcggcctgcccatggccatcgcctccaacggctcgcaccactccatcgagcaggtcgtcagccactcggacatgggctgggcattcgaccacctgatcagtgtcgaaacggtcaaggtgttcaagccggacaaccgcgtctacagcctggccgaacaaaccatggccatccccagggacaggctgctgttcgtctcgtccaacagttgggatgcgaccggcgcccggcacttcggctttccggtgtgctgggtcaatcgtcagggggccgtgttcgatgaattgggcgccaccccgacccgtgaagtacgtgacctgggcgagatgagcgactggctgctcgattga

SEQ ID NO: 344263 - DNA, 747 bp, Pseudomonas aeruginosa
atgcagcacaacgaattcgacaatcgcctggctgtggtcaccggtgccagctcgggcatcggttacgcgttgacgaccggcctgctccaggccggggccagggtgttggccatgagccgtcaccagggtgagctgggggctttgcaggaacactacggagaacgactgacctggcttgaaggcgacatcagccgcgccgacgacctcgccaggctggcccggtatgcgcacaccctgggcccgatacactacctggcccccaatgccgggatcgcccagttggccgatggcctggatgccgcagccttcgagcggcaatgggccgtcaatggcgcgggcgcgctcaataccctggccagcctgaaagcccacctggcccgcccagcctcggtcgtgttcaccggcacctttctctcgcaggcaacctttcccggcctcgccgcctacattgcctccaaggcggccctgaaagcctttgcgcgcaacctggccgtcgagctggcagccgacgacatccgggtcaacatggtatcgccagggcccacggcaacaccgatctggggcaccctgcaactcagcgacgacgcgctggcggcggtggccaagacagtggaacagcgtttgttgaatggggcatttctcgaacccgccatgatcgccgacgccatgctgcacctgctgtcgctgggcgcacggggcatccacgggcaggacctgatcgtcgacaacggctacaccctgcgctga

SEQ ID NO: 344264 - DNA, 1641 bp, Pseudomonas aeruginosa
atgggaaagacctgcattaatgatgatgctgcgaagatggatgaactaattgcagggcgcaagtacgatgaaattagtgcctatatagagctgctagtttgtcgcatgtacgataactctgagctgcgggcgtacaatcattatattgtcggaaacggctatgctgtacttgcggatagacttaattccccttgggatgaaaaaacggggcttcaagttaattttttcaaaaaagcacagtatgagccagggttctctgcacttgatgatgacgtgaagagccgggtatatacaaatctagctagcgctctttatggtcagggtcgataccttgaggctgtagtggaatatgatagagcaatagctactttcaacaaccctatggcctttttttgcaaagggcaggctcttatggagttttcgcgtggcttatatgatgaaggtcactgcatgtacttccagaaagaagcttacccaatattaaaatacgtttatgagtgcaaggacgatttgttcgatgaaggacatttggcagttgtgaatgctgcccagcatttgcagggctttgtccggcattttgatgacaatttctccgagatatgtgaaagctttcctcatctgtctaccctagaggggtttgtcggaagatcgcagaaagagcgtttgtataagcagtggtgtttagagaatcgccttttcattaacgacttgaatgatatttctaacgagccggttgtggcccaagatgtgatgggtcttcccagtgttacttattcgatcaaccccctaattggcgtatccgaaagtttgtggttaagcggaggcttctctgaaattaagcaccagtatgcgcatgccagatttactttttttgaggcaattgaaagcaagtacgctaaaagagaggtttcgcattatgcgagcaatgatctttttctgacaaactctttggactattgcttgtatcggcgcgatatcgagcagattaagatttgctttagattgctgtactcttgctttgataagcttgcagttcttctctttaaatacttggagcctaattccgccgctagagtatatttttccaatgtctggtatgtgcgtgataaggacgttaagggcagatttctagaatcagaaaatccctttcttttggccttgtactggttgtccagagaaataaatgacaacgaagccgaagggcatgatcattggatggacccaaatgccggtaagttggcggatataagaaataaaattgagcacggcggattcagggttgttattgatgatctctatacaatctctaagtcttttgagcttgagcgtgaagacaaaaatcgtgcggaaattctagatcgcatagaagagaatagaagactgctcaagagcggagttccaaaggcagagcaaaaagcaataaaacttaaaatagccgctgatctagaactaattgaggggaaggaaaatttaagaggatatcctcttgtaatcacagacaaagagctgcgagaacaaacattgaggcttatgaaaaaagtacggtatgcaataatttatacgtcacttgcgattcactatgaagaagagaagcgggacaagtccggaatttccataccgtacgaaatccctatttattga

SEQ ID NO: 344265 - DNA, 276 bp, Pseudomonas aeruginosa
atgactacccttggaactaccctgctcgctgagtgggaactcgccctgctgcaaatgcaggtggatattattgccctcgccgccagtcacctggaggaaggaacccgagacgcagaagtcgcccaagaaatcgccgaccgggcgcaggtgttcgacatgatagccaccaacggtcatatgccgctcagccctgctgcacgaagcttgatgcaccaggcctactacgatgctgcaaagctactgcatgacgcctacggagaggcggttgaggtctag

SEQ ID NO: 344266 - DNA, 261 bp, Pseudomonas aeruginosa
atgaccaccattgagcgagtttcccctcaaagaccctacgttgcgtcctggcgggcattgggcggccatcagatgttcgtcggggcttttgaaagtgccagctgcggcatagtgctgctggccaccgacaaggacagcgaggcggctggcttcgagacgcccgagcagtgcgctgcggcgatgctggcccacgggttcaagaccgactcaactacctggctggacataggcccatttcaggggcagctcgccctgttctga

SEQ ID NO: 344267 - DNA, 495 bp, Pseudomonas aeruginosa
atgtccccgctgcacttctccctcattttttcaggcaccgtttcccctgacggcggcgatgctgaggcggaaaatatcgccctgactccggtcgagctgctggccaacctggagcaagccgtgaacaccatcaccggaaacggcctggtgactggcgattcgccggccactctcgacgagcattcccattgcgtgcgtgtcaccagcggtaagctcgacatgatggccatgccggttatctcgattgcccacctcgacagcgatacagctcaagcgctcaccgccagcgccagcgccggccagtgcaagtgggctaccgtcgcctgctatccagaggggtttttcatcggtttcttcgacgaaggccacgatgccgagatgcccgagtccgcccgagccatccaccagtggctcaaaggtcaaaacctaaatcgctgggtacgcctggattgcgattgggataccgtcgacggcctgcctgcgtatgtgtggtga

SEQ ID NO: 344268 - DNA, 222 bp, Pseudomonas aeruginosa
atgaccgacaaaaacacttcgcactctgaacgggccaagaccttcaatcacgccttcaccatcgccttcgaggtcggcggctcaaccacagaagacggcgcggacgtgacggccgagcagatggccgcagccttgagcaagcggatagccgatctgctggccaacggcgaaatgcttgaagccgtgggcggtcccaacgatacctaccgcgaggacgtgtaa

SEQ ID NO: 344269 - DNA, 258 bp, Pseudomonas aeruginosa
atgagcagcaccccctttctgcgcatcagcgccaccctgcttgaccagcaagcaccgcatacgccgcatgctggcctcgatctggacgagcaggaaacccaggccctcaccctgctgctgaaccgcattggccatgcccaggttcagccgctggcaggcgatcagcttgaggcgcacctgatggttgccgccttggacaagctgcgcacagcactgcaccgcgcctacgatgccgagtttccgctcccggtagcctag

SEQ ID NO: 344270 - DNA, 441 bp, Pseudomonas aeruginosa
atggacaaccgtacagtcaagcacctgatgcgcaacccgctggcgatggccaactacagggccaccggcaaagcgccgcagttccgcaccccctccagccccctcatcaccctgctgcaatcactgtacccccgtgagcgcgcccagatcaccgctgtgcgcgtcaacgagcagctgggctaccaaggcgggcggcagttccataatgccgcgcaagccctcaactggctgctgccggccaatccaggaacgcacattcctagcgagtcgtggcagaacaagcgcttccagaaggcgctgaccattgatgaccttgcccagtgcgctcgggtaccggatctggtagctgatgaatggtggcggcgtcacccgcagctggccagcttgcgccagtccacgcaaacaacttccagtccgcaggctctggagggctcccagtga

SEQ ID NO: 344271 - DNA, 309 bp, Pseudomonas aeruginosa
atgggggatgtgactatcctgcgtagcagcatctatcatatcgtcgagaaacgactggatgcccgtgagcgctacgttagattggctttagatacgctcacagggccgctggaggtctggaaagtggccttcacagacggcactgaccggctggctttcattggtgtgtatgagtcaaagcggcagatgctagtaagcgttgtgttcttcgagggccagatgctctggaactttatgcacacggacgccaaatcgctcaacaagcatcgtcatggcgagttgctgtacaagcgctacacgcttttgtga

SEQ ID NO: 344272 - DNA, 252 bp, Pseudomonas aeruginosa
atgtcacttgctcgtaaagcctcaatcctcgctccagccctcattgcctgggtcttctttgccctcggcggaatccaggccgttacggtctgggcaggggtcggggttatgatccctgatgagtttatgatgctggctggaggtctcgcagggacggccggtatgttcatcctgggtcttttggcctgggtgttctggggggtgctgggtctgttgctcggattgctggcagaagggagcgatcgggcatga

SEQ ID NO: 344273 - DNA, 447 bp, Pseudomonas aeruginosa
atgaagtacaacacattccaggtgaagcgccgcgaggttagcgtcaatgagcgcaaggcagcggccttccgccgcaagcagcaacgcgaggcgcaggctctgcccctcttcagcgaacagatccgcgagcagcaacacagctgggacaccgagctggagcgccgacaagctcaagatgatctcactgtggggcgtatgcgctcattcgaggcgcagatgtggcgcaaagcccgcgccatgtacttcgccctgccccttgagctgcgaggcccctgcaaagccgaatgggaggcctggcgtggccctcacaacccgttcaacctgatctatgtggtgcagaagcacaacggcgttggcgcggcccgcgaggaaaagatggccgcagagcgccgggcaagcaatgcgcgaattgccgcgatggtgagcgcgcagccctgtttggtctga

SEQ ID NO: 344274 - DNA, 732 bp, Pseudomonas aeruginosa
atggcagacgacaagctgaagtggcgggtaacccccgagcaaattctggagactatgcgctacttcagcgctgccgaactgcgcacccagcagtccaagctatcgggtgcagctacccagctggaaaagctgctggggggccggctgagccacctactgaccccagacgaggctgaaattatccgtcaggctgctgacctggttcgccagctcaatacccgtgttgagcacgctaaggagataaagaatcgggaggaaaaacgtaaggagaaggcccggcagcttcaccaggttgccatcgataaggccttggacaaaacgctaccggccatttcgcgggacgccaccgacatcggcgctcgaatcctctccatgactgagctgctgctggcacttcacgcagaaaagatgaccctcactttcatgagcaaggatgagctggtggcggaccttcggcgcaaggtcgacagatacacagcccgcagtgaatcgctttgggaggttgcggactatatctaccgtgatctgaggagcggcctggacgccaaccttggttgggagcgggaccacccgccgcaggagcgactgtctgccatgctcgatcttgcccggcagcgaatagacggtatccgcaagtcacatgctgaatttttcgcctacctgcaggcccaggtggcaatcgaagaatcgacaaacgtcgagaggttgccggttaggccaaagcgtcagtga

SEQ ID NO: 344275 - DNA, 318 bp, Pseudomonas aeruginosa
gtgattacgaccaatgcccgcaccaaagacctcgaagacgtaggcctgctgctccactcgatcctgcgctacgcagaagccaatgccgagcgcttggatcgctcgattatctctatcggctacagcaccctgctgagcaacgccgatcaagcagcctgctggctggcagagcttcacgttgataccggcccagactgggacggctgtgtctggctggaacgcctggaggacatcagcgagggcagcttggcgcagatgctctacgccgaagatgtggacgtagaaagcgccgtgattcgctggctctcgcgccgttga

SEQ ID NO: 344276 - DNA, 312 bp, Pseudomonas aeruginosa
atgagcgaacacaccaccatgcaatttggcaccctagagctgcgcaggactgaggagggctggcagtacctgagtgagggcgtcggtcacgagcctgacgcttggaacgatgccgccagcgtcctaggccctttcggcggttctggcgtcaacgatctgcttgatgagctggcagctgtaaaggtcagtgccgctgcgcgggagcaggagctggtagaggttctgaagcacattcgaggcaagagtaactgttgcgatgcctgggatgatatcgacgaagttgttccctacaaccacgctctttacagctga

SEQ ID NO: 344277 - DNA, 1737 bp, Pseudomonas aeruginosa
atgcacacccaaccccacgacttcagccatgacgcccaacacatcatcgcgggcgatgtcctcgatcagttctacgccccggtccagtttgatgctctgaccctgctggccagcgagcatatccgcctgcgcgagcgcatcatcgaagtccacggcatcattacccaagaaaacgtcagtggcgtgatgggcttcttcttcaagggcaacggcagcgacaaatacggtcacaacgcctctctgcggcacctcaactccttcaccgaaatcttcaacctagaaggcgcgctcaatgagctgacggcgaacttctgggaccgcgcgctgcgccagaccgacctaatggagtacatgccccaggctcgccgctcgcaatggactgaaatccttaacgcctggcgtgagcatgggtaccagcgaggaaagaaccctgagatggacatgccagagttcaacctcgataacctgcgcgccacggtgcaagggctcctggctcgccgtgctgagttcctggctgagcgggtcgatgggatttttcgaggcctgtccaagcagcacgtcaccaatgtgccggaaggcttttctaagcgcatgatcatgagcggagtcttcaatgagtggggcagcactgaccacgagagggagggcgtggtacacgatcttcgcttggtaatcgccaagttcatgggccgcgatgatccgtcccgagcctctaccggccagctgctgaaaacagcccgcgcctcgcgtggcgaatggctggaagctgatggcggggccttccgcgtccgcgcctaccaggtcggtaccgcccatctcgaagtgcatcctgacatggcctatcgcctcaacagcgtgctggcctacctccacccggccgccatcccggagagcttccgcaagcgcccggcaaaggtaaaagccaacggcaaaacattcgcatcaaagcccttgttcgagcgcccattctccaacgcggtaggcgctgttctggcgaccctttcccagtacaacaaaatcgtcaaatccgagagcttccgccgcgactacgaccatatcccagtgcgtaacgccgtagcggttcccttctacgagcgcgaccgcagcaagcacctgatagctgaggtcgataccgtcatgcaggctttggggggcgtgctgaccaactgcacggtcaatcagcgaagccagtattggcagttcgattttgatgccctggatcttatccacgaggtcgccgcactcgggtacatccccgatcacaagagccaccagttctaccccaccccggtgaccgttgccgagcgcctgattgactggctcgatatcggcttgcttgatacctgctgtgagcctcaagccggtcagggtgggattgctgacctgatgcccaaggatcgcacccgctgcatcgaaatcagcccgctgcattgcgacatcctgcgccgcaaaggccacaacgtcatcgagggcgattttctcacctggaattcaggcaagttctccgtcatcgccatgaacccgccttactccgaaggccgttggcaggcccatctgcagcacgccagcactctgctggaggacggtggccgcatcggcgctgttctgcccatgagcgcccgccgtcatgccgttgatctgctgccggcctttgatctggagttcagcgagcctatcgaaaacgcattctcgggcacctcaatcagcgtgctgttgctcaaggccaccaagcgctga

SEQ ID NO: 344278 - DNA, 405 bp, Pseudomonas aeruginosa
atgacccctcaagacatcctcgctatgccggccgatgcctacatgaacgactgccagaagaattttttccgccaggttttgctggataagcagggctctgcgatggagtccactgctcaagcgcgtgaaacactggccaacctgggtaacgcgcctgatcccgcagacctggccaacattgaagaagatcggcagaacctgacccgcaccctggatcgtctgcacggccagatcctagagatccgacgcgccctcaaagccattgatgatggcgactatggctggtgtgaaaccactggcgaggaaatcggcctgcgccgtctgctggcccagcccaccgcgcgatactcagctatcgcccagaacatgaacgaaagcatctcccggcactacgctgcagcctga

SEQ ID NO: 344279 - DNA, 807 bp, Pseudomonas aeruginosa
atgcttatcccgacacatcagggcacgcctgctgatgcagcagagcaccaccgcccagcttacctctcaaacaaccttctattcgcatgctacggccccaaccaggtggggcgggatttcgtcgtgggcgatatccacggtgagttctccctcctgcgtagcctgctgacaaaggtcgggttcgacgagaaaaccgacaggctcttttctgtcggtgacctggtggatcgaggcccggagtcccctgctgcgattcgttggatgaggtacccgtggttcatcccggtacgcggcaaccacgaccactggtgtattgaaggcgggttgatcgacgagcctgcaggccatcgacggcacggtggcgcatggttctacgagcttcccaaggcagtgcagccgctcatggcaacccttctcaaccagatgcccgtagccatcgaggtcgaaggccgcgatggtgagcgattcggcatcgtgcatggtgaatgcactcatcactcctggtcccggtttcgtgaggcgctggagggcgagctgggcgactcctaccgcaaccaccacatcatggaggcaatctggcggcgatcccgcctcgaagaccgtgatacaacccctgtagctggcatcgacaaggtgttagtcggtcactctgttgtcgaggaagtaaccacgctgggcaatgtcgtgtacctggacactggcggctgctttaagggcggacggctaactttgttcgagcttgggggggctggagagattatttctgtaccaaacatcagcgccacttctgagcaactggacatataa

SEQ ID NO: 344280 - DNA, 399 bp, Pseudomonas aeruginosa
gtggataacgccatttatcacgtcaccctcagtgagaacgtggccaagattctagagcttggtctgataccgcaaatcggcaccctggccagcgcctgtgctgaggtcgaaaaccggacgtttttcttcccatcggttgctgcgctcgaagatgccctttccgggtggatgggaaatgagcttgaagaagctgacgccctttcagtgctgctaatcgactcgttcggtctggagctgaaacaagaccttgattacgagctgtactccacgaatccaataccgccgtccagaatcacagtcattgttgacccaacactgcctggcttcgctgcccccggttttgagcaactggcgtatatcgcaatgaccgaaggcgttctgccggggcagcaggcatga

SEQ ID NO: 344281 - DNA, 1188 bp, Pseudomonas aeruginosa
atgagcaaactaacccctcgttttgtaaaagacatcgagcagcccggcacctaccaggacggccgggggcttttcctcaaggtcacatcgaccggctccaagagctggattttccgctacagcattctcggccgacgccgcgacatgggggttggcacctacccggatgtgtcactgagggacgcgcgacttcaagcggacaagtctcgcctcgaactggcccaaggcattgatccgctcgcacggcgtgacgaggcaaaggctgcagaggctcacgcacgtcgccgtagagtggacttcaaggccgaggctgagcagtacgtccgcacacattcgccatcctggagcgacaagcactccaaacagtggcgcaacagtctggcgaagcatgtctaccctgcccttggcgcgttgcccatcgaccagatcgacaccaaccaggttgtggatgtcctcacacccatctgggccaagatccccgtcaccgcttcccgacttcgcaaccgtatcgagctgatcctcgacgcggcaaaagcacgcggcagccgcacgggggataacccagcacgctggcggggccacctggacaagctcctacccaagcagaagcacaaagcccgcccctccccggcaatgccagcagaaagtatccgtggactgatgcacaagctggacagcctggactcccccgcagcacgcgcaacagagctgctgatcctcaccgcctgccggagcacagaagtctgccgggctgagtgggttgaattcgacttcaaggctcgtatctggaccatcccagccgcgcggatgaaggctggccgtgagcaccgtgtacctctgaccgaggccatgatccaggtgctcaagcagcaggagggtaagcacgcccggtatgtgttcctcaacaagtggcgcactgggccattaccaggtaacgccatcggccgcgtgctctacgagctgcaggccggcgaggtagtgccccacggcttccgttcgagcttccggacatgggcggccgactacgccaactatccgcgagaggtatgcgagatggccctggcccacaccttggagagcaaagttgaagcggcatacaaccgtgccgatctgctggagaagcgtcgccagttgatggccgactgggccgatttcatccaggctagcggtgtggccagagcggcctga

SEQ ID NO: 344282 - DNA, 735 bp, Pseudomonas aeruginosa
atgctcaggattgcaaagcaaagcgttcacctgctagatgggactgtcgtcgctgccgaagtccttgctcggcttcagatcggcaacagtgagttatcaccagttgcgttcatgagcggttgctcgccagagtcctggtacgcactcgatatcgaggttttgcggctggttgcatcctgcgaggagttgcgtcaagcgactgtccccacgttcgtcaacgtctccccagcaaccctgcagaacgatcactacttcactgcattctgtgctgagattgcggggatcgtcgaccagatgaaggcaaggctcgtcattgagatcccagaagcgagcaacctctccggacatgagttgagccgcaagctgcatgagatcgaattctcaggcgcacaagtcgctattgatgatttcgggaccaagttcgccgatcaagccaggctgtccctgcacccgtggaacttctgcaagattgatctggcagcatttcaggagcaggaaaacctcaactggttggatgcggcgataaactacgcacgcaatcatgacatccagctcatcatggaaaagctagaatgcctgacccacatcgaagtgatgaccccagttaagaattccgcctggtatcagggctacgtcttctcgcgccctctcctcgtctcgacgcccaacgcggtattcggccttccgcgtacgccattgcagcgccgcgatgttgccattgctcagcgggcataa

SEQ ID NO: 344283 - DNA, 744 bp, Pseudomonas aeruginosa
atgtcagagtcaaccgcaggccagcttacgctgcgcgatatcaacgccaagctgcagggcgctgggttggatattcttcgccctgagcagatcaagtccatcggtgcgtacaccacccgtgaaaggttcgtgcaggcccttgaggtggtaccggccaataccagcgccgttcagttcctgcgaaacatcatcacgcgcgtaacagcacccaaccaagaaagtgctgcagatgagtcagcatcggtgcgtgaggtacaggacgagaccgccaagccgatccagggccagcgtccacaggacagggcctctttccatgtctacggcggtaaggcggcactgtgctttgaggctgacctcacccgcaacgaagtgcataccatcgcgctcgatgctgcgaccgcgaccggccccaagcagtacaactgggggaaaaaagttcgccttcaactgacccgcagcgagcttcccatcgtcaccgctgtgctgctgggcgtgatgaagcggtgcgagttcaagaatcacggccaggacaacagcaagggcttctcgatggagcggcaggacggcggcaaggtcttcatcaaagtgtttgccaaggacgaaggcgtcaaagctgttccggttgaggcccctgacgtgttctttgtaacctcgctatttctgcgccagttgcaggccaacaccccttggatggatgcagccggcgttgctgcgctgatccgcgctacgcaaggggcatcatga

SEQ ID NO: 344284 - DNA, 357 bp, Pseudomonas aeruginosa
atgtcgcttttgaatcaataccgcgaaaccgagctggccttggccgaactgcaagatcgactgaaaaagctcagctcggatgatcgactgaaggccgaaatcgagttcgagaataagttgcgcgcgctgatggctgagtatggaaaatcgctcccgaacgtgatcgctattcttgacccgcaaagcgtcaagaacgctgtggcagagcctgcgaaacgccgtgagcgccaggttaaggtctacaagaaccccaataacggggaggttgttgaaaccaagggcggcaacaacaaagtcctgaaagcatggaaagctgaacacggtgctgctgttgtagatggttggttgcaagcgtaa

SEQ ID NO: 344285 - DNA, 555 bp, Pseudomonas aeruginosa
atgcagcacaacatgaataaaagtgaactggcactcgacctcacccaagatcgtggccatgaaactactaacgattctgacggttcgcccttggtcgaaaccaacacggaatttgtagcattacaaggcggcaagccctcttcgggcagcaaccctccggcagggaagggtgccgaggttgccgtggctcaagatgataaagccaagaagcaacctgagtcgttcgctgtgctgcagtcggggaaggcagcagtaaagctgtatgaaagcctcatcggtttcgacaagaatgcagagacccagcgagcgaccctccgcgagctgctgaacaagcagtccaaagtaatggaaaacaagatgctcggtatcaagccagccgagggtgaagacttcgacagcatctcgaagcggctgcgcaaagaaaacaaccggatggatgcgatgctcgatggaaaagactccctggtgacatccacgcgcaaggctattgatgcagccattgaagcgctgaaccaaatgcaaacacgaatcattaaaatggaggaggaggcttag

SEQ ID NO: 344286 - DNA, 915 bp, Pseudomonas aeruginosa
atgtccacacagcagctcgaataccacgaactgtcatccctattccctctcattaccggcgacgactttgctctgatggctaaagacatcgaggcaaacggtcagctagagcccattattctgtacagcggcaagattcttgatggacgcaatcgctatcgggcttgtagagagctagatatagagccgcagacaactgtatacacgggcgatgatccgctcggcctcgtgctcagtcttaacatgcaccgccgacagttgacagttgcccagcgcgcgatagtcgcagccgaaatgattcgccgtaagagagagattgagaccggggaaccgggcgcagaagaagatgccggccgaaccgacactccactccctggtgtcgaagatgcggctaaagccctcggcatcagcccgcgatctgtatctgcagcgctgcgtgtgttcaaggatggaaccgaggagttatgcgaggcggttaaacgcggcgatattcgcgtctcagcagcagagcaagtgacgaagctcgaccaggatcagcaacgcgctctttgtgagcgtggcccgcgcgcgatagcaaaggctgcacgagagttacgagaggcagccaagaacaaagcgaagccatcggtacccactgctgaggtcgtcaaagagccggagcctttgaatctggtcgaaccagagaagcccgcccagataaacaccccaatagagcccctggaacgcaagccgtcagcccaacggatgttcgagctttctgaggaagggatgatggggggctgggacgcggaatctgtagcagaagaaatcctatgcgatctggaagacgggctcgacactcaagcactgctatttgctgttgaggtggcgctcaagctcaaagaacgcttggcgcttcgtcagcaccgccgataa

SEQ ID NO: 344287 - DNA, 975 bp, Pseudomonas aeruginosa
atgccaaaagaaagccggagattgggagtagatcggccaacaacaccgcaggtatttcagggtgttgttgcccctgctgaatttcccaaggccaagctcgatgtttcgctcgactccatcctagagcagcaaactcgccatgctcatgattatgcgcttgctgctgagcagcctgctgttgctggcaactctgaattcatggatgtgccggtcgacctgatcgacccctctcctttccagccgcgtctggatatcaccgatgacgaacttcaattgctggcgaattcgatatcggtggctcgtcgtgtcaaccggccgatttctctgcgcatcaagcctaacggccgatacgagctgattggaggcgaacgtcgctggcgctccgtgaaactccttggctgggaaacgatcatttcgcggattctcgatgtcgatgatgccgaggctcaagtcctcgcactcgccgataacgaagggcaagaagggcttacagacttcgagcgcggtcgtgcctacaaacagatcctggatcgcggtgaggttacatctattcgccacctggcgagccgtgttggtgtaagccaccagtcagttatgcggtgcttaaacctcactaagctgccgcaagattgtcttgaatatctgactctgcaccctcgccttctcggcagcaccctcgcctctgaatacgcagcagccggtgagaaacacccagaccttgtacttgaggctctacacaagatcgatcaggaaggcatatcccaagaacagggcttgcgctggattaaccaggtactcaaggatcgagagaagccaattctgcctagtgcttcacaagagaagtccattaaatttgctggcggcctggagggttcacttgttgtcagtaagtctggtatccggatcaaggtcccaaagggtgttgatatggagaaagtcgagcgtgcgattcttgatgcgttaatgaccgaatag

SEQ ID NO: 344288 - DNA, 975 bp, Pseudomonas aeruginosa
atggaagttcgtcggatgaacaggggctcagttcctgctcgtgtctacaccccggccgacctcttcaagatcgcctcgattcgacgcagcaaggggctgacgaaaaccctccagcgacccctgaccatatcgaccttcgttcagaaaggcggtaccgctaagaccacgacttctgtgaaccttgccatgtaccttgggttcatggggctcaaggttctactgatcgacaacgatcctcagggtgatgcaacgtcgatgcttggctacgatccggacctgactccagaggagctggtggatctgggtattccggctgaccgcgcggtgaatggaagcctcggcaacatcatagccacctcgtccctgttcgccccgaaggggttggccgatatcatcaagaaaccctttggtgaatacggcccacatctgctgcccgccgaaggccttttggaggacatggaggttgccatcaacgcctcagccaatcaggatttccgctacgcactgttcatcagcaaagggcgtaagcgtgagctcccgcaagcagacctcagtggctatgacgtcattctgttcgacaatgccccaagcggctcgctgatgacccgcaacagcatggtcgcaagtgacatgatcctctgccctatccggatggataaattctcctgccgtgccctcgcccgcctgggcaataagctgcagagttttgctgaggagtaccagcgctcccctgatgtcgctgctatccccactatgttcatcaagaacaggcctcgtgcaatggctcacctagcggctctttcccagatgttccctggcaaggtaaccgaggggaaactttacttctccgaggactactcgaaggcccttgaatcaggccttcctgtactgggttggaagggtgcgtcagaaaattctgccggtgcaatgcgcagtgttttcggggagatcctggagcgccttgttcagatgtga

SEQ ID NO: 344289 - DNA, 480 bp, Pseudomonas aeruginosa
atggaccagaaaaaaaccatcaatttggccaaccacaaattcaccagcccgctggcaactcggcgactcgtaataggtgaatcctggctcgaagacgctaagcgcaaccttgcactgactagctcgtttggcatgtcgttcacgaatggtccgatcttccaagtacctcggatgatggttgaccttcctggagtgttgaccgctgaagtagcgttcaaccgcttcaacatgctcgatgtcttggtcgctaaggttcaggaagaggcctacttggaaatcgttaaccagatgatggcaacgcttgagccccacgacagagtccaacctgatggcattacgttcgacctgggcggtctccagatttgtgctgaaccacaggggtatggtcgatctccgtgcctgacctacatgacatcctcgttcgccatagctcgtgcaaaagcccgacacgacgatcaggtcagcgaaagcgtggcctga

SEQ ID NO: 344290 - DNA, 327 bp, Pseudomonas aeruginosa
atgaacacctttcgccaaccgacccaagaccacatatgcagcatcgtcgacatggcccgcagaggcgagctgctgcagctgcacaggatcaacctcaccggagctgatgaagatgattccgagacgatgcgaacagagatcatcgcatcagcgatatcagcagcaggcaaccttggattccccattttcgtcgttgagtaccacgacgatgacgacatagccattaaccacctgctcaacctgttcgaggcaatgcggtcgagcggcaaagcaactactgaccaggtggcgaactggagacggcagttgatcgtggcagtcaaatag

SEQ ID NO: 344291 - DNA, 843 bp, Pseudomonas aeruginosa
atggacgcgccagaaattactgaaacagagtcgagcgttaaggtcaccaagcacaacgacctggtgtccgcatcgtatcgcctcactctggccgagcaacgcctgatcctagctgctattgctcaaatcgacccccgaaaacctatgcctaaggccagttcggtgatggctgtcgattacgcccacatctacggcatcacgccaggccaggcctacgagcagatgcaggacgcggccaaaatgctgttcaactccaagatcacctcgatccgtggatcaggtaagaacatggggattcgagaaatccgctgggttcaggagtgcgaatacgtaaaaggcgagggcagggtagagctggtgttttccgatagcgttaggccctacctttctcgacttcatagccatgtgacaagttacgacttgtggcgtgttgcacgcctggattcggctcacagcttccggctgttcgagatgcttatgcagttcaagagcacgggttgggtctacatgcgcctagacgaattgcgagagcgtttagccctgggcgagtcttaccagcgcttcaacaacctgcggcagcgcgtaattgaccctgcagtcgaagagcttcggcaaaaggccggcttgaacgtcaacgtggactttatcaaggaaggcaaagcggtcacggccctgcggctgaccttcacagatgccgatgacctgcagctcctgcgcaatgacggttggccaaagagcctgcaggatgctttggaagatgcgatggctgaggaggatctggaggaggaagccagctcggccgagtaccaggatgagccacgcactcaggatctgttcggataa

SEQ ID NO: 344292 - DNA, 1254 bp, Pseudomonas aeruginosa
atggaaaagcgatacaccatccaaatcaagtaccaggatcaaacgaagaaaccgtatacggctgactttcagaccaagcctgaattcgctaaaggatggaaatcagtgctcgaaacggcgcacgcgggcgctgacatcacctgcatgtgcttcggccgtggcgataaaaaactctctgtgcggcacctcggcggcgcagatagttactttctggcccgataccccaactccggcccgcagcacgcgaatgactgtatctattatgcgccggacccatcgaagtccgggctgcagggttacgcagaaggggtcgtgaccgagattgaggacggcggcctgcgtgttcggctgggcattggactgaggaaaaaagatccgctcgaatcagccgcggctactgcgcaggtttcgagcgggtccagcacgcgccggccggcgatgactcttctcggtctgctacacctgctgtggtctgaggccaggctcaacacctggtacccgcgcatggagggcaagcgccggctaggtcttgttcatgccaagctccaagagacagctgcctcaattctcgccagtggggcaaggcttagcgatttcctcttggtggctgcgactgaacgtgacaaggcgaaggccgaagcgaacgaggccaagacagctgaagcgattcggttggaaagacgcctggttgtcatcgccccattagccaagcacaccaaggaagcggaaggtggcataggtcgactgaaaatatccggcttcgccggcatcccggtgttgacgctgagtaaggccctctgggcaggagcatgcaggagcttcccagtggaaattgccgcctggaaagccggtggccgggtaatagcaatcgcgataaccgacacgcctggggcgggtaaagccaacgtcatgcggctggccctgatggccgtgagcgagcggtggattccagttgcatcttcctttgaggccgacatcgagcagctgctgagcgatgaaggccgtagctattggaagccacttcgattcgatgcgtcggaggatgaggtattccctgatttctggttgctcgataccggcgagcgcgagacgccaatggaggttttcggccggagcgatccagcctacctgcagcgcaaaaacaacaagattcggcactacaacagggagtttggagcgactggctggtggtcgtgggatgcagctgcagatcccaaggggatcagcatgccggcgttgcctaagcgcgcttag

SEQ ID NO: 344293 - DNA, 258 bp, Pseudomonas aeruginosa
atgctgattgcggtgctggagtggacagggagtatttgcggggttctgggagcgttgctcatcgctagcaacacccgcctctccccttggggttggtggttgttcctggtgtcgagcgtcagtctgtgcggatacgcggtcctgcaaagtgcatggggactgctgctgctcaactcgtgctttgtcggcaccaacctgatggggcttatccgctggtgggcacctgcagtgctaggggctcgccagccgcaatcgtga

SEQ ID NO: 344294 - DNA, 282 bp, Pseudomonas aeruginosa
atgaagctgcacgcaactgcaattcttttcgcgtccgtcattctcgccggctgtaacccgcacgataccgagctaaccggtaaggcctgcctcggcgcgaaccacgacacccttgtcgaaaccctcaatgacagttgcaaggctggtgacacggtggcaaccaaacacccaccctacttctgcgacttcacctattccgtcgcctacaacgatttcaactcagcgatgtgcgtctacaacggcaagcagcgtgatgagcgcatcgcggccccggccaagtga

SEQ ID NO: 344295 - DNA, 261 bp, Pseudomonas aeruginosa
atgcccaatcccgacatgacccttatccccaacaagcacttcatcggcgaaggagctcacccctggctcatcgccggccgggtgcctggggatagcaccgattccgttcgactcatactggccgacagcgagcagcaagcgcgcgaggttttccgcgagaatatcctgaagcaggccgatctgaacgagcaggacatcatcgacacagctgagtcctatggctcggacatgatctattccatgaccctcaagttggcataa

SEQ ID NO: 344296 - DNA, 2058 bp, Pseudomonas aeruginosa; identical to SEQ ID NO: 334758

SEQ ID NO: 344297 - DNA, 1032 bp, Pseudomonas aeruginosa; identical to SEQ ID NO: 332723

SEQ ID NO: 344298 - DNA, 666 bp, Pseudomonas aeruginosa
atgaaaggctcgctctcaacggataccgtacgctgggcaggccaggcctggatagggcccgtcatcggcatctttcatggccgtgccggccaccaggagtggcaccaccatcaggcgcatcagatttcagtgggcctcgattcacctgtatcggttgaaaccccgttgggcattcaaacaggggctgccatcttcatcgccgcgggcctgaaacaccggatcagtgctggtcgagtgctgtcgatctatctggatgcactatccgatgaagccccaactatgcggggtaccgaagaagcaagggtagtcgtgatcgccccggcggacgtagtagcgattatcgatatgctgcgcgagacaggacataccgctctccaggttaggacgggggtgcgccaggcactgcggctacccgatccaccgattccagatcctcgcttgacaaaggtgattgaagcgctgcatagaggccaaatgaggcgcgaagaaatggccgcgttggtgcatttatcccctacacggttttcccattggttcgtggaacagacaggcttgccgctgcgcagctatgcgaaatggttacgtctcacacaagccctacagcacctagccaaagggggtctacttgttggcgctgatggaaaattgacccaccctgccgattga

SEQ ID NO: 344299 - DNA, 510 bp, Pseudomonas aeruginosa
atgaggtcgtctcctagatcacctcttgttgctcctgggttctggtggatgctatcgctagccattgcctcggccgacctagcgttgaaaagcgcaattacgggttcgctcccggtcggcaccgtgattcctctcaccccgttcttcaacctggttcacttctggaataccggtgcagcgttcagcttcctggctgacgcgggtggttggcagcgttacttcttcattgtcatagctttggtcgtttcgatcgtgctggctctgatattgcgtaaacgcagagccaaaagcgaagccctaggctatagccttatcttgggcggggcagttgggaatctgattgatcgcgcatttcgaggccatgtaatcgactacctggatttttactggctgtcctggcattggcctgcgtttaacctggcggatattgctatcgtcggtggcgccgccatgttgatcctgagcagtttgctaagcccaaatgcggaagccggccgagtcaacgaatga

SEQ ID NO: 344300 - DNA, 894 bp, Pseudomonas aeruginosa
atgacttcttgtgataaatcctgtggctgtggccctgagccggcaaccactgaagcggcaaccgcgccttcgaatgaagggacttgggtcagcagtttttctgtgccgaagatggattgcccttcagaagagcgcatgattcggctcgcgctcaatggctttcctgagctcaattcgttgtcctttgatctgagcagcagacaggtacgcgctttccatgacggtccggttgaccagatcgcgaccaagctggaatcacttggtttaggggcaacgctgctgggcactcaaccggccagtcaggaagcagcttcggccaatagcgccagtgaagagctgactgcttccaaggaggccagcacgctcaaaatcctgctcggtatcaatgccgcgatgtttgtcatcgagatgggcgcaggcttgatcgcccagtcgacgggcctaatcgccgactcgctggacatgtttgctgatgctgccgtctatggcctggctctctttgcggtcggtcgggctgcgcggctgcaggttcgcgctgcgcacctggcgggtttcttccagatcgttttggctctgggggtactggtggaagtggctagacgctttctctacggcagcgagcctgagtcgatgttgatgatggggattggcttaatcgcactagttgccaacgtcagctgtctcttgatgatctatggccaccgcgaaggtggtgcacacatgaaagcgagttggattttttcagccaacgatgtgctcgcgaacactggtgttatcgtagccggcgcgctggtcgcgtggacaggttctccctaccctgacttggtaattggtacggtcgttggcctcatcgtgctgaacggtgcacgccgaatcttggcattgaaagcctga

SEQ ID NO: 344301 - DNA, 261 bp, Pseudomonas aeruginosa
atggctggattggacggcaaaatcgccgaagggcatgccgcccagagtcgcgatgctgcttatgccgtctatgtgaagctcgcgtcgcttcgtgaacagctcccagcccagcctgatgtcagtaaaatcctcacagaagtcggggtggagaaggccttggagcaagccagccagaaggcctggcgactctatgaggccttttacctcgaagtgcagtatgacttggaatgggcgagcagccgcagctacgaagacgcttag

SEQ ID NO: 344302 - DNA, 519 bp, Pseudomonas aeruginosa
atgcagcatcgaactaccagatggttgtctgccgtttttatcgctttggcgatggcaccctgcttcgctgcgacgaacacaccccccaaagtatttggctgggtggaggaaggactgattcagccggaaaacatctccgtaaaaatcaaattggatacgggggccttgacctcatcgatggatgcgaaggacctggaaaggtttgaaaaggacggcgagaaatgggtccgcttcaacgtggaagtcaaagacagtgagaccggcaagatggccaattcatcatttgagcgcagggtcattcgcaatgtgaaggtgcgtggtgcgggcggcgctgagaaaaggccagttgtagtcatgcaaatgtgcatcgggtcacgtatttatagtgaggagttttcgctcaaggatcgaggcaagatgaattatccagtccttatcggccgccgcacactggcgcgtatcggtgcggttgatgcctcccagacattcaccatggagccgcgatgtggcaaatcatga

SEQ ID NO: 344303 - DNA, 645 bp, Pseudomonas aeruginosa
atgacactacttgagactgccaatgagggggccgccgaacctgtccgtttgactacaccgctaggccaggccattggtaatctgttcgcccgggccttgccgctactggatggcaacccaccaggctcgctcaaggtcttcgtcttcggcggctgcgcggtgcacctgctcacccatgcgcgtggtagtgcggacatcgatgcggagatcgaggctgcccgcgtgctgcgcaaggacgagatcatggccatctacacaccgccagagggttatgaggacagagacggccgcgacttgcaggtttatctggatcagaactacaccaatgccctcgggccactgcacgaggactaccgcgagcgcgccatccccatggagggtttcgagggtgagcagccgctgcatatcttcgttgccgccggcgtggatctagcaatatccaaactcggccgctttacggaaaacgatcaatttgatatccaacagctcatcgaatgtggccgtgtcgatgtcggccagtttgttacactggcaacagaggcaatcgattatgccgtgggcaaccgaagcgcaatgctaggctgcctgaagctggtcacagcgaagtacctggaggatgggcgagatgccacgtctggatcgtaa

SEQ ID NO: 344304 - DNA, 480 bp, Pseudomonas aeruginosa
atgccacgtctggatcgtaaacaaagctttggcgcgctcctggagactgtcacccagcagcgccttagccaagttgcgtccgatgctcttgtggagctcgccaaacagttgtggtacgaagagcgcgacctcgtgccggtactgcagcgtgaagtggcgggcaagctgcgcaagcctgaacagaagctgcgagccctctatctggtcgacctgctgcgtcgctttccctgtgtatcaacggaaaaagccgcgcgcctaaaaggctttgtcagcagctggtcgaacctgaaaccggctgaacgctcgccgcgggcgacccagttagtctctcgctacaagctcgacaagctagcctatgagtgggggttggaggaggacgtcagcaagcagatgcaggatgtcctggctttccaaacccgccattacgccgccactcagggcgtgaagacgggctattcagagccggtgcctgtcggctag

SEQ ID NO: 344305 - DNA, 726 bp, Pseudomonas aeruginosa
atggctgtagcgattgggcgcgaatcctattccgactgccgattgccgcgccgcagttcgttgatcagtgtcaggattgttgctaggtttctgacatatttcaaaaaccagccatccatgaaatccctttccgcggcaatcatcgaacacagcaggcttcttcctgaaggaggcatccttgcaccaaacgaattccttcacttggctgaccgtgcttcggtggaccaagcattctctcgattagccaagggcggggagttaatgcggatttcacgcggcctctatgtggcgccggtcaccgggcgcttcggcaaacgcgcgccggcgacggagaaggttatcagtgcgatagcttcgaaaagccatcaggtaatcgcgttaagcggtgcccgcgcagcgaaccttctagggctaacgcaacaggtgtcgattagggaggtatttgttaccggcggacggccgagaaccctgcagctaggcaaggctcaggtgagaatcgagcatgcgccgcattggcaaatcgccctcggaacaaccattgctggcgacgctgtacgtgcgcttgcctggctggggaaaccccacgccccagaggcagtcgccaagctgcgcacgtgcctgtcgagtaacgattggcagattttgatatcgcatagatcaaaccttcctcaatggatggctgaagcgattgggcgcgaagcagtctttgctgagcagggcttctga

SEQ ID NO: 344306 - DNA, 909 bp, Pseudomonas aeruginosa
atggattttttacgcaccccagatcgacacttcgaaaaccttcccggctacgcattcgagcccaactacctgatggtggatgacagcgaaggcggtgagttacgcatgcattatttggatcaaggtccagccgctggcgcagtggttttattgctgcacggtgagccatcgtggagctacttgtaccgcacaatgatccccacactagttgctgcaggccatcgcgttattgccccagacctcatcggttttggtcgctcagacaaacccagtaaacgtaccgactacacctatcagcgccacgttgactgggcgcaatcgctgctcgaccagctaaaactgagtgacgtgaccttggtttgccaagactggggcggcttgattggcttgcgtttagtcgcagaaaacccagccctatttgctcgcgtggttgccgccaacaccatgctcccaaccggtgatcacaacccaggggaggccttcaaaagctggcagcaatactcacaacaagtaccagagttccccactggagcgatcatcaaccgcgccaccaccacagagctatcgcaagcggtgctagacgcctacgacgcgcccttccctgacgaaagctacaaagaaggtgcacggcaatttcccttgttggtgcccaccacgcctaacgaccctgccgccgataaaaaccgcgcagcatgggcagtactgatgaagtggaacaaaccctttttgaccgcgttcagtgattcagacccgatcaccaaaggcggcgacaaggtgctgcaaaagctgataccgggcacacacggccaagcgcataccaccatcgtcaatggcgggcactttctgcaagaggatcagggcgaaaagctggcagaggttgtggtgatgtttatcgcggcgaacccttga

SEQ ID NO: 344307 - DNA, 3435 bp, Pseudomonas aeruginosa
atgaaaatcctcagcctgcgcctcaaaaatctgaactcactcaagggcgagtggaagattgatttcactgccgagccatttaaagacaacgggttgttcgcgattaccgggcccaccggcgcgggtaaaaccacgttgcttgatgctatttgcctggccttgtatcaccgcacgccacgtatgagtacggtgtctgcggggagcaatgaattgatgacgcggcacacggctgagtgcttggccgaggttgagtttgaagttaaaggtgtggcgtaccgagcgttttggagccagcgccgcgcccgcgacaaagctgatggggcactgcaggcgcccaaggttgagttggcattgatggccgacggcaaaatcgttactgacaaaatcaacgaaaaactgcgtgaaaccgagcgcctgaccgggctggattttgagcgtttcactaagtcgatgttgctcgctcaaggcggcttcgcggcatttcttgaggccaatgcgaatcagcgtgcagagttgcttgaagaactgaccggcactgatatttacgggcaaatttctcagcgggtgtttgagcaaactcgtgaggtaaaaactgcgctagatcacctgcgcgctaaagctgaaggggttgagctgttaagtgacgagcagcgtgagcaacttaacgctgagcatgctcaagtcagcgtggatgagcagcgtttggcggctgagcaaagcggcctgaatgcacagacgctgtggcgcgatgccaaagccaaggcgcagacgcaattgcagcaagcgcaggagcaagcgagtcaggcacaacaagcgcttaatcaggctcagccgcaattgcacaagctggcggccagtgagccggccacacaattgcagccgctgtaccgcgagcaactgcgcatcagtcatcagttgcaagccagccaagctcaagagcagcagttgcgtgagcagcacatggctgcgctggagcaaatctgtcagcaggcgtggcaaggtcaacaagtcagtcagcaaacattgcaggcagaacgtgcgactacagaggatttgcagcagcgcgctgatgctgttgcgcagcagctcgtcactcagccgcagcgggcgcagttaggtgcgcatctggccgcgtggcaagagcagttcgactccttggcggtgagcgagcaagagcaagccgctgagcgtgagaagcaacaacaactggatgaccaactggctcagctagcagctgagttaccccagcagcaaacggttttgcacgcagcgacgactcagcttaaacaagctgagctggcggcaaacaccgcgcgcgcggagttggatggattgtttggcggccataatgacgcagccttacgtgagcaaactcagcaattaaccgagcgtgggcgtcagctggagcgtttggcaatgctgctgactcagcgtcagcagtttgttgatcagcaggctcaagcgcaggcgcaactgatagctcagcaagccgagcaagcgcagttaaatcagcagcgtgaggcgctgcgcagtcagtttgtcgaccttaaacagcagatcgccgacaaacaaaagctgcttgagcaagagcaacgtattcaacagttagaacaataccgcgccgccctacaagccgatgaggcctgtccgctgtgtggctcgcatgagcacccggcgattgccgagtatcaagcgcttaacccgtcgcaaactgtgcaagccttgcaggccaaacagcttgagcaagatgcggtgcgggcacaaggcgagacgctgaacaagcgcctggctgtggtggaaacacaaatagcccaggctcaagcgcaagttagtgctgcacgacaggggttggctgaggcggatcagcgctggcagcaagcctgtgaatcgctcgggcaggcaattgcggatgccagcgcattgcaggccgcacaacacgaccacgagcagcacatgcagcagcaacagttgcgcatgagccagctcgaccaactcaagttagtcgcccagcaagccgccgatggggtgatgacggctgagcttgagcacagtaaatgcagcgctcaattggatacgctgaccagtaaacagagccatgtgcaacagcgtcaccacgacagtattagccaactgcagttgctcaccagcaagcatgccgaacgcttggaacgcctcagtagctgtttgcaggtgctgggtttgaacatgcctgtagcgcctgccgattggctgcgtgaacaacagcaagcatggcaaggctggcaggctgaacaggcgttaagcctgagtttggctacgcagttgcaagcgcaaacgcatgcactgcaacaggcgcacgagcacgcacaaacctggcagcagcactggcttgagcaagcgcaagagccgttagcggagttgccggcggttgataacccgcatgagcaattacaagcattgcagcgtagttggcaggcttcgcaacagcagcgtgatcagctgtgggggcaactgcaaacggtgcaagtgcgtatcgagcacgagcagcgtgagttagccgcgcaaaataacgactggcagaacgctttggcggctagccagtttgccgatgaggcgcagtttatggcggcgttattggatgacgctgaacgcgcgagcttgcgcgagcttcagcagcgcctaaacaacgcagccactgccgctcaggctttggcgcacgattgcacgcagcgctttgctgaattgcagtcggttgagcagtcgaaagtgctggtcgatctggatgatgaggcgctggcgcaacagcttgtacagttggcaacacagttgcgcaacctgagccagcgccaaggtgagattcgtgcacaactgcaaggtgatgatgcgcggcgcctgagccaacaaagcctgtttgcgcagatccgtgcgcaacaatccaattacgatgcttggcagcaactcaacagcctgatcggctcggcggatggcgctaaatttcgcaagttcgcccaaggattaacactcgatcacttggtctacttagctaatcagcagcttgaacgcttgcatggacgctatcagttggcgcgcaagtctctgggtgagctggagcttgaggtggtcgatacgtggcaggcggatgttgcgcgggacaccaaaaccttgtctggtggtgaaagctttttagtcagccttgcgctggcgttggctttgtcggatttggtcagccacaaaaccagtatcgactcgctgttcctcgatgaaggcttcggcaccctcgacgctgaaacacttgaggtggcgctggatgcactcgacagcctgaatgccagcggcaagatgatcggcgtcatcagtcatgttgaagcgctcaaagagcgcatcccggtgcagttaaaagtgcataaggcaattggcatgggctacagcgggctggataaacgcttcgcggtatag

SEQ ID NO: 344308 - DNA, 285 bp, Pseudomonas aeruginosa
gtgcgcctcggcatcaccgccccggacgacgtcgccattcaccgctccgagatctaccagcagatcggcaacgtccgaccggtgccgccggcggatcttgtcgagtcctggaatcgcacgcacccggcccaggtggccgttgagtaccgtccgctccgcgactccattcccatccgcaccagaacgctcactcaagccaaagtttccgcctccggcatggcggtgatctggctagaaggccaggccacgccggtgctgctgcgcaactgcgctgctgtttcctga

SEQ ID NO: 344309 - DNA, 627 bp, Pseudomonas aeruginosa
atgaatgctgaatcctttctgaaagacgtaactacccactgcgctgaagtcattcgcgaggacggtgtttaccggcacatccgcttcagccgcccaaataccagatgcatgtgcttcgacctgatcacttggcccggccacctctgctacacgggcgacatgggcacttacgtgttcagtcgcgtcaacgacatgttcgagttcttccgcaaggacactggatcaggaattccgatcagccctggctattggtctgaaaagtgccttgctgtcgacggaggcaggcaatccgggagcgtttttgagtacgaccatgaaaagttcctggccgtgatcaacgaataccttcccttctggctggaagacctcgacgaggaacaccacgaagaagttcgcgaggcattcaaggatgaggtgctcgaccgccttgaagacggtgacgagcacggaaactaccgcatcgccaacgaattcagcatgacagtagatggtcatgatctggagttcaccgacctctgggaaagaagctttcgccgcttcacccatcactttctctggtgctgctacgcgctcgtctggggtatcgaccagtacgacaagctgaaccagaaggaggacgcagcatga

SEQ ID NO: 344310 - DNA, 291 bp, Pseudomonas aeruginosa
atgaccgtgcaaccgatcagtgatgaggagttggcggagttggaagggtattcgcagcataccgcctaccttggcgacgaagacgcagcaatcaccatgggagaactgcgcggtcttatcgcccgcctgcgcgctgctgaggctgagctttccttatggcgcccaataatggacgaggttgagcgccgcgcagagaaagaatggtgcctgcaagacaagcgcgacttcacggtaactattcagtacgacgactacgtggacatcgacgccgccatggagcgcacgccatga

SEQ ID NO: 344311 - DNA, 267 bp, Pseudomonas aeruginosa
atgagtgaggaacactacgaatcgaggctggcaagcaagtgccagggagtcgcccggtgcctgagctacaacgggaaccggcacgaagcagaggccaagcatgtcttgctggaagcctctcacatgctcgacagccatgcagtccgggtccatcagaaagccgacggtcttctgatggtaaacgctcgcggcaagtcgcgattcatgaactggcgcgaacggctcgcacgctggctgcttaagggctcattggagattcggccatga

SEQ ID NO: 344312 - DNA, 252 bp, Pseudomonas aeruginosa
atgaactacacacccgagtgcctgagaaacctgccgcgccagcaaaagcccgagacacgatcgaagcgcaggaaagaggcccgtgcaatggccgaacttacgatcctggagtgcattcagcggctcaaaggggcgcgccgagcaaagccccgcgattgggaaccaggctacaacagcgcaatcacaacgctggagctgttccttctggagatcaaagagaagcgctgggtcgggacggaaggcgagttgtaa

SEQ ID NO: 344313 - DNA, 300 bp, Pseudomonas aeruginosa
gtggacaacgaaaacgaaaccctggtcgcgctgctggtcatcgcgcaagcaatgagagaagagtttgaagcgtggtggaatttgccggcgcaatcggaacttcgcaaatcctgcgcaaggggatgggccgaggtcatctggaaagccagccgcgcggctctgagggtggagttgccggagcgtcgcgatccgttgaactcgaccggagacgatgagaacccaagatctgccggcttcaacgactgccttgagcgcgtgaccgaagccctccagcaagccggaatcgaggtgaagccatga

SEQ ID NO: 344314 - DNA, 645 bp, Pseudomonas aeruginosa
atgagcctatccgccagccagctcaaaccgaataaatgccagaaccctgcatgcggccaggagttcacccctcgcttcagcagcacgcaaaaggtctgctccccagcctgcgcactggccatcaaggacaggcacgccaagccggcgcggaaggccatcgccgaccgcgaccgccgggagatcaaggcgcgtaaggagaagctgaagaatcacagcgatttcgtgaaggatgccgagaaggcggttcgtgactaccggcgaacctacgaactttccatcggcagcggctgcataagctgcggcaagtctcaggccgaggtactggccgaacaaggctggaagactggaggtgcattcgacgcagggcattttctcggaaagggggcaaggcccgagcaccgcctggagccatccaacatatggcttcaatgcaaggcctgtaacgcgggctcaagcaagtacgccaggaaggggcttaccgtttcccagggcttccgtgagggcttgatcgaacgcatcggcctggaagctgtagaggctctggaaaccgatcaccgtccccgcaagtacaccaacgacgaactgaaggcgatcaccgccgagtaccgcgccaagctgcgcgaactgaaaaagaggactgcctga

SEQ ID NO: 344315 - DNA, 1332 bp, Pseudomonas aeruginosa
atgttggttcagcatctctctgtcatgtcgtccaagtacttcttcaccgatgcggatcaaaaagtccattgcgtgtgggcggggttatcccagacggatgctgataggtatgggttgaaacccctgacgatcattgggctctctgtggagggaacccgacctaaataccttcagctattcgatgatcgtgaaggcctagagctgcaacgcttcttgattgacgcctggacggatctggaggtattggcgggggtgcccgataagcttctcgttgaccctgagttactggctgaatttgaggtggtggaatgcgtccatagcttggccccagctgttgaggtggttggagttatgaccaagaggacagcggccagcaagagagatcttcagcagaagtcgctggaaatgattcattggaagaccaacccccatacgaggccatcggattgcttcagcgcggactcgccagctctcggccagattaatcgagccctgagagatggtgcgatttccgaggcaaggatcgaggcttcgacacatgatcgtaggcggagggatgctttccgtgccttgctggcaaggcccaaacgggcaccgcaacaacatcccgatggagcggatgctcatgaggttcggttgaagccgtgtggttggatggccaaggggctaaagagcttgccagagatggtgtccggccaggaactgactcttgagtatgccggcaatctcaggctgctatacgtaaccgcgtccaagggtgatttggagtacgtttccgatcatctgtggctaaagaacactctcaaatcggtgacattctcggccgagggtatcgccgccctgatagggactcagccagagatggttaggttgttcgcgtcagggaaatctccacttaatgacggcgtgatacagacgctgattgcagagcttgaggactgctgcgtgatttgtccggcgtcagcgcttcatgccgataacgcatacaacctcatcacctgtgggcttgatgtctcattctcgacagaacttgtaccaaccaatccattacagaaatgccggcgttaccggtacatgtttgttgattgccatagtggaggccggcatctcatattgtttgaggttggttctgccgttgactcagacaaattgattcaagagcttggtaacgttgagccagagccattcaggcttggaccaacggcctacgattgtctttgccgtttgacagggacaactgatctaagcgatatcaaggcggcccgggacctggttgccgcagttggggatatggtcgatctggagcggcactaccagtcagatattcaatga

SEQ ID NO: 344316 - DNA, 165 bp, Pseudomonas aeruginosa
atggtcgaggtgattaagccagacgctcatggattgtgtgcagaaggctacctggttgaagatttcggactgcccaaaaacctgatgctggcttgtacctggacgggaatcagtaagacggctgaagaagccatttccagcattgcaaagcacctgaaccaatag

SEQ ID NO: 344317 - DNA, 603 bp, Pseudomonas aeruginosa
atggcgcgaaagaccccgaagatggccgctgccatcgaactcagtcagcaagagcttggccagcttttggcctacggccctgattccggactgctccggtggcgagaaaagcctctgctggggctgccgacggatcgatcagtgaaagcttggaacagtcgttttgctggcggagtggctggcacacggaagcaaagcagcggcaaggagtacatccaggtcaacatcaaggggcgcttctatccctgccatcgggtcatttgggtgatggtgcatggatcgattgatcaggctttggagatcgaccacatcaacggagacggcctcaacaaccgtcttgtaaatctgcgcctcgtctcacaccaagacaatcaaaagaacctgtcaagacgctccgacaaccaaaccggggtctgtggcgtttcgtgggacgaagggcggtccaggtgggttgttcgaggtcatgtagccggtaagcaaaagaatttggggcgattcgagaactttgaatcagcagtagcggcgagacaacgccatcaaatgagcaatggctaccaccaccttcatgggatggatcgcggcaagaaggccgcgtcggtctga

SEQ ID NO: 344318 - DNA, 351 bp, Pseudomonas aeruginosa
atgcaacagaaaactcaacgcgcgcaagtcccctgcgccgttaccaccgaccaccaggtttgcttcgatcctctcaacggggatgagttcttgttctccattgttaccgaccggccggttgacgcggctctggccgccgccgaggacatcagcgaggcggttcacctgattcttttgagaatgacccgggcgatggacgatgccggcgagccgctactctctcaggaactcaatactctcaccctgctgggggccatgtctggcgcattgctcagagcttgccgggccggtgtcgcgacccaatccggaaatcctgaaagcgtgtcgcgacacgcaggcggtgcagcatga

SEQ ID NO: 344319 - DNA, 153 bp, Pseudomonas aeruginosa
gtgggcacctccaggcagtgggcggcgcaggagtcgtatgggttcgtgatcaatgcaaatgacctcaacggcgaggtgtgggcgcgcatctatttcgatgctgacgaactcaccctgtcgatgctggtgttcagcgatgtgctgaacgcgtag

SEQ ID NO: 344320 - DNA, 192 bp, Pseudomonas aeruginosa; identical to SEQ ID NO: 326407

SEQ ID NO: 344321 - DNA, 351 bp, Pseudomonas aeruginosa
atgcaacagaaaactcaaagcgcgcaagtcccctgcgccgttaccactgaccgccaggtttgcttcgatcctctcaacggggatgagttcttgttctccattgttgccgaccggccggttgacgcggctctggccgccgccgaggacatcagcgaggcggttcacctgattcttttgagaatgacccgggcgatggacgatgccggcgagccgctgctctctcaggagctcaatactctcgccctgctgggggccatgtctggcgcattgctcagagcttgccgggctggtgtcgcgacccaatccggaaatgctgaaaacgtgtcgcaacacgaaggcggtgcagcatga

SEQ ID NO: 344322 - DNA, 411 bp, Pseudomonas aeruginosa
atggcgagagcctggatcaacaactggaagacgacgctgagcgccggcctttcgcctggcgaattgagcctgacggtgccggatgctgccgccgcgctgctgccgctctctggcggtaactgggtgctgctgacgctggcggatgatgccggcgctcagcatgagatcgtgaaagcaaccgcgcgtgccggcggggtggtgacgatcgatcgcgcccaggaaggaacctccgacggcaactggccggcgggaacggcgatctatgcagccgtcacggccggcgacctcatgacgctccaggcgcgcatccaggctctggagtccggggcgtctggcggcacccttgtcgacgaagccggagcaacgctggtcgacgccgccggcaacaacctgatcatggagaacaactga

SEQ ID NO: 344323 - DNA, 588 bp, Pseudomonas aeruginosa
atgacgccggcctgtgtatccctgcgcgtggagcgcggggcgacgttccgcgacacgatgcggatcatgcaaccgagcctggtctaccggccgatcactcagatcgcgccgaccgctcccgtccggctgacaatccctggtcacggattgcctggcacgtggctggcctggatcgatggtgtccagggcatgcccgagctgaaccgcgctcgacttcggcaactgcctcaccgggtcgcgtccatcgacgacaacaccgtcgagatcaacctgctgtcagccgctggccttgcgcctgtgggcgggcaactgatctaccagccacctgttgacctggctggcgccgaggtacggatgcagatccgcgatgcgccagatgggacggtgctgatgacgctggcgctcggctccggccttgagatcgctggcgccggaacgatctcgcgcgagatatcggcctccgataccgcggcgttggcatgggcgtcggcggtctacgacgtggacgtgacctacccggatggaacggtccatcgctactacagcggaccgatcactgtgagccgtgggggagggtgcgatggatga

SEQ ID NO: 344324 - DNA, 405 bp, Pseudomonas aeruginosa
ttgctgctggtcgagcaacgcggcgaggtcctgcaggttgcggcctccctgctgttgctgttggtcgaggaccgcggccaggtcctggaggagctgtcggcccttctgctgttgttgctggtcgagcagcgcggcgaggtcctgcaggttgcggcctccctgctgttgctgctggtcgaggatagcggccaggccctggaggaactgccggcccttctgctgttgctgctggtcgagcagcgcggcgaggtcctgcaggttgcggcctccttgctgttgttgctggtcgagcagtgcgacgaggtcctgcaggttgcgacttccctgctgttgttgctggtcgaggacagcggccaggtcctggaggaactgccggcccttctgctgttgttgctggtcgagtag

SEQ ID NO: 344325 - DNA, 213 bp, Pseudomonas aeruginosa
gtgacgatcgatcgcgcccaggaaggaacctccgacggcaactggccggcgggaacggcgatctatgcagccgtcacggccggcgacctcatgacgctccaggcgcgcatccaggctctggagtccggggcgtctggcggcacccttgtcgacgaaaccggcgcaacgctggtcgacgacgccggcaacaacctgattatggagaacatttga

SEQ ID NO: 344326 - DNA, 282 bp, Pseudomonas aeruginosa
atggccgtcctccagacccacaaggtcgtcgcgcaactgcctgccgcgctggagccgaacgcgatctacttcgtccggcggagcaccggatacgaccagttcgtcaccaacggcgccggggtggtggtggcctatccgatgaacgtacgcatccccgcggctgttcctgggtatctcgccgatggctccatgcttcggctcacgatgaaccctgacggccaactgccggcctataccgccggcggcgcaactctcaacctacaggtgcttttcaatggctga

SEQ ID NO: 344327 - DNA, 153 bp, Pseudomonas aeruginosa
gtgggcacctcgaggcagtgggcggttcaggagtcgtatggattcgtgatcaatgcaaatgacctcaacggcgaggtgtgggcgcgcgtctatttcgatgctgacgaactcactctgtcgatgcttgtgttcagcgatgtgccgaacgcgtag

SEQ ID NO: 344328 - DNA, 2847 bp, Pseudomonas aeruginosa
atggcgcagtatcaaccggggcaacgctggatcagcgacagtgaagcggaattgggcctggggaccatcctggcccaggatggccgcctgctcaccgtgctctatccggcgaccggcgatacccgccaatacgccttgcgcaatgcgccgctgacccgcgtgcgcttcgcccccggcgatgaagtgacgcacttcgaaggctggaagatgaccgttcgcgaggtcgaggaaagcgagggcctattggtgtaccacggcctcaccgcgcagaacgagcagcgcaccctgccggaaacccagctctccaacttcatccagttccgcctcgccagcgaccgtctgttcgccggacagatcgatcccctgccctggttctccctgcgctaccacactctcgaacgccgcagccaactgctccagtcctcgctctggggcctcggcggcgcccgcgcccagccgatcgcccaccagttgcacatcgcccgcgaagtcgccgaccgcatggcgccgcgcgtcctgctggccgacgaagtgggcctgggcaagaccatcgaggccggcctgatcatccatcgccagttgctctccggccgcgccgggcgggtgctgatcctggtcccggaaaacctccagcaccagtggttggtggagatgcgccggcgcttcaacctgcaggtggccctgttcgacaaggagcgcttcgccgaaagcgatgccagcaatcccttcgaggacacccagttggccctggtcgccctggagtggctgaaggaagacgaacgcgcccaggacgccctgttcgccgccggctgggacctgctggtggtcgacgaagcccaccacctggtctggcaccaggaccaggtcagcgccgaatacgcgctggtcgagcaactggcggagatcattcccggcgtcctgttgctcaccgcgaccccggagcaactcggccaggacagccacttcgcgcgcctgcgcctgctcgatccgaatcgtttccacgacctcgaagcgttccgccgggagagcgagcaatatcgtccggtcgccgaagcggtgcaggaactgctcgaccacggcagtctttccgccggcgcgcgcaaggccatccacggcttcctcggcagcgagggcgacgagctgctggccagcgtcgagggcggcgatgaagaagctcgctcgcgcctggtccgcgagctgctcgaccgccacggcaccggtcgcgtgctgttccgcaacacccgtgccgccgtgcagggcttcccccagcgcgaactgcacgcctatccgttgccgatgccgagccagtacgaggaattgccggccggcgaacacccggacctgtatccggaagtgaatttccagcagcagtgggaagacggcgacgacaacaaccgctggtggcgcttcgacccgcgcgtcgagtggctgatcgataccctgaagatgctcaagcagttcaaggtcctggtcatctgtgctcacgccgagacagccctcgacctggaagacgccctgcgcctgcgttcgggcatctccgccacggtgttccacgaaggcatgagcattcttgagcgcgaccgcgccgccgcctacttcgccgacgaagagttcggcgcccaggtgctgatctgctcggaaatcggcagcgaaggccgcaacttccagttcgcccaccatctggtgctgttcgacctgccggcccacccggacctgctcgagcagcgcatcggccgcctcgaccggatcggccagcgacacaccatccagttgcacgtaccgcacctggagaacagcgcccagcagcgcctgttccagtggtatcaccaggcgctgaacgccttcctcaatacctgccccaccggcaacgccctgcaacacgagttcggcccgcgcctgctgccgctgctcgacggcggcgaggacaaggcctgggacgcgctgctcgccgaaggccgcgcccgtcgcgaagccctcgaagcggagctgcacagcggtcgcgaccgcctgctcgagctgaactccggcggcgccggcgaaggcgaggcgctggtggaggccatcgaggaacaggacgacgacttcgccctgccgatctacatggagcgcctgttcgacgcctacggcatccacagcgaagaccattcggaaaatgccctgatcctcaagccgagcgagaagatgctcgacgccggcttccccctcggcgacgacgaaggcgtgaccatcacctacgaccgtgcccaggcgctggcccgcgaggacatgcagttcctcacctgggaacatccgatggttcagggcggcatggacctggtgctgtccggctcgatgggcaacacctcggtagcgctgatcaagaacaaggcgctgaagcccggcaccgtgctgctcgaactcctgttcgtcagcgaggccgtggcaccgcgcgccctccagctcggccgctggctaccgcctcaggccctgcgctgcctgctcgacgccaacggcaacgacctggccggccgggtgtccctggaaaccctcaacgaccagctggaaagcgtgccacgggtcagcgccaacaagttcgtccaggcccagcgcgatgtgctggccaagcagttcgacgtggccgagggcaagatcgtcccgcgccacgaggaacgcgtggccagggccaagcagcagttcgccgccgccatggacgaggaactggcgcgcctgaccgcgctcaaggcggtcaacccgagcgtccgcgacagcgagctggacagcctgcgcacccagcgcgaggaaggcctggccctgctcgacaaggcctccctgcgcctcgaggcgatccgcatcctggtcgccggctga

SEQ ID NO: 344329 - DNA, 831 bp, Pseudomonas aeruginosa
atgaacaccacgtccaacgagaaatcgtatttcgacctccacacctcgggcatcggctacatccagcgtgtccgtgaagtgcccgtccggggcggccgccgtgcgcagcctttcctggcatgcaccatcgccgcgctggtcggccccgcccgggaccccagctaccgctacttcgacgtcaaggtctcgggtgccgaggccaagaagctcgttcagcgctacatcggcgttgacgatcccaagcagcgcccgctggtgcgcttccgcctcggcgacctgtggggcgacgcgtacatccgcgacaagggcgagcagaaaggtcaggccgccgcgtccctcaaggcgcgactgctcaaggccgagctgatcgagcgggccgaactggcttcgatcgagcagcacgagctgatcacccgcggcatcggctacctcaaccgtccgaaggacgtcacccccaaggatggcgatccgttcctgtcgtgctgcgtcgcggcactggccgggcctgtcgatgaacccgagtatcggtacttcgacaccatcgtcgccaccccggaagccgagcatctggttcgccgatgcgtccaggccatcgagggagaccgcaaggtgctgatcgccttccgtctgaacgacatgaagatcgatccgtacatccgcaccaagggcgagcacgccggggaaccggccgcaagcctggaatcgacgctggtccacatcggtctcatcaagatcgacggtacccaggtctatccgacgagccaggcgcaagccgaggcgccgccggccgaagacgcatctccaagcagtccttcggactactgtggctga

SEQ ID NO: 344330 - DNA, 669 bp, Pseudomonas aeruginosa
gtgctggtcttcatcgtccccggctacgtgctcgacgcggagctggtcggctggttgacgcgccactacaccgatctgcgtatctaccgagcggtggaaacgcagttcaagcaggtggtgatcttcggccgccgggtccgtcagcgggagctggcacccgatggcgtcaaggccgtgcgccatctgctgctgcaggttgggcttggcgaagtcgaagccgaggaactgccgagcgaatggccgttcctgccgtacatcgtccccgccagtccggccgagccggagcatttcttccgcgtgacgatggagcccgaacagttcgccgacgaggttggccggctgcaaggcctttggccgtcgctggacacgcacttggggaccgcgcagcagtcgctgcgtccaccggcgcgggccttgtcccactggcatctcgccctggctctggccgcgggcgcgatctccggcgtcgtgcgctcccagacggggcgcgtgctcgtcgtcaaaggtgacacccacaaggacaagacgctccagcgggaattcaccgaacgcgaagacggctccatcgccgagacacgcatcctcaccgacaagttcgtgcctgtcatccgcgcgtgggacatgacgcctggctccccgacacggggcgaggtgttgaccatccgctga

SEQ ID NO: 344331 - DNA, 2280 bp, Pseudomonas aeruginosa
atgtccctcgatctcgaaaccactgccgctgacgccgcgcccgtacagggcgaactgctcgacgcggaatcatcccctctgaccctgagccttcaggatttcgtcggcgagttcggcgacgaactgctcgacgccctcaacagcgccaacccgccggtctataccggccaaccgcaggcgcagcggcaactcgtcgtcgccagcctcaagcgcaagctgttcccggcccaggccgaagtcgtccacgccgccgccgagctgctgatcgaccgtggcgaacgcgccgcgatcgtcaatggcgaaatgggttgcggcaagacgaccgtcggcatcgccacggccgccgtgctcaacgccgaaggctaccgccgcaccctggtgctttcgccaccgcaccttgtttacaagtggcggcgcgagatccaggagacggtagcgggcgccaaagcttgggtgctcaacgggccggatacgctcgtcaagctcatcaagctgcgtgaacagttgggtgtccagcccacgagtcaggagttcttcgtcctgggccgcgtgaggatgcggatgggcttccactggaagcccgtcttcacccagcggcgcacccgccacggcgacgtggcagcgtgcccggactgcggcacggtcatcaccgacctcgacggcgagccggtcaacccggtcgcgctggaagccgaggagtcccgcaggaagtgcagccattgcgccgcgcccctgtggacgctgatccgcccgcgcagcctgtccggcagcgaccagtcctcggccgtgctcaaagccttgaagcgcatcccgacgatcggggaagtcaccgcgcagaagctgatgcagaagttcggcgacggtttcctggcctcgatgctcggcgacaacatccacgagttcatcaacctcatggatggcaacggcgagctggtgttttccgaccgtcaagccacgcgcatggaacgcgcgatggccaacatggagttcggctttggcgagggcggctaccagccgtccgaattcatcaaacgctacctgccgcaaggcacgttcgatctgctcatcgctgatgaagcgcatgagtacaagaacggcggttccgcacagggccaggccatgggcgtgctggcggcgaaggctcgcaagaccttgctgctgactggcacgttgatgggcggctacggcgacgatctcttttatctgctgttccgcgccttgcctgggcgaatgatcgaagacggctaccgcccgaccacgagcggcagcatgacgtcggccgccatggcgttcatgagggaccacggggtcctcaaggatatttattccgagagcaccggcacggcgcacaagaccgcgaagggcacgaaagtcagtgtcagaacggtcaaggccccaggcttcggccccaagggcgtgttgcgctgcatcctgccgttcaccatcttcctcaaactcaaggacatcggcggcaacgtcctgccgccgtatgacgaggagttccgcgaagtcgcgatggacacggcgcaagccgcggcctaccgcgacctggcgggtcggctgaccgcggagctgaaacaggctctggcgcgacgcgatacgacattgctgggcgtggtcctcaacgtgctgctggcctggccggattgctgcttccggtcggagaccgtggtgcatccgcgcacgcgcaacaccttggcgtttgtcccggctcagttcaacgagttcgagatcagccccaaggagcgtgagctgatcgacatctgcaaagaggagaaggcccaggggcgcaaggtcctggcctatacggtctataccggcacgcgcgacaccacgtcgcgcctgaaggtgttgctggagcaggaaggcttcaaggtggcggtgctgcgcgcgagcgtggacgccagccgccgcgaagactggatcgccgagcaactggaccgtggcatcgacgtgctcatcaccaaccccgagctggtcaagacggggctggacctgttggagttcccgacgatcgtgttcatgcagtcgggctacaacgtgtactcgctccagcaggcggcacgccgctcctggcgcatcgggcagaagcagtccgtgcgcgtgatctacctcggctatgccggttcttcgcagatgacctgcctggagctgatggccaagaagatcatggtctcgcagtccacctcgggcgacgtgcccgaatctgggctcgatgtcctgaaccaggacggcgattcagttgaggtcgcactggcccgacagctcgtcgccgcatga

SEQ ID NO: 344332 - DNA, 603 bp, Pseudomonas aeruginosa
atgtgcccctctccaccgtggtttcaccatcccgaacgccgccttctggcgggatttctcggcctgctgtggtcggcgctggcaggtggctgcgcaacgaccaccacaacgccggccgcacccgatcccatcgaggacgtgtcggccacgccggaagccagcgcacccgagttcattcccgtcgtgcgctatggccgctacaccctcgtggagatggcacccacagcggcgcagcgcgacctgctgatgcaggtgatcgacgtggccatgcccgaggatgcccgtgccacagtcggcgacgggctgcggcatgtactcaagcgcagcggctacggcctgtgccagaccgcgcatgctgtgatcgaactgtacgcgctgccgctgccggcggcgcacctgcacctcggcccaatgaccctgcgcgatgcgctgctcacgctggctggcccggcctgggaactgcacgcggatgaccgcgcacggcagatttgcttcgagcggcccggcgaccgcgcgatcgccgagcacacatccgagtcgcccgccaccgaggcggtgcagacgttcccgctggcgcccacggcttcgggaggccagccatga

SEQ ID NO: 344333 - DNA, 540 bp, Pseudomonas aeruginosa
atgggcctgctcgccgcgatcatgctggccgtctacctggcgaatccgttcggcaccgccagtctcgacccgcgcgcacggctcctcggcgtggcgctgtacaagatcccttcgcgctcgatggaaccgaccttgcaacagggcgacttcatcctcgccaacgccgcgcgctacgccttcgccgacccgcaggtcggcgacctggtggtgttccgcttcccgccgcagcgcagcatcgcctatgtgaagcgcatcgccgggatacccggcgatcgcgtgcggatcgatggcggccggctctacgtcaatgagcgcccggtgacggagccctacctggcgcaacaggcgctgcgccagccggactccctgcgcatggccgagcggaccgtccccgccggccaatacttcatgctcggcgacaaccgcgacaactccaacgacagccgctactggggctacgtaccgcgcgccgacctggtcggccgggtgttcgccgtctggtatgccgaggacacccggcgcatcggttcggtgcgctga

SEQ ID NO: 344334 - DNA, 726 bp, Pseudomonas aeruginosa
atgtgtataagagacaggacccaggcgctgcttgagcagggccatggcgcgggctcggtggctgaggcggttcttctcctcgggcgccagctcggcgctggagcagtcgcgttccggcacccagaacagcgggtcgtagccgaagccgtgggcgccgcgggcttcgcggaggatgcggccttcccagatgccctcgcagaggatcggcagcgggtcgtcggcgtggcgcaccagcgccagcacgctgacgaactgtgcgccgcgctcggcgtccgggacatccttcatggcctccagcagcttggcgttgttcgccgcgtcgccccggccgtcggcatagcgcgccgagtagatgcccggcgcgccgccgaggaagtccaccgccagcccggagtcgtcggccagcgccggcaggccggagaggcgtgcggcgttgcgtgccttgaggatggcgttctcgacgaaggaaagaccggtttcctccggttccacctggctgaactcgccgatcgagcgcaccttcacgctggcgccgagcatggcctggagttccttgagtttgccggcattgtggctggccagcaccagctgttcgagcttgatcattcgtccgggaagatttccttgttgaaactgaaggtctgcgcaggttcgcccttggcctcgaccttgatggtgaagaccagggtctcgcgctggctgatcgggaattgcgccaggttgtag

SEQ ID NO: 344335 - DNA, 387 bp, Pseudomonas aeruginosa
atgaacagaagccatatcgtccacggcccaaccggctgcggtaaaaccagaaacgctgaacggatagctgcggccctcggcttgtccaaggtccaggacaactggagcccgatggaccaagtcttcgagccgttcgacaccctctacctgaccgcttcggaaggcccatggccggatcaggcacgccatgtcttgagtttcgccgaagcgatggggcgtgtacccgacgccgtcgttgaaccgaaaagccgctatatccaccggaacggcgtcgagtacgaggtggtgatgatcgccaacggcgaaagcaccagcccgaagtaccctccaaccatcgtgtatcgggggggtagccaatgggaaggtctgggctcgcccagcttgtga

SEQ ID NO: 344336 - DNA, 171 bp, Pseudomonas aeruginosa
atgacgcacgcacaagccatccagttcaagggaatgtcttggttcgtaaaaatcacctgccccgaagccggccactacgttgtgcacgttgaaagcgcaacggtgatggattgcacgctgacctttgagaactacgaagacctggtcacctggtcgaggatttgggaatga

SEQ ID NO: 344337 - DNA, 198 bp, Pseudomonas aeruginosa
atggccgcgaaaaaactcgcctacgtgaccggcacaagccgctggggttaccaactgaaggtcgacccggacaagtgcgccgcagagtttcagcacatgtgcggcctgatgttcacctcataccgcgccgcccaagacatcgccaatgcgattaacgacaacatccgccgcaaaaggagtgcgtccaatggccgttga

SEQ ID NO: 344338 - DNA, 1161 bp, Pseudomonas aeruginosa
atgaaaatccattacagattccctacaaaaagaacattactaatagatgatcattgggacataccaatacagaatggaattctacgcgccattgaaatagatggcgaaataaactcattcgaagtaaccctaacaaaccagcctacaagttatgccttgcagttagccaaagcacaagatggaatcatggaaataactgttgacaccgaccccttcttagatgcaatacaaaatcaactaagatcagcaatgtctttccttcactgctacttttctatcgatcttagaattgatgaatatgaagtccgatacgaagctgaaaccccagaagaagaaaaggaaatccctataccctcaattcaaactgaagaatatgaacctcctcttctactaccattcaacatgttgacccgcgctataatggcagcagaggactcaaacggcccccaattcgaagcaacgttagcaagctctgccagagcttcactctcagagagacagtatatcgactccttcagatattcgttccttctgatagaatctatatatgggggaggccaattcaaatccgccgcactaaaaaacacattaagaggcaatcacgaattcagaaaaatagtaagaaagtcccttctcaacaggataaaaccaaagacacaaaaaaaatccgatacagaacaaatcctccaaaacaatccagatatcgatgacattatagatcatatcgttgaaaagagaggattctattttcacggcaacattaaaagaactaactcatggaaaccaaacgatcaaagcgatgccgaatccttagcgctcctcacaacgggaatagcacagttaatatcacatgaagcagccaacccgatgtttgaagaaaagtatagcaggagacattttgaagacgcaaaaatcgcaggagcaataatagtgttcaaagttgattttaaatacagaaatccagaagaggaattctccagagaacacgccttagagatgtcaataccgggcacaaaaccaacccctcaaaactccatatatatacttgaaaaatttatcgaacatatccaaaacagcctacctgggtctggacttgaggaagccacatgcagaataaaaaatacatcacaaattattttcgaagttaaattccatgtataa

SEQ ID NO: 344339 - DNA, 477 bp, Pseudomonas aeruginosa
atgagccaataccgcctcaatcttttcatccagcccgagcacgccaagcgcctggatgaacttgccgccaagaaaggcgtgtccaagtcctccatcgtcgcagcggccttggcgtcctggctgtcacccgatgcgggcgaccagcgtgaggccgccattgccaagcggctggatcgactgtcgcggcagaccgaacgcatggagcgcgaccagaacatccagatcgaaacgctggcgctgttcatccgctatttcttgaccatcagcacgccggtgccagaagcccacaaggacgcggcccgcgcccagggcaaagcgcgcttcgagcagttcgtcgagcagttgggtcgccacctgctgcgtggccgcagcttggtgcgcgacgtggtggaggaactgcaccccgatccgatgcggatggatgacgcagcagcgatggcgtccgccgatgagcgagctgcagagcgtgcgtcatga

SEQ ID NO: 344340 - DNA, 132 bp, Pseudomonas aeruginosa; identical to SEQ ID NO: 339461

SEQ ID NO: 344341 - DNA, 132 bp, Pseudomonas aeruginosa; identical to SEQ ID NO: 339461

SEQ ID NO: 344342 - DNA, 741 bp, Pseudomonas aeruginosa
atgaccaagacctccaaaatcactatcgaacgcagtatttccacgctcagggccaccgacgtaactgagggtcaggatgtagtcctcacctaccaggggtggggcttcgtcatcagccgcacccacagcgccgactcctggcggggtgatttcaccctcaccactccggacggtgttcagcgtcagggctgcctatcggacgtgaaagagtccatccgccttttctctggtgccatggctgaagaaggccatacccctgacagcttccgtagccggatggaggcggaacaggctcaggcagtagccgaagctcagggtgatcccgtggactccttcgccctggcgaatgcccttgaagccggtccggttgaaaaagacggatgccggctgactctggaaggtgacagttacgtcatgaccagccgctgtggtgatcgcatcaccctgtggacgggggccaccagtccggcccgcttgctggctcattgggatggtttcgtttcgaacacacgggagcgggctgtgtgccgcttagaagagcctgaggtggttgttcgtctggtcgatcccgccaagccggaacccatcaccacccaccccgcaaaggcgtcctacatcgccggaaaccttgcaggtgtcgtcctgctatgtgactgccaagcctctgtgggcctggtgccacgaatcgccggagtcgggtgggaaaacgctacctgtaccaaccaccgcttcaaacattga

SEQ ID NO: 344343 - DNA, 588 bp, Pseudomonas aeruginosa
atgaaagacattctcaagcgtactgcaaccctggtgattcgctattccatccgtggcctgggcggtatcacccaactcctggggaactgcctccgagcttacgggcgcttcctggctgtgtcccccacccgctgggtgactctgatccctgtggccttcgtgttcttcgccgccctggatcaaatgggatgggagtccccgaaacgctccgccagctactcccaggccgtcgccgctcctgtggctcaagcctccccgctggaattgaagctgcgagaggtgggcatggctgacctctgcaagaaggcgatattcctggagtacgacaaggatgaattccttgcagagattcaggatggaagcatgtacgccgtcgcctggcagggcttgggcgaagcttcctgtcacttcgggcccggtgagagtttggacagtgtggctgtcctcaagcaccagcaacggggcgtggtaccgctcctgagtagccttcctgggtacgctgagtatcgtttcaccctggccgaggatggcaacctggattgggaacgtgtctggatgccgaatcgcaactctcaaggaggtaagtga

SEQ ID NO: 344344 - DNA, 273 bp, Pseudomonas aeruginosa
atgacccgtattctgaccgctctgctcggcattcccgcgtcctactggaccttccttaaggcgagtcctgctcgctggatcaccctggcccctgttgcgctgttggtggtttgcctagctactccgactggacgtgtcgtgcttcagcacaaagcgccagagctagtaccgatcacgggtgcgtttggactcccaggtttggccgtcgatgtctccgcactcaccgtccaagtgtggggtgtcctgcaacagcgcccaggaggtgagccgtga

SEQ ID NO: 344345 - DNA, 594 bp, Pseudomonas aeruginosa
atgtttaagaaagctgtggccatgatggcccttcctgtcgcccttggaatcactttccacgctcaagcggccggcttatccaaggctgaccccgtggcactagaggtttgtacggcctcactcggcattattagcggcaatcccagccttgtccgcttcacctatgccaagactccccattggctatctatgcaggctgtgagcgcggctgcggggaaagtgcaaacctgggagtgtctgcacaacgcacagaagaagacagtgaatttccgcaaccccctgtctgatcagcttgatccagtcacagcaaaatattctgccgttcctcaagggaccgcctacatgttcaccgacaacacgggggcgtggggcatttacgatagccctggcatcgttcctgaccccggtcctttcacctacaccgacccggagcgccagaggtgccaagctttagctgccaaaaagttcggagtcgaggcgtccaaggtctctgtaggggagcgggacccggagcattccgatagcatggctacttaccgcctcaagggccgcgttctcctccgctcatgccgggggcttatcaacggcctgtag

SEQ ID NO: 344346 - DNA, 513 bp, Pseudomonas aeruginosa
atgaccaagcaagttaaacccctgatgaaacctatccccggattcaatggcgactattcgataactctcgatggccaggtgttcagtaataggcgggaacaaccttataaaatgagtatccggcgcaagggaaaccagccgcctcgataccatctctctgttccagggaagggccaatgctcctacaccgtggcatctctgctgcttaaaaccttccagggcccttgccccaagggatatcaggtcggctaccacgatggggatgtcaccaacttctctcttcccaatcttcgctggattcgtcaagggactcgaagccctcgccgcctggtcgagtttcaaggccggcgaatgggtgtcaaggaagccctcaccgtcggttatccgggcttcagtgatctaagccccaaagagcagcgggtgatttacaaccgcgtcaggtcccgcatgaggggctgcaacttccaggaagctttggcccgttatgtccaagctcatgggtggttgaaatga

SEQ ID NO: 344347 - DNA, 270 bp, Pseudomonas aeruginosa
atgattcattaccttgtgagggaaaagggaggaagccgctacgtcactcacgaagcgtttgatgatcccagggcagcggatcgccgttacctgcccacccaaggagtgatcgagctaattccagggaaacctgaagtggtctatctcgaaatagatcgggctgatgaagccatggtttccaagttctaccaactcaagaaacagggccacacattcccgcctgtagcgctggtgaagaaggcccgccataaccacttaaagactgtctag

SEQ ID NO: 344348 - DNA, 1134 bp, Pseudomonas aeruginosa
atgaacgcacaaactcaattcattgaattccacaagttcgatgctgatgaactggcctcccgaattgagcaagtaatgctcacctatcaggccgctactcttccattcgctccgatgttctatgatgatcggatttcccggttccaagttcacgttggtgatgaagaagcctgggaccaggaacatggtcgtaatttcaagaaggaagtgcttgaaactcgggaagagttggtagagggctccagtgtctacgccagccttcgcgacattatggaagttccaaatgggaagttctccagcctgccgcacttctacgctgagaagaaagcatattccctggctgaactgttggatgttcacgccaaagccttggaagaaggccgtgacctgatccgtccctggatcgagaaaggcggtcccacccagcagccggttttgaactacgccctgggcagcactaaggcagagcaggccgccgcttatgaggtgttcgccgaactggtggaagccacttaccgcgctgaactggtggagaagaacaaggcagagaccgaagcccgcattcaggccgccattgcagagcgccgccgcatcgctgctgaggaagaagctgcccgcctccgccgtgaagaagaggaagcccgcgccgctgtcctggccgagggtgacagcatcctagcccagctagccgccgaacaggccgcccaggaagcacgagcagccgaagaggcagccgagcaagcccgcgctgctgaacgcgcccaggcagcccaggcagccgctgaactggccgccgaactggaaggctgcgctatcggtgctgacaaggtggagtttctctcctccctgttcgctcgcaagctggcagaggcccaacttgatgaggacgaaattgacacctgcttgaaggttatccgtgacgccctggtcggtgattgcctcaccaccccggcatgggattccttctccgaggtgttcaacgtggatcgcctcgccgcccaggcatacagcgatgtcaccaacggtcccaagcaaggtgccaagcaagtccaggccttcggccaagcccttgatgacggtatctccagcccggtcctggtgcgcttcctcgaagccctcgccggcaagttctaa

SEQ ID NO: 344349 - DNA, 288 bp, Pseudomonas aeruginosa
atgaaagtgaccactctgaaagcccaggcattgtccgccctgaccatcttcaacaccgctgttagcgtcggctacatgaccgaccaccagaaagctgaagctcagcgacttctggacgccctcgccgctgagactgtggatagttacgccgcaggactggtgaaggaggcagagggacattttcattcgttcctgaccgcccccagctaccgccaccagggcgccaccctgggcaatgcagccggttgcttgtttctctacgcccacctctaccagaaggccgcgtaa

SEQ ID NO: 344350 - DNA, 177 bp, Pseudomonas aeruginosa
atgattgctgacacctctttcatccaagcctgtgatgaatacctccaggcattggatgacatcagcatcgccctagcaaaccccgaactaaccgaatctcagaggcaggggattatcagtgccagccatgacctgactgactctttcctctccattttgaaggacctaacagcatga

SEQ ID NO: 344351 - DNA, 411 bp, Pseudomonas aeruginosa
atgaccgatcctctacatgacgacgccctggtggcctactacaaaaaacagtacggcgtcgaggacaagcccacccccaccaccgccgagcgcctcaaggcaatgattcaggccaagagtgaagacccacagtatggtcgcctgaccaccgccaaagccgcagagttgaaacgcaacagcctgaagcgtctggactctgacctggtggtgaaaagcctgtctcctgtagctgcgaatatcaccaaggctttcttgagcactggcgaagagttgaccccgacagccatgacggtgattagccagctaactctggaagtgagcaaggccgccgcagatgggattccttcgactgatgccgaagtgcaagccctggtcgccaaggctgttgccaatctgcgaggagccaagtga

SEQ ID NO: 344352 - DNA, 327 bp, Pseudomonas aeruginosa
atgggcaagagttactcgaatattcccccggagcagcaagccaagcgggaattgaagtttcttaaaaagctgtactccttggacagcccaaagccggggcattatcccatgcctccatatcactacctcacattgcgggaggttgagcatgatctacccgaggcgcttcgccgagtcctccgcctacccaatgtcccagcggttatggatcgcttatttcttcgcaagataaccattgaccagggccgtcaggcctattacgccgctcaggtgtctagactgctcaagtatcagacccctcggttaacacatcgcaaagcggcatga

SEQ ID NO: 344353 - DNA, 2292 bp, Pseudomonas aeruginosa
atggcacagaccgaagaaattaccaagctagttggccgcattgaatggcgagcggataacgcgcctctgctggccttccgtaagaaccttgaagctgtcacccgtcagcttcgcgaaatcaccacgctggctaacaaacgcatcaaactgaacttcggaatgggtaatctccaagttactggccgagcgcttcagaagatgtcgaagcagcagtttcaagatgctctgaagcatcagaaactccagttcaacggtgctcagcaagctatcaagctggatgccgaacgtaatagggccaatgttcaggctcttcggactcaaggccaggagcaagccaaccaacaccgtgctcagatgttcaaccttcgcagggagcaagctgagttcatgcggaactcccggcaacgtatccaggccgcacgagagtctcagcaactggcagctattcagcagcgggcacacctggccacccaacgcttccaggcgggcatgggacgcttgcaagcttctcccctggcccaaggtatccggtccgctggaaacgctgtaggaggcggtatttcggcgctgctgggtagtgctgggatcgcagccggaggcctgctgtctgtgggtgctgctgcttcagccgccgtcctgggtctgaagtcgattgccgaccgtgccgcagaggtgtccgatcagaccctcactcgccgggcccaactggaagttgccaccaacggcaacaccgaaatggccaaggccctgggcgatcaggtgtatgactccattaactatctaggggaaagcttcgagaccatgggtccggagtgggtgaagaccatcgccactctgagccgtgaaggtctctcgaaccgcaatagccttcagatcatgcaaggtctgggagcatacgccaagacgatgggcgtctctggtgaacgtcaggcattggtgattcggggtattcaacaggccatcggcaagggccagctctactctgaagaatggcgtggtcagatcgctgaatcgctgcctggtgccaactccatgggtgctcaggcatgggcaagggtcaccggctccaaggccaccggggaagaagctgttcagcagttccggaaggccatggaagatgggaagatcactggccagaagctccagaagttcctgatgaatgtagcctccacgatggggagttcggcctacgctggcggactggaggaacttattcagaacaacgccagccaggcagcccgccgctctaacgccatgtatcggagcatggaggaggccaacctagccaatgacggcgagcttctgaagagccgtgcccggttcaatgaaagcctgacccgcctgtttgagcgcatggcagagattaacgtgaagatggctcccatcacggcctccttcaatgaaatgtctgccgcagcagttgacgggatcaccgaacttaccaagttgtttgcaggtgaagcctctgtctttgatggcatggtagacgaggcaacttcgcgagagttgaaggaactgttctccaacctggtggaaaccgggggagccttccttgatgtcgccggcatggccgttgacggctggaagcaacttgcaggtttggcagatgaaaaaggcttacttgctgactctctccaacacatcaatgccgtgttggaaggtatccaagcacttcgcgacacgctccagtctatcaaggaaggtgactggtccattgacctgaagattaatggcctaggtctcctggagaagcttctaacattcttgccgatgattccgggtgtgaatggcaccacgattcagagcatgaaaaaccttcatcagactgtagaagcacaggccgaggaagaacggaagcagaagagtttccagtcagctaatccgaatgcccttcccctggctgctcctgcctttgctcaagctggagccaagctggcccaactcatggccaccggacagcagcaactcaatatcctgaatcagggtatggatgttcagttctccgccgagcagattaaggcgattcagaacaccttgccgcttattccggtaacgcctggggctgagttgagccgcaaggtgcaggaagactcccgcactgatcgccaatccggcccggctcagattgacgttactgtcaacatgccaggcatcaagctagaagtgaacgaagccactaacggggaagccctggccgagcagttcgctagcagtgtctccttgcatgtaaacaactccattagcgagatgttggctgcacagagcgccgaattgttcgataccagggtttaa

SEQ ID NO: 344354 - DNA, 393 bp, Pseudomonas aeruginosa
atgaatcatccaagcatcatcgccggccttctgtctcagattcgccgagcagttcccctcctcgccctggtgttcttcaccgcctgggctggggccgtggtaggtaatgccggtattcggtcggatttcgcctatgttcgggaggtttccaatctccaggggcacaaccttcagcaactagccgaccgggtggaagatcagcgtaagttcttcaatgactccctggacgaaatggccaagaccaccgctatggtgttgaacacccgtctggatagcatggaagcccggctagaagcccatggtaatcagcttcgcctggtgctcgacagtttgtcccatgcacccaagccagcccaggtggaaggaaagtcggataacgtagcccttcgatag

SEQ ID NO: 344355 - DNA, 1020 bp, Pseudomonas aeruginosa
atgaaagctaaacgctgcaagttctgtcgttgttccatcccattgactcgcactagcaaagctctgttctgctccccggagtgccaggtgaaagccaaaagcaccaagggtaagactgccaccgcccaccgccgcactgagatgcagaaggcctacggaaacgccttcttctccatgatcgccagggagtgccagcgagccggaaccgttcaaatcatgcagggccatactctggagtctttgacctcgctctacagcgtctggaaacgcctccaccgcattaacgggaacagctccaacggcgttaagtacgaattggggcacatctgccctgtgaaaggtgtgaccaaggcaggcgttctagccgccgacaacgtggttattcagcccgctgagcacaaccgcaagcacggtgccagtcactttggtttaggccgctggatcgagcataacgctctcctcccggagtgggccgtaggtgaaacctcgaagaaagaggctgtcataaataagctggccaagttgctgggcaaggccacgattgaatcctttgtcaaactgcacaagctcaagaccaccaggaaaatccaactcctggacaagttgtctggaatggcaggtcatgagttcagccccagccaactggagaaaatgagtacccaggcactggaagctttgaagtgctcccttgacggcaccaaggaacgcaaagccggcactttcaaagaggattcctttgtctggactcctgacctggtgctacgcgatgaactggcccgactgtcccgttattacccagaactagctcctgtagctcaggttgtcctggactggaccgttagcacagccgagcaagtagaaggcactttggccactcgttacatgcttgacaccgactttcaacgaatcatcacccagggcttcgatatggcattgggtgctaaaccatgcccccgcactcttaccaagatgctggacgcggcaaacgacagctatatggcctttgtcctggccgcataa

SEQ ID NO: 344356 - DNA, 981 bp, Pseudomonas aeruginosa
atgcccaccagtgtcctggcctcttaccctaacttcctccgggagtaccgtttcacctgcgttgatcctgccaagccaggccaatccctggtgattaactccggagataacggcttacaactccgcttcgacatcacccggagcgctagcaataagtcgaagctgaacaccgctgtgtttgaaatctacaacctgaatcagcagtcccggaccctgatgtctgccccttacctcttcgttactctggaagttgggtataaaggccaggaactgattactatcttctccggcaacatcaccagttacaccacccgatgggaaggcaccgataacgttacttctctgactgttggagagggtttcatcccgattaacgaaactcgactcatgggcaccatagctcccggtagcactgtgcgggatatgttgaatcggattgtcactcagatgccaggcatcgttcctggcgtatggagtggcattgccctaaatgccccgctgatgtccggtaaggctctgactggagcccccaaggaagccttggacaacctgacacgggcttatgatttggaatggaccattgctgatggagccctccacatccagcccattgacggctacagaggcgtatatggccaggccgttcgcatcgcccctgagagtggcttgattggctcccccttcccctggaacggtaccaccggcaggaagaagaagagtccgaacaacattaccggcttgcagtttaaaaccctcctcctgagccgtcttcgccctggggagttggtccaccttgtgagcagggaacatgactcctatctcaaggttcaaaacatccgctattacggagactaccgtggccagaattggaactgcgacattcaaggactccaggtagtacctacagcccaagacgcttccagagccgatagacagactttcgcaaatagccaacagcggccagagaattccccacaatga

SEQ ID NO: 344357 - DNA, 747 bp, Pseudomonas aeruginosa
atgagcagcctatcagaaatcatcggcattctggccgataaccgtttgaacactgtaaacactgccatccccggttatatcatcaaggttcaccgggataagatggctgtagacgtacaaccctccatcaacgaaatggatgaagatgggaccacccgtcgccggcctatcctgctggatgtgccttacatgttgcccatgacagaaaacagcgccgttctaatgcctgtacatgaaggagattttgtcctggtagtgttcggcatgcgtagcatggataacttcaagcacggcaccggcatggagaccaagcctacagatcgccggcaacacgccattgacgatggagtggccatcattggccttcgtccattctccaagagcattaaccgccccagcgcctggaagcatgatcacaatcagtttgacctggtggtagttcataacctgggcagcgctacagagtgtgaaatccggatgtcggagagtggaaacgtcacagttaacacagaccaagacttcaccgttaatgcccggtccatcaccctcaacggccagcaaggtgtgagcatcaaaactcccaccctggcagtggaagcccaggccacaacttggaccggaaatatcacccactccggtaactacgttcagacgggtgtttcgacattcaacggtattccattccacacccacattcacggcggtgtgatgccaggaagcggaactaccgcagttccccaggcataa

SEQ ID NO: 344358 - DNA, 768 bp, Pseudomonas aeruginosa
atgtccctcgctctagtcgcccccaacggcgatatggtttatttcgacgctgtgttgaactggaatcgctccagccaatcccaggtgacgcagttcccaaccgaagccggctcagtgatcgctgaccacgttgtaaatcagaaccggaaatgcaccctaaacggtgtcatcagtgacgcagatttcaacctcacacgccccgcattcaccgcttcggaccttcagcaaaacggcatcacaccgaagcccttcgtgaacaactcccctgtaggtgacaccatccgaatcaccccagggacagacagttcctggagccagttcctcccggagacactagcgcagtggactgactctgatcgcccccaggtagaagttcagagccgagtttatgcacgcctggcccgtgagattgcagaggacatccaagccctccaacgcaaccgggaacaggttactatcctcgacttcggcaccgctggcctcatccagcaagtgcataagggtttgatcatcaccagcctggaattcccggagaatgccgaaacgggtgacggggtgtacctcaatatcacctttgagcaaatccaggtgacggccaccgtactggaggagacccccaggaatgtggcagaggctgtgaagaatcagacggccaagcgcaaggagttgggtagtaagaacgctaaaggagaacgcacagtagactctgaaggcctggaccctaacaaggaaaccgagctagccaagattcggaaccgtgacctgtag

SEQ ID NO: 344359 - DNA, 483 bp, Pseudomonas aeruginosa
atgaaagtcattccctctttcccgcgttacatgatttccccaaccggtgaggtgtgggacacgctccgggagcagttccagcccgtccaggatgtacgcggttatgcctctgtgactctatcccgccgcccggatcagcctcacccgatcctgaagtcagtggcctccctgctgctggagacttaccaaggaccttccactgacccccgtcgccaggtggctaggttcaaggaccgtaatcgctctaacctgagcctggacaacctgtattggggcaccagtggcaagccagagttggaggtgtatgtaggtgatggggagtccgtccgagcggctgacatcctcgaagctgtactaccttcgctggacgccaagacgcgggtgaacgtctccgcctccctggcaaaggggcattccattggtcatgcactccttcgcctgcttggtgttccgtcatctggcgaggtgcgagctggggcataa

SEQ ID NO: 344360 - DNA, 690 bp, Pseudomonas aeruginosa
atgcaagtcgttgcctactaccgtgtttccactggcaagcaggaagcctccggcctcggcctggaagctcagcgggaatatgtaatggctgctgctcgctcccagggctgggaagtggtaggagagttcacagaggccgtgtctggtgctatccgccccttggatcgccctgagtgctccaaggcgtttgccacaggcttccctgtggtagtggccaagctcgaccgcctgagtcgtgacgtggagcatgtcgccggcctgatgaagagccatgatttcaaggtggctaccatgcccaccgctgacactttccagattcacctattcgcagccctggccgagcaggaacggacattcattcgggctcgcaccagggaggctctggcagcccttcaagcccgtgctgactctggtgacgctgaggcccaagccaaggttgaacgtcgcagggaggcggggaagaaagctgtagtgacgggtcacgccagggaggccacccaagcccgtgtttccagcttcctgtcctcgatcaaggatgccgtggaactggccctgttcaagggtgctagcaccttgcagggggtggcagatgcactcaatgcaaagggggttactactgctcgtggtggtcgctggtcgcctactcaagtcagccgagtaatggaccgtctcaacctgtccttctcctaa

SEQ ID NO: 344361 - DNA, 216 bp, Pseudomonas aeruginosa
atgatcgacgagatgtccaacacccagcaaaccccgaccgtacggctcaagatggctgagaaggtgtttgccagctacctggcagcgctacgggctcaggcggcactgaaagccaaggccgataggctgagccaggaaacctcggagtcacaggagccctcagaggagtccactgtggtgttcaccacttctttccggcctcatgccgccgcctga

SEQ ID NO: 344362 - DNA, 312 bp, Pseudomonas aeruginosa
atgacgtcttaccgccccacaccccagccggtttatccgctatcccatgctgatgcccgccgctggctggaaaccctttctcatggcgggctaaccacctgggaagctcagcgattcctgggcggcctggtgccccctgagcagaaagaacaagcccgtgctttggcttcccatttcatccaggcactcacctctggccgtgatcctctcaccaccctgaatgacctggcagaccggcacggaatcacacccctactcgttaaggaataccccgatgtcctctcaaggctccgtgcgctgggaccgcgttaa

SEQ ID NO: 344363 - DNA, 216 bp, Pseudomonas aeruginosa
atgtcctctcaaggctccgtgcgctgggaccgcgttaactcccactccgccatcgtcaatctcctcgatatggcttacaactccatccgtgacaatcgccttcaacacgccccaggtgctgacctggtggctctggagatgaagcagcaagggatgccctggagcgccgttacagcgcgtctccggcccatgtatggcatcagtccaatccgataa

SEQ ID NO: 344364 - DNA, 675 bp, Pseudomonas aeruginosa
atgaatcctcagaaggattacacacatccggcgaagaactttctaaccggcctggtcaagtgccaagagtgtgggggtaacttcgcggtgaagagtcagggcgctggaaacccttttatgggttgctacgcccggacctaccacaggtgtgccaacgggacatcaattcccctcctggtgcttcaccgggtggtgatggaggaggcgctagactacattgaggacggtatacgggcttccaggctgggggagcatgacaagcataggttggttgtccaggggaagctggaggaagtccagagaggcatcaacgggctgtcggaggctattgcggcccacggtttcatgccggaactgaatgccaagctggcagagcttaaagtgaccaggaccggcctggaagctgagctagccaggataccccaaaaaggggacaaggagccggttacaaaccgggagcttatggccgtctggaacggcgacaagctgaagctgaatgccatgctccaacgtgccggcttcgccgtgtggtgtactggtcgtaagatgaagattggggccgatggcccggagtatgaatatctgcgatacgcccgcagggccaaagacttcatagtcaagacgcctgtcggcgagtgggagcttgatggtagccaaggtaactatcacgactga

SEQ ID NO: 344365 - DNA, 213 bp, Pseudomonas aeruginosa
atgcccttgccggtatgtggttttgtcgtaggtggtgcgatcctccaccgtgtgtatagccacacctttgttcaggatgccgctagtcaggcttacagcgtcttcaagagggaggcgcgatatgcggtcaatcgcctcgatgacgatgatatcccccgcctcaataatcccagcattcacagcagcctggagctttcccaggccgtggcctag

SEQ ID NO: 344366 - DNA, 933 bp, Pseudomonas aeruginosa
atgggtgagagatcgaaaaagctgggtgaatatggtgaagatattgttgcctctttgctgactctaatagggtggaaatctcctcttccgggtattgatattgattgcttcaagcctacacagcatggctctgcgggctcccttagaagaacgcatgggatagattttctattttcctgctcctctcctttggaagatcagatgcttaaacatattttgatatcgtcaaagtttaaagctggtccgtatccgtcaaaccctgtagcaaagtttaaagaatatttcttagacttgtcggttgcgcttgaatgctttaagagatctgatatctgtaggaaaattaatgcctcttatcgtgacgtttctaatcaatctatatcgggggttcttttttggctaagtggaactgactcggttgatgctagccttgtggataaggtcgcagcctcacgcggtttggatgagtttggttatgggactatatatgttgtagataactatagagcgagttttctatttgactctatagggtacgtcaatggtaggtatggttctgaaaatgtaagttttctgtatccgccaactggaaagaatatagcggccgtaagcaggatgacgcgtggcagaattcttcctgtcgagtatctgaatagtggaatgattttattttctgctactcaacatgatcagagatatctggtgatttgttgtcaggatagcttcgatgaaatgggtctgaggcggttggtcggttactctatgtctgtagctcttgcttatcctagtaaggttattattgcatttcctgactatgactttgttaggcacggagagcaggtaggaacgctaaaggcagctttgaatgataaagattttgctcagagtatcgaggtggtttcctatctgaaggattttcgggggattgaggtatga

SEQ ID NO: 344367 - DNA, 1113 bp, Pseudomonas aeruginosa
atgactgtacgcgatgctgaagcaatacttccccagggcgagattctccgtacatatttagtgcagccatttattggtaagggggatcttaagaatattctccgtagtcggggagtctttctttccgataatgagaaagaaaatactatacctgctctctatctctctcttgttaggcctgaagagttttttaagctacagcaggcctacacagcaaaggaggataacccaaaaataatttcgcaaaggattaagtggcagggtgataagactcttatagaaagtattcctgatgagttggatataaatcaagttcttgatttggatttctcaaattttaaagtggttggtgttcccgctttttatccagtttatggtgatcccaatgtaataaggttggacttcacaattgagagaatggatttttcaaagagtttctctgatgcgcgtagaagttttcgtggttcaatcgaggtgcaaagggctaaagctggtgatgagcttctaattattagtactcacacggcaccggaaacaaagataactaataaagctgttgctaagcatttgattgggtactttaaatcaaataatcatgtttccccggaagagcgtataaggccgatcacctttggtttgtttgataacgaggctcgctttgactacttccttaatcttacaagtaatagccgtctggctactttgagctttaaggaagtggtggatattggggtttcaccagatgaagaacgtgctttgccttctgaccttgcatggatgaaagagcgcattagaaatttggatctcaaaggaataagtttagaagagtctgagtttttaacaaatgtatcataccggccttgtcttttcctacatcgccttgatgccaaatttgtttttagtacttctggtcttgatggggagtgcattatatctctggcgtttcctgatattaatcgcgggaaaaataaagatagcgagttagaggttaagatcaaaagtataagttttgataatattcagagggggatggatagaaatgatgcaaaagaaaaaattctcagggagttggagtttgagaagtttgaggttttaaagagtattagtgtgtag

SEQ ID NO: 344368 - DNA, 810 bp, Pseudomonas aeruginosa
atggaagacagagagcaactgtacgagttgctggccaagaaagactgggaggcgattggtccatttttggatcaggtcacaaaattttttgaaactgagttcttttctttcgcggagtctttacctgctgctgagcgtgcaaaacagtttgagttcactagcttgactatcgagctaggtcagcacggctttagtcagggtttcgttgatcgctttgtgaatgagcgcctgaagctaatgcaggaaatccagcaccctggactcctcagctatgcacagtcgcatcaacgtctccctctagcgaagcagattattcagtcttttttgcagaagaagccagaagcagttgctgctagtctgcgtgaaaatatggtggttcgcacaacagaagtaatagaaggcaaagcaaaaaccattcggttatttaaatctagccaggagaagcacttctatgaggcggtgcgccgcgcttttccaacctatcatccctaccctaacgttgcattaagctgtgtattggactattcagccattaaagaccagttgtctgaaagggctaggtcatatttcttccagtcaattattgactgcgtagtgtttgatgtggccagtgggtatgagccaaaatatttcattgagttagatagttgcttccatgatgatgcccgcgctcagagcaacgatcagctaaaagactccatttttcgagcagcaaacaccaagctaattcgtgttcgccccttaaatgctagagcctcgtcgactgatgagtttgaaaaattggtacgtgaagtgatgcgccaattttaa

SEQ ID NO: 344369 - DNA, 351 bp, Pseudomonas aeruginosa
atgaacaacgcactcatcactgacgagcagcgcatcgtgctgctggccaacggccgcgcatccttgcagaacgcggacttcgatccggcgcccgtggtcaagctgttcacgccggacgccggcgcgacctggctgctgaccgagattgatcccgacgaccacgaccacgccttcggtctttgcgacccgggcctgggagagccggaaatcggctgggtcagcctgggcgagctggcgacggtgcgcggcgggctgggcctgccgatcgagcgtgacctgtcgttccgcgccgagaagcggttgagcgcctatgcgcgcgatgcgcggctggccgggcggatcgctgtctga

SEQ ID NO: 344370 - DNA, 279 bp, Pseudomonas aeruginosa
atgagcagccatcacgactacatcatcgaaatcacggcgcagcacgatgcgctcaagccgttcgcgccggagaacggccagcccttgcgcttcaagatcggcgacgcggtgatcttcaccaacgagtttggcgcacagttccggcgccgcgttaccgggttctaccggcccaccggactttcgggcatgtatgcccgcggtgcgcgctacctgctggactcgtcatcgccttggattccggttgcggaatccagcctgcgtcctgacgacgcggcgtga

SEQ ID NO: 344371 - DNA, 1677 bp, Pseudomonas aeruginosa
ttgatcgaaactgccttggccgaagggcgccgcgtacggcaactgcttgatcatgagaaccgattcatactggggaagcatcttggcgatgcccaaacagcccagctgcagtttgcatgggaggactacttagccttccaggactcggttgcgggctttatgcgccaaggattcgaccagatcgcagcggagcgaatgacaaagtgcctgtcggtagacgctgacgccatcctggccaaccccctcatagccttaccgtttcttgaggccgatgccgatgctgttccaacggtgctgtcaggcttcgagtcgaatcctggattgaggcatgccctggggctgctgaggtacctggaagcacagtccctggcgggcaataccgtggtggaggtcgggtctatttgtggaagtggtgatgttggagacgttggcggtttggatgatgtgcttcaggcagttcgggaatgtgaacgccaagggtgggttgtcgagacggagggactggttcagcttcggagcaactgctggctacagaacgcagtacgtgaccatctgaccagaatctgcgggccgtttcacccagtgtacagcgagcgcgagcttgaacacgctttcagtcgtttgggcgcgttcactcccgatctcttcgctcaagacatgctcgacgaggtatcgctggccattaacgctcgcgtcgtgcttgtgcgttatgacgatatcaaagcagccagtgaattcacccagcagtattgtgctgtctctgagctcctcacaaacgccgctccaacattggtgactgccgccaaatccaggtgcatcgcctatgaggatgaattgggggttgcccctgttccgttttacgaaattaccgacggtgctcacgcgccggctgttgttgttcagcagttcaatcagctgccgttgttcgagatttttcagctgctgacagagctggaaaacgtggtcaacttggtggctctgatcgataccactctgccagccaatgcagccgttgagcagatgtctcgctatttcacgacagtcgatgtccgagtgcgccgacaaggtgccttgccgttccagcagtgctatcggggactctctgagatcgaggcgcggatcgatgcagaggacgtacagcggatcgcggtggtgtgcgattgcccggagatctcgctgatgcttaaccggcgatacagctcggttccagccgagacgaaagtgcccaaaaagggggatctgatccgcctctcacctcgcggcctgcggcgccaggatgacgccctgatccgcattatgaacgtaaaagtgggtgagctctttgttctgcaatcgcagatgtatcggacgataaaagccgaggagtttgcagggtactcgtgggctgcaggattcgctctcagtcctcgtgaggctagcggagtggctctgcctcctgtgctggtgttcacctctgctcgacgtggttctgacgagagtgggtctggggagtatggccctcgtgtgtgccgccctgaagaacacggctctggtggggcaatgaaggggatggccctagtcaggaacctgcaggcgcagggggttcgtgtgattgaacactgcgtgtatgagattgagggttttccgagggttgcgggcgctgggacgttgcagcggattgtgccgttggttgaatga

SEQ ID NO: 344372 - DNA, 1413 bp, Pseudomonas aeruginosa
atgccgcctgagatcgcgctgttcgacttcgcaggaggctccataacggctcctgctgggtgtggcaaaactcagctgattgcagacacgttggctcagcacaccggcccaagacccgttttgatcctcacccataccaatgctggggtcaccgctctgcgcgggcgtatggcccgtgcccgggtggcctcaggctcgtaccgagtagccaccctggatggcttcacgatgaagctcattggcagattccctgccaggagtgggcatgaccctgcaatcatgcaacttgccaaccgggcaaacgattatccggctattcgcgcagcagccttgtcgctactgagggcccggcatgttgatcaggtgttgcgatcaagctattcccatgtgttggtcgacgagtaccaggactgcaatcaggtgcaacacgccatcgtcacctgcctggccgcgaccttgcccacgtacgtgctgggcgatccgatgcagtccattttcgacatcgcgcaaaacaggttggtcgattggcacactgaggtgatccgagactttcccgtcattggcgccttgaccacaccttggcgctggcgactcgccggcgccgagaacctgggtaactggcttctccaagtccgacaacttctggaagcaggccagcagttagacctcactacagcccctcctgaagttcagtgtattcagatccaggtcgcgaccgcagatacgcagcggcgaaacgcagccatgacccctctgcgtcaaggggagaccgcactcgtcatcggcgattcaagaaacgccgttggccgacaacgcctgacaagccaaatgtcaggcgctacgacggttgaacccgttgacctgccagacctcatctccttcgctcagaacttcgatcttgcagggccatgggccctcaaccagatcgcgaacttcgcagggattgtgatgaccggcgtcggcatcaatcctttcctcacacgtgtcgagacgattcgaaacaaccggcaccgcaccccgcctacggttgcagaatccgttgctgtgagcttcctcgctgagccgacctttctgggggtgatcgatcttttgcagcgcttctctcagcagcaggactgccgcgtttaccgcccggaaattcttcgctgttgcattgcagcgctgaggatggccgcgtcccgaacccacacattccttgaagcagccgttcagatccgagagcgcaaccgcctccaaggtcggccattgacccgccgggcggttggcagcacgttgctgttgaaggggttggaggctgacgtcgcggtcattttggagccggagaacatgaacgccaggaacctttacgtggcaatgacacgaggtgccaaacgactcgtcatctgcagccagaaccgattcctcggcgcctag

SEQ ID NO: 344373 - DNA, 1731 bp, Pseudomonas aeruginosa
atggcaaggatccgtcggattcagatcgagaacttccgctctatccaacgcttggattggtgtcccgcaccgggcttcaattgcttggttggccctggcgatagcggaaaatccagcattctcgatgccatagatctttgcctgggtgcgcggcgcagtgcaccgttcggcgatactgacttttacaggctagatgtcactcaccccatcctgattacagcgacgttgggcggcctccctgacgacttgatcaacctggatagctacggtgatttcctgcgtggctatgaccccgctaatggagcgctggaggacgagccgcgattcggcattgaaacggtcttaaccctgcagctcaaagtcgagagtgatcttgagccggtttggcagcttcactcggaacgggcaatccaacaaggcatcgagcgaaacctcgcctggaaagatcgcgcacggattgccccagttcgtatcggcagctatgccaacaccaatttttcgtggagccgtaactccatcctcaacagactgacagaggagaggccggctttgggcggtgcgttggcagcggcagcacgggacgcccgcaacggcttcggggtgcaagccggcgcgcagctccagcaaccccttcagatcgtgacgcagacggctactcagcttggcgtaccggtgggcgcctttacccaggccctgctcgatgcccatgccgtctcaatcggtgacggagccattgccctgcacaacgagcaaggcatcccactacgatcattgggcacgggatcctctcgactgctgatcgctgggctccagcgccaagcagcccaagctgcatcaatcgcattggtcgacgaggtagagttcggactggagccgcaccggttgattcgattcatggactccttgggagccaagaactcccctgagcctctgcaagtgttcttgaccacacactcgcccgtcgctctgcgagagctgtcaggacatcaactctttgtggttcgagcacagcagggccatcacgtagtgctccaggccggcatatcgaatgacgtacaaagcacgctacgaactgaccctgaggccttcctggccaagcgcgtcgtggtgtgtgagggagccagcgaggtcggcctcatgcgtggcctggatcaatactggggcggtttgggcgccacctccttcttggccctcggcggcgcctatgtcaacgtcaacggcggcgaacctgataactgttacacgcgaggctcagcactgctaagccttgggtaccaagtgctcgtcatcgtcgacgcagacaagcccgcgactgcagcaatccaggctgcatttcatgcggcaggtggacaatcggcaacctgggggcagggtcgagcccttgaggacgaactgttcatcaatttgccagatgctgcgatcgacaggctgatcgctatagccatcgatgcgcgcgatcgtgaactggtaaacagccacattcgtgatcgatcgcaaaacgctttgagcctggacgcaattcaagcctttcgcgcacaagggacgccctatgccccacccacgcgggcgttactgggcctcgcgtcgcgcattcgtaaaaatggctggttcaagtcggtcaccacctacgagctcatcgcaagaacgatcatcggccctgagctccaggcctctggccccgatctgcaagcgaccatcaaccggatcaggggttgggtacatgccgcctga

SEQ ID NO: 344374 - DNA, 315 bp, Pseudomonas aeruginosa
atgactttgaatctgagcgaagaggaaatgcgcaaagcactgtttgggagcgccggctctgttgcgtcggcagtgaccgaagcccctgcggcaaagcctgtactggatagtcctgccaagcccgtgcagcgcaaatcatcgtctcccaggcttcgtgtaacgctgaaggtgaccaagacgtttgaaggggacgaagagatttttacctacgacgccaatacgctcagctctttgatcgcagagcaagaggcgaagagcgctgccaagaagaagcggtacaaatactttgaggttctctccatggtgtctgtgtga

SEQ ID NO: 344375 - DNA, 1104 bp, Pseudomonas aeruginosa
atggataaccgcgtgaagcctcgccaaaaaccaatctcttgggctctccctttggactttcccttagacgacctgatggccacgtccgaattgctcaaggaagcaaactttctgctacctggatatgtggccccggaagcgggcatctaccagccggcagtctatttcaacaatcgagatctcgggatcaagactgtgatactcccggatcgtaacgtcgcatcccggttggcaaaggttgttcagggcggtcgcacgattgataacgaccaactgagagcgtgcgcgggcctgctcggatttgcgcacctgttggacattgggttcgagccgagtattgcctatcacgaactcgctcatggctgcggcaacgaaagtgctgcagaggagcttggctggttccgcgccgcgaacaatgcctctccccaggacatgctcaatgtagcgttgggttactccgacggtgtcgcgcgctcctacgttgctcgacaggcgcatatcggtgatatggctgcacctctcaaacgttggaaccgaaattacatcgttgcattgaaagtgctggagctggattacgccaagctgcccgccttggaaaaggccttgcggctggtggactggatggtgaatgaaatgatcttcgccgggcccgcgatgatgctcgcggtcatctatctagggtcgaagtcgccaggccgaaaaaaggtgttcaaaaacaagggatctgccgacaggtctgcggcaatcgacggtgtgaagaatgccgcctgggacatcactcatctcagtgatttcgtacggcgcatcaacgaatcgctggctgaaaacaaggttcagtacctgttcgcgacgtttgataatcacctgaaactcatggcgacactgctggctgaaatcgggactcagggagctagccgcgcagtcatggcgcgaggtttgtcccagtggtgggcaccgaaggaggcggagctgatcgcgcaagtccttatggagcaggttgagcggatcaacagtgagcatcatgttcccaaaacgtccgacgatcccgacttcattccaaagatgatcgccaaaggcgagcgagccattattgacgcgctatag

SEQ ID NO: 344376 - DNA, 492 bp, Pseudomonas aeruginosa
atgcagtctctggatgaaagcctgcacgactacgcctgcgacaatgagctggtgtactcgcggtacgcggacgatctggtgttctcatcgaagaatacgttcgaccggcaagaggcaatccaacacatcaagctgatcggcaagtgcctgattgaggaagggttctggctcaacgaggcgaagacgaaaatcgtcccgcccggagcccgcaagatcgtgctgggactgctggtcgacggcgatgagccccggctttccaagtcctataagaagtacgtgggtgatcacctctactacctttcccaccccaagatcgcccctatggcccacgccaagcgtcatgggtttcaatcgctacaggggctgatcaatcatgtcagtgggaagattgcctacggcttcagcatcgagccagattgggccaagaaacaaggtaaacagctaaaaggcatctgccgaaagctcgaactcgaccacgtcatctttccatga

SEQ ID NO: 344377 - DNA, 1260 bp, Pseudomonas aeruginosa
gtgtatcagttgaaagaacaagaggagacaaagctctggcttagccagttcgaccactgcgcaaaggatttggaactggctgaacagctcgtcgattcaattctctactgcacactgagcgaatttaaaaacaacttgataaaactgataaaaaccaagcttccactgaggcagccttcagcccttttcatagagcgagagttacagtccactaaagcaacgcttccaccccccatctacaagcagaaaaaaactctcaatccaatttcgaaaaaaaagcacaaacgggcgcatggtgccgcaatacaggccataaaatcgctccgatatacgtctcaagatattgggagcgaagcgctgacagcgcatgtcgcgagtacgctgtgccgcaagaatgaccgccgattcctgcttcaccctacagctgaaaatgtaagaaattccaaagtcagaaattttgtcatcgtgaccgatttcattggaagtggcgaccgggcacgaacgctgctcgatgccatgtggaacgttgcgtccatacgaagctggcactcagggaaatttatcaagttctgggtcatggcctacagcggcacagacataggcgtgcacaacgtccgcagccaccggttttctcccaatgttcatatcgtcaacgagtgcccgaccctgttcaacagtttcggggagggtaaggacgaaatgattgagctctgtaagaaatatggttacttcagcaaagacccattgggctggaaaaagaccgcagcgctgttggcattcgagcatggggcaccgaacaacatgcctgcgattttcgtttcagggaaatccagaggggcaaaaaaatggacgccgctgttccccaagcgcgttacggaaaccctctggagaacagccgaagtcgacatgagcgaggtcatctcccatgccctcgatgagctgaacatcccagaaatctcaaaatccccccgttttcgcagatcaaacactaaggacaaatcggccttcatcattctgctcgcccatgctcaagggaagcggcgactggcagagcttcgtcgagtattgccattgtcgctggacgtcctcatcagtgcaaaagaccgtgcggtcagcagaggctggctcacacgatcaggcgcgctgacccttgctgggcataaagcgatccgcttgctccgtcgtcaagggaggaagaattttgtggccccggatcccttcgcttcgtattatccaacgcagctgagggctccgctgtag

SEQ ID NO: 344378 - DNA, 1446 bp, Pseudomonas aeruginosa
atggaacaacccacaaggagtttgaacgagctcaagattgcgttggcaatccttcaactgagctcggaggttggggcgtctcgctcccgtgtaatcagctcgactgcactcattttctgctggagaaattgccctcctgacaccttgatcgaggtgcttcagccccgcatcaaagggaaatatccgcaggcgatctttgaagtgctcacagataatgtggatgagatcgacctcggaagaggctccgtcgatgccgaggcattcctaagtgcccgcgtccagtccgtggctagcgtaccggccatcatcagacaccctgtgttcaagcgagcgatcactgatgcggttgtgttctcgggcaagatcgatcatttgatcgcgcgcctgcaacgcccaaaacctgcacctgacggcgctgtcattcagtcccggaacaactactacagccgggagccagtgccgcaaaactacacgacttatccgattttctacggcacagatcggttactggagcctggacgcaccgtgaggttcggcgggtttcgtagcgatgacacgatctcgttcggtatcgccaatgtgtccatcccccatatccacagagagggaaatcttgagcgaccttggctatggcctacccaatccaagggaagccccaacaagcacattgttgttcatgacaatgaggtcatggctctggaggcgtggctagcaagcgcaaaggggtatctgagcaaactggagccgggtcatgatccgtccagaaaggaaggtttgctgttcatccacgggtacaacgtcagcttcgatgccgcactgtggcgagccgcgcagctctgtcacgacctcaagttcccgggcatgatgctttgcttctcctgggcatcacttggtacgcctggcgcgtatccggcggatgaggcaacggtagagtggtcagcaggaaatctcaggcagtacctgaggcatgtgacggaggagctgggtttgtcagccttgcatatcgttgcccacagcatgggcaatagagcgcttttgtcagtgcttgaaggctggacgcacacacccggaactacgcccatccaccaggtcgtcttggcggctccggacgtggacagcagccgcatgaagcagcttgggaaagtcttcgatacttacgagcaagtgacgctctacgcctccagacatgacagggcgatcgctgtgtccagacttgcgcaccgctatcctcgggcgggcgatgccaacccacccttggtcatgcgctacttatccaccgtagacgtgtcggctgccggtaaagacatgtttggccttggccatagctacatggctaacgtctccaaggtatttcgggatctgttctacatcgtcaggcatcgccacaaacctgatcagcgcgccggcatccgtaagagggaggagggctactgggagctcacctag

SEQ ID NO: 344379 - DNA, 627 bp, Pseudomonas aeruginosa
atggatagcctggtactcgaactgcagcgtgacgtgcttgatcgctcgattcacatcactgacctattacgtaaagcactgctggtctcacgaaagctcaaaatctcagacattgaggaatggctgagcgacgagctgaatggatacaacggcaaatcggtaccgagctatcggacactcactggcgagcttaaaggcttcaacccgtatagaggttggataccgatgatgcttggtgacgacatcaacgacatgatcagtgtcacgcccatccacgactcagtgagccaaatcatcgatctggtcgagcggtctgatggcggcagcgtgatgatcaagtttcctcaggacatgagcatgaccatcatgcggatgattgggcgggacattgaacctactctgcacatccccgtgcaccagctcgtgcgcattgtcgacgtcaccaagacaaagatcctcgacttcgcgctggatctggaaactcgcgggatactgggtgaaggaattcggtttagcaaagctgaggagcagcttgctcagtcgatcacatatcacaccatcaacatcgaacggatggacaactcccagatccagcaggcttccgatggatcaaaccagtcccggtaa

SEQ ID NO: 344380 - DNA, 345 bp, Pseudomonas aeruginosa
atgagcaaacacaaccaaatttcgattggcacgatgcagaactcccagctccaacaggatgcccagcactcaagccaacacctcgatcaaagcacgtcgttggtcgacctcaaggcttttttggaagccttcagccaggacattgcaaaggtcacagatcagaccaccgccgaagcgctccgagtcgacgttgagaccatccgcctgcagagccagtcgccttctccgaaaaaaggcatcatcaaggaatgcttgggatcgatcaaaacggtgttggaagggacagctggcaacgtcctgggcacctatctcccaagcgtcatcgcgcttattgggagcatgtga

SEQ ID NO: 344381 - DNA, 648 bp, Pseudomonas aeruginosa
atgatcacggccaccccttcccccgtcgacgacttgctcaacccaggcgagagcgcaccacgtccgatcaagattctcgccgctgcaggcaagatgttcatcgagcacgggtaccagggcgccagcatggaggagatcgccaaagctgctgctgtgacccgacagaccttgtacaaccgctatcccgaaggcaaggagtctctcttcgttgcggtggtagagcggatgtggaaagcgttcgcggtcattaatgtggcaacggatgaacgcgccctggccgaccctcgggccggcctcatacagattgcgaccgacttcgcgtgcttctggtcggggccgaccgccaccgacttcctgcgcatggtcattaaagagggtcaacggttccccatgcttgcagaacgctttgacgaggttatccaggcgccggcagtggcctctgtcagcggttaccttgcggagctgtcacgcagagatgtcctggcagttcaagagtctcagactgccgcgcgcgtcttcatggcgatgcttgacgggggaatcctgtggaagcaagtcataggtaagagcgatccactcgcccaagatgagatcgagcaaattgtcgaacgcacggtagacaccttcctcagatcactccggcactga

SEQ ID NO: 344382 - DNA, 831 bp, Pseudomonas aeruginosa
  misc_feature (204)..(204): n is a, c, g, or t
atgaatgataaaactcgtgtcgctgccatcggaatgtgtgagcgcgtgctgcgtgaggagtaccaacactacgccgagcacggcatcttacgcagcaccaatcgtttcatagaaactctgctgggtcggactcatgagcttgcgggtgcttacatagagcttggtgagggcttggctgctgagcctagggtattgaagtccttntttgagatatacaccgcagcaattcaatcctggagccctcagaaaataaagcaggctcgtgaagatagggatgagctgactgaactgaatatgcggattgcaaaggcttcagagactctctcggaattgctgtcgcgccggactgaagttaaagagaggtctggtttcacctgtgatacttactatcacattatggatgtcgttgaaggtgcttctgagggtaacgggctttttgggtcttgcctgaaggaaaagctagctgggctgacctaccagtatgatctcaaatattggccgaccattggtaaagtggtggagcagatcggtattgatgcggctaaagcgattactgtggctcgtgactctagtataagcgcggcaactgaagcgcgtcgcccagggttggctgatttcctaaaagccttcgaagctgggcttgaaagaaatagagtgggaaataacggacttatccccgatgagttttcgctgacagatagttcaatggcttctttagttaactgcgggcttgagctggaagttgaggacatggtgggtgccgaatttgtgaagcgctttcggcagcgtgaacgtgaacgggcgaagggagaggggcaggtaggtggttga

SEQ ID NO: 344383 - DNA, 228 bp, Pseudomonas aeruginosa
atgtacacatacatactccatcacacctatggcccctcagagagcgaaagttacaagctgctaggcgtgtttagctcacaactcaacgcagagcaggcgaaggaccagtaccttacccttccgggcttccgagactaccctgaaggtttttcaataatcgtctactcactggacgaatctcattggacggaaggcttcgaggctggagaagaccacatctttgactga

SEQ ID NO: 344384 - DNA, 756 bp, Pseudomonas aeruginosa
atggtcgatccccatcacgccgcacgttggtatccaacggcggcatacctctacgtcttgtggctggatgcgctggcgctggcttgggaatacctgcgccggcatcccgactaccggctcgactggctgcgccgtcatcgccgttcgtcgtcttcgcaaacagcgcaacgctggggcctgcgcctgctggaagacccggcgctcgatgcgcgcgacgcgcatccggcctggcagcccggccacgctgccgtggttcagctctatccggatgacgatccgccagcgaacgccgtacctttcgagttctggcgtattcccggccacaagcaactgatccacgacggcaagcgactgtcgctgatcgcgcacaaccctggccgcagccggcgcctggcgttcgcgccaggcctgcacgacggcatggcgttcgcctatgccgtgcgcgcaggcgctgcgccgccggccggtttcgcgactgatatggcgcaggccgtacccgccgggatggcatcgcccaggccaacatctgccgtactgcaggaattacacactttgcaggcgctcgacgcggccctggcaggcgcgtcctcgcgcgagatagccgaaggattgttcggcgtggatgccgtcgccgccaattggcacaccgacagcgccttgcgcgcccgcgtgcggcggctggtgcgccgtggcgatgcgctcatgcgcggcggctatcgacgcctggcgcagcttccgccgctgccgtcgcagtag

SEQ ID NO: 344385 - DNA, 315 bp, Pseudomonas aeruginosa
atggccaacatcggcacctttaccgcagacaaagacggcttcaccggcacgctgcgcaccctgacgctcaacgccaaggtcaagctggttcccaacgacaagggcagcagcgagaacgcccccgacttccgcctccaggccgcaggccacgacatcggcgcagcatggaagaagaccagcgaggccggccgcgagtacctgtccgtgaccctcgacgatccttcgttcccggcagcggtctatgcccgcctgatcgaaggcgaggacggcacgcacgacctgatctggtcgcgcagcaagccccaggcggcgtga

SEQ ID NO: 344386 - DNA, 381 bp, Pseudomonas aeruginosa
atgacaccctcctcggtcaatcagggccgcgtgctgaccatcagctcgtcggctgcgaccacggaagaggctgaagagccccaacctgagccggcccccgaaccgctgctgttcagccctggccaagtcgtaatgaccgctgccgtgagccacctggtggaaaccggtcaactcaacccagcgcctttgctgaaccgccatctggcgggagattgggggacgctggaccaggaagactggaacaccaaccagagagccctgaagttcggcgataggctgctgtcgtcctacgacatcgatgccggcggcgaatccaggctctggatcatcaccgaggcagaccgcagctcaaccacgcttttgctccctagcgactactga

SEQ ID NO: 344387 - DNA, 1284 bp, Pseudomonas aeruginosa
atgctgtttcctgcctccgtcgccaacggcatgtccctaggtgccggcggcagcatggggtcgagcttcgggtcctacggcccgcggtctctgtacaacatcaaatggaacggcaaggtcagcgggttcctcgatctcatcgccgcccgcgccggcgtgtcctggcgctacaacccaaccgagaaacgggtcgagttctactacctggacactcggaccttccgcatctacgcctttgacgacgtcaacacggtggactccaccgtgcgttccggtatgacgacggccgccggcatcagcggggacggctccggatccaccggacagaatggcagctccggcatcagcggcgactccggcagcaagcagaccaccagttcggagctgaagacatcgatcctcagcgacatcgagaacagcatcaactcgatgctgacgccgagcatgggacgcatgtcgctgtcgcgtgccacgggcaccctgaccgttaccgaccgtccagaggtcctcaaccgtgtccagcagctggtcaaccgggagaacgagagcatcaccaagcaggtgctgctgaacgtcaacgtgctctcagtcgccctgaccgacaaggatcaactggggatcgactggaacctggtctacaagtcgctcaacaacaagtggggcatcggcctgaagaacaccatgccgggcatcgatcaaagcgcgatctccggctccgtgagcatcctggataccgccaacagcgcctgggcaggatccaaggccatggtccaggcgctggcccagcagggccgtgtctcgaccgtccgctccccgtccgtgaccacgctcaaccttcagtcggcgccgatccagatcggccgctacgacagctacctggcctccagccagatctccaacgtcgcccaggtcggcagtaccacctcgctgatcccgggcgccgtgaccagcggctacaacatgagcctgctgccgttcgtgatggaaagcggcgagatgctgctgaagatcaacatcaacatgacctcccgccctacatttgaaatgcagaccagcggggactccaaagcccagttccctagctacgacatccagctgttcgaccagaaggtacgcctgcgcagcggtgagaccttggtgctctccggcttcgaccagaccaccgaggacaccaacaaggtcggcaccggcgacgccggattcttcggccttggcggcgggctgacccgcaataccaaacgcgaggtcatcgtggtgctgatcacccccgtcgtgctgggctga

SEQ ID NO: 344388 - DNA, 1476 bp, Pseudomonas aeruginosa
atggccctggccgccgacggcacgctctatctatcggagagccaccagaacgacatacacgttctgtcgttcatcgaccgtctcgatcgccgtggcttccgataccagctcaacctcaccgacctgcagaccattcaccagctctaccgcgccgtcgccatggacggcctggtcgatagcgatggccagcgcgccacccagatgcaggagcgcgtggtcaagatcattcgtaaggccactgagctgcgcgccagtgacgtgcatttcgtcgtgagtcccgccggcaccggcagcaagatccgtttccgcgtcgacggcctgctgaagaccgtcgagcagtaccgcagccaggaactgcacgaactttgcgcaaccatctaccagtccatgtgcgacgtggccgagccgcttttcaagccacaacttgaccaggacgcgcggatgagccaggccttcgtcgagaagctgaacctgttcggcgcccggatcgcgacccgcccgcgcgccggtgggttcctgatgatcctgcggctgctctacgacgataccggcctcgacagcctggagcagctcggctacctgcccgagcagaacgcgctgttcgatcgcatgatgcgcatgccttacggcatcaacatcctgtccggccccaccgggtcagggaagtcgatgaccttgaaggtcaccatggaaggactcgataagctgcatggcggatccaagcatatcctgaccatcgaggatccaccggaataccgcattcgcggcgaaggcatcaaccagaccccactggtctatgacgccactgacccagacgcagaacgccaggcctgggccgcaggcatcgccaacggcatgcgcctggatccggactacatgatgatcggcgaagtgcgcgacctcttcgccgctgtcgccgccttccgtggcgcgatgaccgggcacggcctgtggtcgaccctgcacaccaatagcgcgatcggcattgtccagcgcctcaaggacctgggtgtcgaccccggcttgctgttcgatccggccctgctgaccggtctgatcaaccagagcctgctgcccaagctctgcccccactgcaaagtgcgcttccaagaccaccaagaccagctcgcgcccgatctggtcgaacgggtccagcgcttgaccgatgtttcccaggtgtacgtcaaggggcctggctgccaggcctgccgtggctccggagtcaacggccgctcgatcgtcgccgaggtggtgctgcccaccctggccttcatgcgtgtgttcgccaaaggcggcccagccgaggcacgcaactactgggtcaagaccatgcagggcatcaccaagcacgcccacgccatccgccgcatcaacgagggcatgttcgacccgcagatagtcgaggatttcattgggccactcgacttcgatgagcatctgctcgacgacagcttctactcgcaggaggcgtgctga

SEQ ID NO: 344389 - DNA, 1080 bp, Pseudomonas aeruginosa
atggggggcttctgggagcagttgcagttcgccttctacagcaagcagttcggccgcaaggaacgcctgcagttctacgaaagcatgtccaccctgctcgaaaacggggtcccgttgaaggacgctgtggcagaggtgcacaagatcttcgctcatgagggacagcatccgtttcatccggtggccatcgccagtcgcgaagcgctgatggggctgtccaacggcaagcgtctggccaccgccatggcgctctacctgcccgcccaggaacgagcgctgatcgaagccggcgagatgagcggcaacctggttcaggccatgggcgatgccgtctccctggtcgaggcccaggccaggatccgcgccaccatctggcaggcgctgctctatccctcggcgctgtccgccatgatggtgttcctgctgtgcatcgtggcctatcgcatggtccccagcctggccaggctctccgatccagtcacgtggaccggcccgctcgccacgctcaacgccattgccagcttcgtcacaggacctggtatctacgttctggtcgccgtcatcaccctcacggtggtggtcatcgtcaccttgccgacctaccgctggaaaggccgggtctggctggaccggacgctgccgccctggtccatctaccgcatgctccagggcaccaccttcctgctgaacatggccgtcatgctcaacgccggcatacgcccctacgacagcctggccagcatgatcaagatctccccgccctggctgaagcagcgcttggaagctgcccgctacggcgtgggcctgggccagaacctgggagtcgcccttcgcagcgccggtcacgatttccccgaccgacaggccatccagtacctgtgcatcctcgccaaccggggaggcttctccgaagctctggtcaagttcagccgccgctggcaggagaccagcctcaagcagatcgagctggccgccgggctggtgaagaacttcgccctgatcttcatcggcgcgctgatgatcctggtcctgctcggcgcctaccaggcacagcagctcatccaatccatgaaccactga

SEQ ID NO: 344390 - DNA, 651 bp, Pseudomonas aeruginosa
atggttcaagcgcccctcaagcttctccaggtgggaaggcaggcgccgaccaacgtccggatcgtccctgaattccctccaggtgacctgtcctacttcgcgtatggctcggttgccgtggtcggtggattggctcagcaactgcatgtagtcggggtccagctccagggcttctgccggggataccggttcgtcgtggaggatgtagacgttgccctgtacttgcccgttgaggtcgttgcgcaggcgtcggccgaggctgagccagcgtgtcaatcgaagaaccgtgagtgccttggctatggtttcgcgcgaggcgatcttgcccggctgcatgccgagataagggcgcagttgctcgtatgtcgggaacgcggtcagcccgtcgtcgttgatgagcaagcggaacacttgccagcagttccgctccagcggggtgaggcgtttatccagcagcaggcgccgaggaacggtctcatgcgggttgccgctgaaaatgatgccggaatactgttgagccagcggttcgccgctctcggcagcaagccgcttcttatacaaatgggcctcgagatgtcccgaggccgaatccagcagagtcgagatgggaaagcgcgacagcctcatggtgctgtgtcgccttccgactga

SEQ ID NO: 344391 - DNA, 489 bp, Pseudomonas aeruginosa; identical to SEQ ID NO: 324425

SEQ ID NO: 344392 - DNA, 756 bp, Pseudomonas aeruginosa; identical to SEQ ID NO: 334462

SEQ ID NO: 344393 - DNA, 753 bp, Pseudomonas aeruginosa; identical to SEQ ID NO: 334362

SEQ ID NO: 344394 - DNA, 693 bp, Pseudomonas aeruginosa
atgaaacgcccatcccctgcatcaatgattcttggcctctgcttgacggcaatggccggcctgctgggctaccagcaataccaactcattcagctccgatcaggcgtggacagtgccgcggaaaagacctcgctagaggcgatcctggctcgcttgaatcgagtcgacgagcgcctcgacgccgtggatgggcagcacctggtcagcaacgaggacttccgctcaggccagcaggcactgtccaaccgcattgacgccgcgcaggccttcgccaagcaggcctccgacgccgtcgagaacctggctcaaaccaccgcctcggccggcgatctcctggtgctcaaggctacagtggagacgctggacggttctgtccgcacgctgcaagagaagcaagccaaggctccgccgctgatcgtgcctccaccgaagcgcggtgccttccctgtcaagcccaagccgaaacccaagccaatcgagcctccgcccttctcaatcctcggcgtggagtatcgcgggggcgaacggtttctgtcggttgcacctccgggatccacccagctcagccagatctacctcattcgccagggcgatgccgtcgccggcacgacctggcgactgaccgaccttgacgatcgtaccgcgcacttcgacgtcgccggcgcctcgcgcagcgttcgcatccaaccatag

SEQ ID NO: 344395 - DNA, 255 bp, Pseudomonas aeruginosa; identical to SEQ ID NO: 328955

SEQ ID NO: 344396 - DNA, 195 bp, Pseudomonas aeruginosa
atgggcttctcgatcaccaccagcaagctgcccaaggatgcctgtatcaccctgggcaccaaaatcgcgaagaacaccttcgagcagaccaagatcaacagcggcaccgctatcactggtgaggtcaccactgcggctgcgacccaggcctgcagcagcgatagcaacagcattacctggacctacagttcgtga

SEQ ID NO: 344397 - DNA, 438 bp, Pseudomonas aeruginosa
atgccgctgatgtggatcgtcctggtgctcgcgctcatcaccgggacctggctgagtgtacaaagcgaccacgcgacctcgagcgccgaactggccgaggtcgacaccctggccaggagcttgctgctctaccgctccagtctggcggagtacgcacacgccaacctcggtttcaccggttcgccggcggactccgctcttggtttaccggcctggttccgcaagccagcgcggcttcagggctacatcgccgccggcaccagctacgccttcatcgcctcgccgccggcagggctagcgacagccgtggatgctggtacggaatccgacctagttggcgtcaggcgcaacggccagttagtcacacgccgcctcggagccactgccattgcgctccctgctcccatccccgagggcgcggtggtcgcggtcaaataa

SEQ ID NO: 344398 - DNA, 489 bp, Pseudomonas aeruginosa
atgagcgacagcacctgggtgcgctcctggatgaacaagaacgtctacaccggcggcgagatgaaagcgggcaaactcaccgccgagggccggacggaagtcggcgagtacctacagctcaaaggcgtggccaccgaaggagccaactgctcgccgaacgggctggccggcatcacgagcaccgggctctggctgtcctgccagaacggaaagtgggggcgaaccgccgcctccatgcgcatgaataccactgcgggcgtgatcaaggactggtgtacgttgcacggccaggacagcggcatgatgtactacgactatgtccgctacgcgatcacctgcggcggccgattctgcgcggtgggcttcaaccagacctttggcaccaactactcgttcggcctgatcaccgagataggcccgggcttcaactacccggaaccctacaagacccccgactcgaccaacgtgaccgttacctgcgtgaactag

SEQ ID NO: 344399 - DNA, 504 bp, Pseudomonas aeruginosa
gtggtcgcctcggtgccaacgccggcgccgatcacaaccagccccgctccgaccaagaagcctgaatccaccactgtgctccccccagccgcaccggccaaggatggccacccctcttctcctcccgcggcttcggcaccgatcaagcccctggcctccaccgtgaagcccacgccgcccactccggccagcgtggcttccgcccctccggtcaaggtgctcacgccagcggagccgagccggcagttggcacagtcctggtcagccgaaacgggatcaaccctgcgcgacaccttggaagcctgggcaaagcgcgcacgctggaccgtccgctgggagccgctggatctcaactatccgatcgaagctcctctgaccttccacggctccttcgaggacgcggtatccgagctgttcccgctgtatgacgctgccgaacggcccttcctggtgaacgccagccggccgcagtccctgatcatcatcaaggagcgcaagaactga

SEQ ID NO: 344400 - DNA, 258 bp, Pseudomonas aeruginosa; identical to SEQ ID NO: 323739

SEQ ID NO: 344401 - DNA, 225 bp, Pseudomonas aeruginosa
gtgcgcaagcacggcggcaagcaggcatacggctggcagttcgacttccgctacctgcaccagaagtccggcagcaccgccaagccctacgacttcgcctgcgacctgcgcgcgctggtcacgcggcagtcgctgcccggctacgtcctgggcatcgagcggatgccggacaacggcatggagctgctgacgttccggcccgtgccgcagacggcacggggataa

SEQ ID NO: 344402 - DNA, 162 bp, Pseudomonas aeruginosa; identical to SEQ ID NO: 336412

SEQ ID NO: 344403 - DNA, 174 bp, Pseudomonas aeruginosa; identical to SEQ ID NO: 325756

SEQ ID NO: 344404 - DNA, 273 bp, Pseudomonas aeruginosa; identical to SEQ ID NO: 343659

SEQ ID NO: 344405 - DNA, 285 bp, Pseudomonas aeruginosa
atgacagagaagccgccaccgaacagcaagcgcaatgccaagcgcgtcggcatcggcgcgcgtccgcccgcgaatccacacgccgaggcgtggattcgtcagggcgacgccgatgcgctcaacaagggcgacctgtacaccgcacgtctgaccctcgacatcacgcccgccatgcgggcgcgcatcaaggtgtcggccttcacgcagggcgtgaccgttgccgatctgttgcgcgggctgctggagcgagagtttccagaacaccgcagggagagcacaccatga

SEQ ID NO: 344406 - DNA, 225 bp, Pseudomonas aeruginosa
gtgcgcaagcacggcggcaagcaggaatacggctggcaattcgacttccgctacctgcaccagaagtccggcagcactgcgaagccctacgacttcgcctgcgacctgcgcgcgctggtcgcgcggcagtcgctgcccggctacgtcctgggcatcgagaggatgccggacaacggcatggaactgctgacgttccggcccgtgccgcatacggcacggggataa

SEQ ID NO: 344407 - DNA, 225 bp, Pseudomonas aeruginosa; identical to SEQ ID NO: 340271

SEQ ID NO: 344408 - DNA, 237 bp, Pseudomonas aeruginosa
gtgattctggatgccgtgggcgcgtttgcaccggaatctgtcacccggctggcgaagctcaagaaggccgacattgccagcgaggccgagcggctggccgatggcacgggctggatgcccgccatcttcaaggccgcaggcccgcagaatgccgcgcaggaggcaggcccggagcaggacgccccggaggatgccgaggcaatggcggatgaaccagccgaggcgctggccgcttga

SEQ ID NO: 344409 - DNA, 195 bp, Pseudomonas aeruginosa
atgggcttctcgatcaccaccagcaagttgccccaggacgcctgtatcacgctggccaccaagatcgcgaagaacacattcgaacagaccaagatcaacagcggatccgcgatcactggtgaagtgaccaccgcagcggcgacccaggcctgcagcagcgacagcaacagcattacctggacctacagttcgtga

SEQ ID NO: 344410 - DNA, 207 bp, Pseudomonas aeruginosa
atgtaccaggagttgctcggcctgatctcacgctacggcggtgaggtgacgtccacggccctcgaggacgaatcgaccctctgtgagctgctggagcagatgctgcccgatcatgaggtagagcaagccaggaaacaggtgctcgaacttcatgccaagcgccgccgaccgggccgcctgcactcgccggcaagcctgaaggtgtaa

SEQ ID NO: 344411 - DNA, 417 bp, Pseudomonas aeruginosa
ttgggaaacaagagcgctaacgccgttgtggaccgcctcctgagtgtttacggggtcaagaacgacaatcagctgagtgagcttctgcagatcaagcgatcaacgcttggcaactggcgctcacgtgactctgtgccttacacaatttgcgtaagtgcggcggaggagagaggcgtcagactggattggttgctcaccggtgaaggaccaatgtggagaggggccgatccgcagaaggttgaggcaacgcctaccgatccccgcgagcaggccctgctggcactctggcgcgaactggacgagggcgagcagcgagaaatacagcttgctgctgaggaaaagaaacgtctgaagattctggagcagcgcctcgcggagctggaggccgttgtcgctgatgccaaaaggctggcatga

SEQ ID NO: 344412 - DNA, 1251 bp, Pseudomonas aeruginosa
gtgaccacttgttccggggaagcgatgcctgcgtactataacgctggctttatcctggtacgtgatgccaggcgtttcgccgaagtctggtacaggctcgccgaacgcgtccatgcggacccgctgatcaccaacaagatgccctggctggaccagctgacgctacccgtcgctctgcacgcgttgaactacaagacgagagcgctcagcgaacggttcaattatccgcttcatatcaagccgctatccgctgcgtccctaccgcccttcttctgccactaccattctctcgacacacttgtccgcgagcgttcgctatgggccgaactggacgaactggccaagcgtttccctgagctgcgcgaagtgcttgcgctggatgccaactggaagaaggcaatcctggctcctgcgcctcggctggctttctcggaaggtgattccaccggcactgtcgaggccggacaggacctggtgatcaccgggattccccggagcggaaccagccgtctatgccgtctgctctcccagcagcccgacaccgtggtgctcaatgaacctcctcaggtattcgaagcgctgaaactctcgcctcttccttggggactgccacgctactacgcagagttacgtcgcgacatcctggcgggcaggcccgtgccgaacaagcatgtgaatggccgcctggtcgacgacactgccaggggcaacgatcagtccagcgactatttcgctgaggtgcggggggcttcgtttcacctgggaacgaagaacacgcttgcctatatcgcccggctgcccctgatccgcaaggtcatgccgacggcgttgctgatcgcaaccatccgtcatccctacgacaccctgaactcctgggcgaacaccttcgagcacctgcgccaggctgccgtcgaacgccagccgttcggatgtcccgatgacctggccctcacgggatggcagcgcaaggcactgctggccattgccgataccgaccacctagctgtccggcgtgctctgtggtggcgttacctggcactgcaactggaggacgccggggattacgtccagttgttgcgctgcgaggacttcgtcgaggcgccgcaaacgaccttggccgctctgagaaacaaccgcaccttgcctttcgacgagcctgtggcatggagcaaggggctggcgccggacgagcaggagctggttgccaacatagtctgcgacgttgccgagcgattccactacgtcttgtag

SEQ ID NO: 344413 - DNA, 666 bp, Pseudomonas aeruginosa
atgttcgactacaccttccactggcgctcggcgttcaacgccctgccggagatgctcgccggcagcctggtgacgctccaggtcaccgcgctgtcgatgctcttcggcatcctcatcgccctgctcctggccttcgcccggctcggcggcaaccgcccgctgcgcgccgccgccggggcctggatctccatcgcgcggaataccccggcgctgttccagatctacatcctctacttcggcctgggctccttcggcctgcacgtcagttcctggttcgccctgctcgccggggtcaccttcaacaacgccggctacctcgccgagacctttcgcggcggcctccaggcggtgcccgagacccagctgcgggcggcccgctcgctgggcatgagcgcgccgcaggcctatcgcctggtggtgatcccgcagctgctgcgggtggtgttctacccgctgaccaaccagttggtctgggccatgctgatgacctccctcggcgtggtggtgggcctgaccgacgacctcaccggcgtcacccaggcgctcaacgtcaagaccttccgcaccttcgaatacttcgccctggccgccgtcctctacttcgccatggccaagctgctggtgctggccgcccgcctgctgggctggcgcctgttccgttactga

SEQ ID NO: 344414 - DNA, 552 bp, Pseudomonas aeruginosa
atggaggacatccttggcggcgcctatgcgttgatcctgctcgacgccgctgaattcagcggcgcgccctgccagccgccggcgctgccggcgggcaacccgctgttggcgcagaccgagccgccgcagtggctggaggctggttcggcggccagcttcgtgccggactgggcggaggacgactactacctgctgcgcgccctcggtggtcgcccggcggccggccaccagcagcgctacccgctgcgctggacggcgcgggcgcaagaccccaacgccggggtggtgcccagcgaatacggcgacggcggctaccagctgccgcactactggctggacggcaagatcgagcgcgacaactaccgcgagcatccctgggtggaagggcacctgccgaaccatatcggcggcaccatgcgtccggtgcagggcgtgccggagatgagtcccttctacgtagagttcgaggaatacctgggcggctacaacttcggcggcggcaacgcccagctcgatttccgcgacatgcgcttcgactgggcctgcggctga

SEQ ID NO: 344415 - DNA, 1392 bp, Pseudomonas aeruginosa
atgcttacccgcctcgaaatagatggttttaagactttcgagaatttgcagatagacctggccccgttcacggctgtcgttggaagcaatgccgcgggtaaaagcaacttgttcgatgcgattcagttgctctccagtcttgcggtgcgggatgtggccgaagcggtcaaagaaatgcgtggtgaaccattggaactatttcggcaaaccactaagagtaaagcaaagcagattcgcctcgctgctgaggtgttagtggatcccgtggtgcgtgatccttggggaagcgaggtgaagcttactcatactcgaatgcggtatgaggttactcttgaacgtcgtgagattcgaaacggtattgagagaattcaagttgcccacgaagcggtttttcctatcatgagaaaagacgaccgctgggctgacgcagttaaaccatcgaaagggtttcgttccgcctacctgaagtatgctcgcagtaagccttggttgacgacagaggtagggggtggaggggctacgttcgatattcatcaggatggtaagcaaggcagaaaccggcctgcgagcgctgctgaggctaccgtgctgtacagtattacaaatgcagagttccctcatctgtttgcactgcgtgaagaaatgcggcattggagacttctgcaacttgatcccacacttttgcgcaagccggtcgccgtcactgcatcagatacattgaatgccgatggtggaaatctcgcggccgtacttgctcagttgaagttggaaacgcaaacgtccattcgtccgaatggcgttttgagtgatattgctgcggaactgaacaatctgatccccggtatcaagaagttggacgccgaactgcatgatgcaagtcgcgagtatcggatcgagttgacgatgcgtgacggcttgcctttctcgtcgcgagtcgtatctgatggaaccttgcgggtactggccttgttgactctcatgcatgatcctcggcatcgaggcctcgtgtgttttgaagagccggagaatggagtgcaccctgcaagggtgaagcttctggtacagcgtctgcgggatatggtcagccagccggatcgtttcgaggcggatgacgagatagttcctctgagccaattgctattgaacagccattctcccgtagtgctgtccgccttgattgatagaagttatcacgcggtcgatggagtggttctctttgcagacacctcgacggttagtgatcccctggcgagggaaagcaggcgcaagactaggttgcgccctgttcggacacgtccgcaaggcgatcttttcgatgatgaaggcgagcgggatttcgtttcggattacgaggtcaagaccgtgctcgaaacagcgagtgcggagggctga

SEQ ID NO: 344416 - DNA, 663 bp, Pseudomonas aeruginosa
atgcgctatttgagtttagcgctatttgcggaaggccctacagattattattttcttcgaccgctgttgcagcggttgtgcgaagatatttgtgttcgggaagctcgtatgcctgtcgaggtgagtgaggttctggggctggatgatccagataccgaggaaagactcagtcgagatgtgcggattgctagatcagcgcaaatggctagaggtgcttggaatattctctttgttcatgctgatggggccaatgatccagatagagtgcgagaagaacagataactccagctcttcatcgtgttcgtgagttgatgggggctgaggggctaggggtggctgttgtgccaattcgggagaccgaagcctgggccattgttgatggaagtgccctgcgttgcgcgtttgggaccgaactcaacgatcaggagcttggcttgccctcgactagaaatgttgagtcgatcaccgatcccaagattattttgcagagagcctttactgctactcatcctactgggaggcgcttgaggcagggaacatcaccttatctcaatacgttgggtgagcaggtttctttggactctctgcgacgtattcccagctttagttcgttggagaatgatattcgtctagctctgaatgtcttggagttgctgcgatga

SEQ ID NO: 344417 - DNA, 246 bp, Pseudomonas aeruginosa
atgaatatcgacatcgatgcaattgacgaggttgtactcgcgcttctttatttgagcttgcacgatcagcttcgcgcttggaaagggttggattgggaagcgcttaatcggctgcatgagcgagggctgatcagcaatccagtcagcaagtcgaagtcggtgaccttctccgctaatggtttgcgcgaggctgagcgcctctttaagcagtatttcctttccgacgccagtaaaactgggcagtga

SEQ ID NO: 344418 - DNA, 858 bp, Pseudomonas aeruginosa
atgcctcctcaacgaccgattctccgctaccacggcggcaagtggctgctcgccccgtggatcatccagcacctggcgccccaccacacctacatcgagccattcggcggcgcggcttctgtcctactgcggaaggcccgcagctacgccgaggtctacaacgacctcgacggggacgtagtgaacctgttccgcgtcgcgcgggaccgtggcgaggaactgcgccaggccctggcgcttaccccgtttgcccgggaagagttcgaggccagctacgcggaaacgtccgatccgctcgagcgcgcccggcggatggtggtgcgcagtttccagggtttcggcagcgccgcggcgagcggcgaacgcacggggttccgctcgacgtcggcgaggagtggtaccgcgcccgcgctggactggcgcaactaccccgatgcgttggccgctatcactgagcgcctacagggcgtggtgatcgagaaccgcgacgccctggtgctgatggagcaccacgaccggccgagcacgctgcactacgtcgacccgccctacgtccattccactcgcagcaccaaggtccgccacaacgccaccggcaagtcgtaccgacacgaactggacgacgaccagcaccgggacctggcggcgttcctcaaggggctgagcggcatggtggtcctctccggatacccctgtcccctctacgaccgcctttaccgccactggcaccgcctcgagcggaatgccctcgccgacggcgcgcgcgaccgcatcgaatgcctctggctcaacgatgccgcgcgcagtggcctggcccagctcgacatcttccacgacaccaaggagcccgccgcatga

SEQ ID NO: 344419 - DNA, 1221 bp, Pseudomonas aeruginosa
atgacccgccaaagcgacatcttcgccgccggcgcccagcgcctgcagatgaccgagagcatcgagttgaccatccagagcatgcagtcctacggcgccgaccatgagcactgggctgtggcctggtccggcggcaaggacagcaccaccacgctaacgctgctgatctggctgatcgacaccgaccgaatcaaagcgccgaagacgcttaccgtgttctacgcggacacccggcaggagctgccgccgctggccatcgcggcgctccagatcatggacgagttgcgggaccgcggcatccacgtagaggtggtgtgcgccccgctcgacaagcgcttcatggtctacatcctgggccgcggcgtgcccccgccgaacaacaacaccctgcgctggtgcacccgccagatcaagatcgacccgatgcaggccgccctcgagcagcgcctggccgcgctcgacggcaacgtgctgatgatcaccggcgtgcgccagggcgagagcgccatccgcgacaagcggatcgagatgtcctgcggtaaggacggcgccgagtgcggccagggctggtaccagaaggtcctacccgaggcaaagggcctcaagggacggctcgccaccctcgccccactcctgcactggcgcgtctgccacgtctgggagtggctgaagcactgggcgccacttgccgagttcggcgactggtccaccgcgatgatcgccgatgcatacggcggcgacgaagccgaagagatcaacgcccgtaccggctgcaccggttgcccgctagccagcgaggagaaggcgctcgaaaccgtgctggccatgccgcactgggcatacctggcgccgctgcgcggcctgaaagagctatggcgggaacttcgagagccccagaaccgcctgcgcaaggccggcatcgagcggctgaaggacggcagcatcgccgcgaacccccagcgcatgggaccgatcctgctggagtcccgcttgatgggcctggagcgcgtcctggccatccaggccgagtgcaacgccgcagccgaccgcctcggccgctctcacatcgacctgatcaacgccgaggaagaagcccgcatccgcgaactgatcgccgccggcacctggccggatggctgggacggcgacgagccgatcgctaccacccctctcgacaaagtcttcgccgacggcgcggtacagccgctgctgttcgtctga

SEQ ID NO: 344420 - DNA, 198 bp, Pseudomonas aeruginosa
ttgctattgggtctgtggtttatgacggcggacctcgtttgctcatgggcgaccctgtatcgccgcctgctgctggaactgctgcgcctgctcaagccggtcctgctgtgggtactgcgcgtgctactggtgcgactggtcctgatgctgctgatgatgtacctgggcacgcaggcgttccgggtgctgctcctgtag

SEQ ID NO: 344421 - DNA, 912 bp, Pseudomonas aeruginosa
atgaatcgagtatttcagggaaggaagatgcgaaagtcagtcgacgtaagcaaggtagctgggattgagtatcacgggagcgacggaattactcaggattgcattgatgctttggttcatatcatcaacgctggagagcggatcgagtcagcctggttgctgtcctgcttccattctgatggtaccggtggccacgcattcttactgagcattttccctgcgcggcaagttctcattaagcctggatttacttcgggatattcaggggaggggccgcgagggttatcaacagctctgaagatattgcagcttcacaacgttgacattgatgagtttgagattgatagctcaacaatgcagagagccgaagctggctgcttgacgtcgaaggacattgagaagctggaagcggcgagacctattcgacctaatcgcttttacgactacattcagcgaaaccccgcactgtttcgagagggtgatgccagggaagtgcagcggtgtttcccagcaactctgaatatcgggctgcttgacgagcgtttggttgagcttgcgataggctttttcgataaccctgattttgcgattagcactgcttttcggcgactggaagacatcgttaggtctagaacgcaaatcttcgataagagcggctcgcatctttttaagaaggcattcgaaggcgataagtcgctcttgcactggaacgaccaggatggcggcgagcaagcagggaaagcagggctattcgttgcagtttttctcgcatacagaaacccgcgagcccatcgcgagatcagcagcaatccgcgcgaagctgcgcgtgagttcatgctgatcaatcagctctatctgctcgaggctatggccgtcgaacgcgtggctgacgtggcggttccagaccagtaa

SEQ ID NO: 344422 - DNA, 2001 bp, Pseudomonas aeruginosa
gtgctggacaagtcgaaaacaaatcccggatatcacaagcaatttatctttagcaggtttacttccaagcaagttgagatcctgctaaatctatcaaagaattggtatttaacaagttcgggagaaaccctccagattgctcaatctagatacgactacttcctgatgaagcccacagaaaaaacttcagaaatgtttaacattgaacgtgaagttgtttgtgtgttcagcgattacccaggatttgaaccaaggtcgctagacttctttgacaaagtctacccacgtctttcgaagatgcgagctgaaacagtatgcgctgtattaataagccaagctcctgatgtggaggtaaaggtagagcgcttactgaaatctgaccctgagcaccgaataattatcccagtaacctactcggaaatgctaaaaaaaggagcagcccaaacattagagaatcgtttcaggaagcacttttactcaagagacctgttctcgttcctgtcccccctcaagaaagacacatacttttttggacgatccaacctaattagcgagatcgtcggaaagtatcaatccagcgaacacataagtctttttgggctacgaaaaagtggtaagacgtcaatcgtgtatgcagtccagcgcaggctggaagcgaatggcgattgcgcagtttcactagactgcgaaagcccctcgatacacggtttgcgatggtacgagctcttggaaaagttagtacatctttatcgcgaagagaaaggctctaaagcgaagatagaagtagatgggcggtatacagagaaatttgcggcagatagctttgaggaggatattttaaaaatatatcgctccaagaagccatccggaacaattttcatattcgatgagattgagaggattagtccacacacggcatcatcggggcactggagagaaggaagtgatttcattttcttttggcagacaatgcgaggattctatcagaagcacccagagatcttctgctatatgttggttggcaccaatcccagttgtatcgaggctgcctcactgcttggccacgacaatccaatttacgcatcaatcccaagccagtatgtcccaccatttaatgccgaacaggttcagcaaatggtgaccaggctgggggactatatgggattaaaattcgatgctctcatcagtgcaaaattaacagaagacttcggagggcatccatttttaattagacaggcatgcagccaaataaataaaatatccggacaaaatcgccctctgataatagacaaaagtgtctacaaccaagcaaagaatgacttcagggagcagtcaaaagaatacttggaaatgatgattcaagtactttgcgagtggtatcccgacgagtatgaaatgctatgcttcttggctcagggggatatggagagctttaatagctttgccagtgctcactcgtcatatactcgccacttaattggatacggtctaattcaaaagggcacttctggatactcattcaactttgaagaagtttcagagctactccgaaaaaaacacaagaacgaaaagataaatctaagcgacgacgagaaagttcaagagatttcctcgcgcagaaacaaactcgaaaaggacttgaggcaggtcgtaagaaatgcccttaagatttccttaggcggaaaaaaggcaaaggaggcaatattagcagccgtcccggagactcgaagggcgccactgtccaattacgagctaaacgacctgatgtgcagggatgcttcacccctcttctttctagagctaataaatataataagacgagagtggccaagcctcgaaaatatattctcactggataaggcacgccttattatcatgcttgaagagatcaatagcattgggcgaccagatgctcacgccaaagcaattagcaaggacgattttcaacagcttagattgcactttaaaaagttagaggacgctctagtcgaatgggtttga

SEQ ID NO: 344423 - DNA, 453 bp, Pseudomonas aeruginosa
atggaaaagcgcgagattgacgagcagctcaaaagcctgagcttcgacatggacgaggaaatcgacgatcgcaacgaacgtcgaggccggaaagccgcgccacctcgccacgcccatacccccatggaccccagccacgccatcatcctggccgctatcatcatcgtcggcggcctatggggcgggaagcttctctacgactacatccagaaacagcgcatcaaggccgccttcaacgaagccgccgcctacgtgcagcagcgaatatcggtcgaggaagaggcaagagaacagcggcgcgctgaacagcttgctcaattggaggcagatcaagcccaagcggaacaggaaaagcgcttcaaatcatcccagtgccagttctggtggcaacaacacaaccagaaccctacagagcggactgcacagaggaagactgaagcgtgcggagattaa

SEQ ID NO: 344424 - DNA, 216 bp, Pseudomonas aeruginosa
atgagctatctcgtacttcagcgtcatgccaatgagcagatcgtgctgaccgcgcacccggatgtcagcgatgaggacctgataagacaaatcagggatcaggggatcgcggtgtgcgttacgcgcaccggggagaagactgtcagccttgggatcagcgcacctgcatcgatgctgattctgcgcgctgagttgcttaagccttacgtgctctag

SEQ ID NO: 344425 - DNA, 1761 bp, Pseudomonas aeruginosa
atgctaagtctcaatgcacttcaaacagcccaaacgcttcatgacttagcgcatatattaaattacgaaccaaaattcctttcttatatcctctataaaaagcccgtcaaatacagccacttcaccataccaaaaagctctggcgctccaagggatattgccgagccctgtgaagagctgaaagccctacagcgaaaagttaaagagctactagaagtctgcctaaaaaccataaacaatcagaaacctcagtacggctcactctcacacggcttcaaaaaagaccactccattattacaaacgcttacccacatcggaaaaagcgctttgtattcaacgttgacatatcagacttcttcggatcaatccacgtcggccgtgtccgaggatttttcataacgaatagagatttcagactctcgcctaaagttgcaaccatcttagcgcagattatttgccatgaagacgctcttccacaaggcgcccccacatctcctataacatcggaccttatcggacatctgatagatataaggttggtggaaatcgctgagcgctataaatgtgtttattccagatatgcagatgacatcacattctcgagcaacgaaaaaaactttccgtcagcaattgcctttccagtagagggaactaccgactgggtccctggacgcgccctgcttaaagccatacacaaatgtgggttcgggttaaaccataataaaactcgaatgttataccgagagagccagcaaaccgtcacaggcctagtggtaaatcagaaagtcaaccctcccgccacgtacagaaggcaaatcagagcagcgctgcacaagctatttcttgacggccagtacttcctccaggaaaagccgaggcatagttcatcctcaaaagtcgacctcgggattgatagcctagaaaaaatcgaaggcatgctcagttatgtctacatggtagacaagttcaatagaagtcttacagtcgagaccagcaaaagcaaaaaagaagaagaaatcccgaaaacctctctagagaagcttcacggcgacttcttgttttacaaatacttttacgccgcaagcaaacctacaattatttgcgaaggaaaaaccgacaacgtctacctaacctgcgcaatcaagtccctttacaaaaactatccggaactagcaaaggtctcaaacgacgaacttaaactcaatgtgaaattcataaactactcagacctaacacatcgtgtaatgggactaaatggtggaaccggcgacatcgccaacttaatcagagcctatgcgaagcagtgcggaaagtacaaagcacacccacctctacaccccaccatagttgtacttgataatgacagtggctcacagcaaattctcaatgctgtaaaagacctcacaacgccccgctatgacgttccaaatggaaagggcaccaagctcgacacgacgcaggacttttataagattgcgcagaacctttatatggtcttgaccccgttagacaaagggaaaagcaccatgatggaaaacttcttcccgacaaaagtgctaaacactatttacaaagggaaaaccttcgaaatccttaagaaaagcccaccagaccaaacctatagcaagcacatcttcgcgcaacacatcgtaaaagccgaacaaaagaaaatagacttcgtgggattctcccctatattagatagcatcacaaaggctatcaaagactaccccaccataaccctgccgaaaatcaaataa

SEQ ID NO: 344426 - DNA, 648 bp, Pseudomonas aeruginosa
atgggaagcgcttcgcaacgttcggtgcaggatctgtatgaggacgtgggagatcactaccggatctttatccgggcgccattctttcaattgctgaaacacagggactactgggttcccctgctgtatttcttcttcgtgttgatcacgatgttctgggacttgtattgccactccggacagtacctctacgaagccaggagtctgctccctttctatctgttcccgtttctgatcgctgcgctacggataggcgatatcgtcgtcgatacgcgctgtcgcaatgtggagaacctgggaggcttcgagcgctccgccgagagcagtcgctacgtccagctttccctctacgaacggcaatggttccggctgcggtaccgggcctatggcggtaacctccgctgcctggcgggcgatctggtggagaactggcgcctctggaaggaggtgaattcgaaggccgcgaaggatatcgacggcgcagtgatgctgcgattctttctacctccccgggaccttgctcgtctggtcacgctgttggctgcgctcattgcggtcatcgccacgctcatcattaccctgggggctgacaggcagggctatttcgagtttgtcgacaacttgcccgcctatctgaaactgtattga

SEQ ID NO: 344427 - DNA, 2088 bp, Pseudomonas aeruginosa
atggttcacatggaattccgcatcgccgatacctttaccaccagcctggcccgcctgaacggcgatgagcaaaaggccgcgaagaccactgccttcgatttgcagatggatcctgccggcaacggcatgagttttcacaagctcgacagagtcaaagacccgaacttctggtcggtgcgcgtcagccgcgacattcgcctgatcgtccacaagaccgctggcagtctgctgctctgctatgtcgatcaccacgacaaggcctatcaatgggccgagcggcgcaagctggaagtgcacccgaccactggcgcagctcagcttgtcgaggttcgcgagcgtgtcgaggagatcctcgttccgaagtatgtcgaggacagcaggccggcgacgcaacagaagccgaaactgttcgcaaaatatgccgacgcccaactgctggcctatggcgtgccgaaggattggctggccgacgtgaaggctgccgacgaggattcgctgctggaattggccgaccacctgcctggtgaggcggccgaagccttgctcgaactggcgaccggcggcacgccggcgttgccggaagtggcaggcaagggggcggacccattcctgcacccggacgcgcaacgccgcttccgcgtcatgtccgatatggacgagttggcccgcgctctggaatacccgtgggacaagtggacggtgttcctccatccggcgcagcgtcagctggtcgagcgccattacaacggtgcggcgcgtgtgtctggctcggcgggcacgggcaagaccgtggtagccttgcaccgggctgtgcatctggcgcaccaggacgaagatgcgcgcgttctgctttccacgttttcggatacgttggccaatgccttgcgcggcaatctgtatcggttgatctggaacactcccaagctcggcgaacgtatcgacgtggccgccatggatgctcttggcatccgcttgtatgcggcggaactcggtaaaccggtattcgccagccgtgaggaaatttccacgttgctgaaggcggccgccacgcaggtcgatggcctgaaggccagcgctgcatttttgctgtccgaatgggaagatgtggtggacacttggcaagtggaaagctgggaggcttaccgcgatgccaagcggctgggtcgcaagacacgtctgccggaggcgcagcgcgccttgtattggcaggtgttcgccaaggtgaaggcgcaattgaagcaggccggcaagatcactgcggcagagatgttcgccaagctggctgagaccatgcccaaccgcaagcatccgatattcgattacatcgtggtggacgaggcgcaggacatcggcgtgcagcaattgcgcttcctggcggcgattgccggcaaccgcgccaatgccctgttctttgccggcgatctgggccaacgcatcttccagacgccgttctcgtggaagtctttgggtgtggatgtacgtggtcgctcgcgaacgctcaatatcaactaccgtacctcgcaccagatccgcttgcaggccgaccgtctgctcggtcccgaggtatccgatgtggacggaaacgtcgaaagccgcaagggtacgatttctgtattcaatgggccagagccgaccatctgtagctacgccgatgtcgaggcggaaagccaggccgtcggcgtatggttgcagcaatgcagtaccagcggtgtgctgccgcaggaaatcggggtcttcgtccgatccgacagcgaactgtcacgcgcgcagacggcagtcaaggccgcaggtttgcaggggcgtgtgctcggcaaggacatggcgacggaagagggcttcgttagtatcaccaccatgcacttagccaagggcatggaattccgcgtggttgcggtcatggcctgcgatgatgaaatcatcccttcacaggtgcgcatcgacactgctgctgacgaggccgaactgaccgaaatctataacaccgaacgccagttgctgtacgtggcttgcacccgtgcccgcgaccaactgcatgtgtcagcagtgaaacctgagtcggaatttctgaaggacttactgcagaagtag

SEQ ID NO: 344428 - DNA, 1551 bp, Pseudomonas aeruginosa
atgccgacgaccagcccaattcagcagcacagagaatcgacgcgcgatctggcccgcgcgttgaagccgtcggatgtctattggtggctactggaatacggctactttcccgaagcctacgtactgccgccgtgctttcgcgtggtgaagatgcctgcgaagcaaaagcggtatttcgacccgaataaaggcttcaaggggttgaaggaggccgagttcgtccgtgtgcatttcccgaaaacggaactgaccgacagaacattcggaatcattgagccagaaattcataacgacatcgcataccacatcacccggaattggaaggcgattgtggatgcgatgattccgtcggacagcatcgtttcgtcgtacagctttcccgttccggtcaacaggaagaagccggggcgcatgggtgagcttcgtggcggcaggatgatctacgagttcatcaccatgaccgacgatgccctatccacggtggcataccgcttcacacatatcgtcaaagccgatatcaagaacttctacccttcggtctacacacatagccttgcttgggcaattcatggcaagcgaacaatccgaaatggcagcaagggtaagaatcgccgtgatatgaagttcgtcggcaaccgactcgacaagttgttccagatggccaatgatggctgcactaatggccttccaatcgggcctgcggtttccgacatcgtttcagagattgtggcttcggcggtagatcgcgtgttgagcgccgaattgaagagcaaccacattgagtgcgaggcagtgcgattcaaggacgactatcgcattctggtgtcgtccgaagcggatgctaagaaagttgtgaaaatccttcagtcatcgctgaaggaatacaaccttgagctcagtgacgaaaaaaccaccgtgtcggcattgcccgatggcctgttccggccttgggtgtcccgctatcaccttgtgcatccgaaacggaagagtcgatttacgtggaagcagtttagggagctttaccttgctgtcgttgagattgatcgccattgcccgaacacgggtgtgatagatcgcttccttgccgatatcacgactcgaaaaggcaaactgaagattattgtcggccctttcaatctggaaaaagttgtcagcatgttgcttatgcttggcacgctgagggtcaaggcttttcctaagatcatggcaattctcgaacaggcgatacgcagcgatgatggcaatggtctgacggagccgctggtcagtcaccttgaagcgtacttgcacaagctgtcgagcgatgaagcgcgcaacaaatacctcatatcgtggatcggctattttttggcgagtaacggccttctgccgttgctgaagaagaagccaaaactcaaagacccgattgccaattcctcgatgaccggaagagggaggttgtttggcgatgccccagatttcaaactgattgaaggtgtaaagatggcaggaaaacgagtgtccctgtttaagcatctggatgtgttcaatcctcccaaacatactgagtga

SEQ ID NO: 344429 - DNA, 327 bp, Pseudomonas aeruginosa
ttgaccggccgccgccttttcatccttggaaactctttttcaaagcctatcccactaaatccctttcccttcctctatatcccacaattttctcgctttacccttctggtttatctcactctctctcaccatgcctacttcctcggcgcgaacgatccatacaaggcactgaagaccaccctcaaagctgaaatcgaccccgacgcctgggcgaccctcaactccgatacctcgcgcccgttcccgaagcccagcactggccgcttcgcagtgaaggtcatcaatcatctgggcgatgaggttatgaaagtattcaaggtgagctga

SEQ ID NO: 344430 - DNA, 2739 bp, Pseudomonas aeruginosa
atggcaaccaaaaaaacccagaagcccggcaagagcatcgagcagatcacgcacaccgaggccaaacgcaagaacattccgacggtggagcaccagtcggtgatgcagcaccacgagcaagcgccggtgcaggtggcctacccacgcgccaatcggcaatggctggacgaactgtgcgcgctgcacgacgcaggcaaggcatccccggagttccagcagcggctcaaccgcgacctggacccgcaactgatctggcgcggcaaggaccagcaggactggagcgatctggtcgtcaacgcgccgccgctctacatccaggaaaaggtcaagcccaaggcgctgatcgacgacctgcgccgccaaaccgaagaacgacgcgaagccgccgcgccacaacaggactcgcttgatttgttcggcgacttcaacggcttgcccgaaggcgcggatcgcaccgagttctaccagcacgagggacattggcagaaccggatgatcctgggcgacagcctccaagtgatggcgagtttggccgagcgcgaggggttgcgcggcaaggtgcaatgcatttatttcgatccgccatacgggatcaaattcaacagtaatttccagtggtcaaccactagccgagatgtgaaagacggtaacgccgcacacatcacccgcgagccggagcaggtcaaggcgtttcgagacacgtggcgcgatggcatccattcctacctgacctatctgcgcgaccgcgttatcgtctttcgcgaccttttgaatgaatcaggttccgtttttgttcaaatcggcgtggagaacgttcatcgagtgcgagcagtgctcgacgaagttttcggtgaatcaaattttgtggcgcaaatcgcattccggactacaaccgggaaggcatctacagcaatagacacgacccaagactttatcctttggtttgctaaggatctgcaaaagctgaagttccgccgtccgctctttttccgtgaagtcgagcttgacgcaaactatcggtatgacttcagggaggatggttgttttgtttctgcgggtgaacatataagccgcatagcgcgtatgaatccaattacgtcacagtcgggaagctcaacaacactattcgagtatgagtacgcagggggcaagttccgtccaggtaaaggtggctggaaaacgaacctcgtgggcatggagcgtctgcggaaggcacaacgcttgacttcgtcagggaagacgcttgcctttgttcgaccattctcggacttcgcttgccaagcgcatgctgatatttgggatgacacccgtcagtctggctttggcgacgcaaaactctatgtcgttcagaccgcaacaacagtcatcgagagatgtattttgatggcatcagacccgggggatctgatacttgatccaacttgtggctccgggacaacggcatatgtatccgagcaacacgcacgtcgctggatcactattgataccagccgcgtcgcgctggcgctagcacgtgcccgcataatgggcgcacgttacccgttctacctgctggctgattcccgtgaaggtcagttgaaagaagccgaagtcacccgcggtgtgccgtccggccaacccacctacggcaacatcactcatggcttcgtctacgagcgcgtgccgcacatcaccttaaagtcaattgccaacaatgccgaaatcgacgtcatctgggacaagttccaaaccgtgctggagtcgctgcgcgaagcgttgaacaaggcgctcggcaagcagtggcaggaatgggaaatcccgcgcgaagccgatgcaaagtggagcgcggaagccaaaaagctgcacaccgactggtggcagaaacgcatcgtccggcaaagggagattgatgcctccatcgctgccaaggccgaattcgaatacctctacgacaaaccctatgaggacaagaagaaggtgcgcgtggccggccccttcacagtggaatccctcagcccgcaccgcgtgctgggcgtggacgaggaagacaacctgatcgaccatgtggccgagacccaggccgaatacggccaggacttcgccagcctgatcctggccaacctgcgcaccgccggtgtgcagcaggcgcacaaagccgacaagatcgaattcacctcactggaaccgtggccgggcgaactggtctgcgccgaaggtcgctatctggaaaacggacaggtgaagcgtgccggcatcttggttgggccggaattcggcactgtcacccgtgctgacctggtcgatgctgcccgcgaagccggcgacgccaacttcgacgtgctcatcgcctgcgccttcaactacgacgcaccggccagcgagttcagcaagctgggccgaatcaacgtgcttaaggcgcgcatgaatgcagacctgcacatggccgaagacctgaagaacaccggcaagggcaacctgttcgtgatcttcggcgagccggatgtggatgtgctggacacgcaaggccgcagcatccgcagatacgacggcaagcgtgacgtcatcgaggtgcctgccgacggacaactggtggtcaagatcaacggcgtggacgtgttccacccaagcaccggcgaagtgcgcagcgacggcgcggacggcattgcctgctggtttctggacaccgactacaacgaggaatccttcttcgtccgccatgctgtagcgccgcgcgaaattcatcggcctgttgcgcgataa

SEQ ID NO: 344431 - DNA, 3105 bp, Pseudomonas aeruginosa
gtgagtgaccagtttttcaaccagccaatcctcaattcgccttacggctacccgtcgcggcactgggagctggacgacagcggacaacctacgcagcaaatcgtcgagtcacgccgagcgtccagcttcatcagtccgattccaaagccccgccggcaccgcggcgagcaggctactctggcgctggatgaagtcgagaacctggctgacgacgggcagcgttaccgccactctgaactgatcaattcggtgcggcgcgaggtcgatgcgtggcgtcgcttgccgccgacgcagtggcgtgtcacccccgaaacggcccgtctgctggagcactggcgcaaccacaagttcgctggggtgcgccccttcttctgccaggtagaagcggccgaaaccgcgatctggctgaccgaggtcgtcccgcagctcggcaaaagtggggaacgctttctcgatcacctgaagaaagtcagcaacgatgccaaccccggcctgatgcgcctggcactgaagctggccaccggcgcaggaaagaccacagtcatggccatgctcatcgcttggcagacggtcaatgccgtgcgccatccgcagagcaagaaattcaccagaggcttcctgctggtcgcccctggcctgaccatcaaggatcgcctgcgcgtgctgctgcccaatgatgcggacagctattacgccagccgcgagatcgtgccccgcgacatgctggcggatctggacaaggccaagattgtcatcaccaactaccacgccttcaagctgcgcgaacgcatggaattgtccaagggcggccgtcgcttgctgcaaggccgcaccggcagcgagctggacacgctggaaaccgaggggcagatgctccagcgggtcatgccggaattgatggggctgaagaacatcctcgccatcaacgacgaggcgcaccattgctatcgtgaaaagcccgcttccgacgacgatttcatcgacgacaagggcaaccccctgaccggcgatgacctcaaagccgccaaggaacacgtcaaggacgagaacgaagccgcgcgcctgtggatttccggcctcgaagccgtgaaccacaagctgggcctgcaacaggtcatcgacctctcggccacgccattcttcctggccggttccggctacgtggaaggcaccttgttcccgtggacgatgagtgacttctcgttgatggatgcaatcgagtgcggcatcgtcaagttgccgcgtgtgccgattgcacagaacctgcccggcgacttcgacatgccgatgttccgcgatctgtggaagcacataggcaagaagatgcccaagaaggggcgcggcaagggtgcacaggctgatccagaagacattccgcaattgctgaaaagcgcgctggacgcgctttacggccactacctcaaaacctacgaagcttggaagcaggccggcatcaaggtgccgccgtgcttcatcgtggtgtgcaacaacaccgccacctccaagctggtgttcgattacatttccggctttgatcgtcgcaatgacgatggcaacgtcagctaccaggctggccgactggagctgttccgcaattacgacgagcacggtgagccgctggcgcgcccgaataccctgctgatcgacagcgaacagctcgaatccggcgaggcgctggacgacaacttccggggtatggccgccgacgagatcgagcgtttcaagcgcgaaatcatcgagcgcactggcgaccgcagacaggccgagaacctgagtgacagcgaattgctgcgcgaagtgatgaacaccgttggcaagcagggccgcctgggcgagcaaatccggtgcgtcgtgtcggtgtccatgctcacagaaggctgggatgccaataccgttacccacgtcctcggtgtgcgtgcgttcggcacccagttgctttgcgaacaggtgattggccgagctctgcgccgccagtcctatgaattgaacgagcagggattgttcgacgtggaatatgccgacgtgttcggcattcccttcgacttcacagccaagccggtagttgccaccccgcccaagccgcgcgaaaccgtcacagtcaaggcactgcgcccggaacgcgattctcaggaaatccgatttccgcgcgtgcagggctatcgtgtcgaactgccggaggaaaggctggaagccgcctttggcatcgacgatcatctgacattgacgccagagcaagtcggccccacggaaacccgcaacgccggcattatcggcgaagcggtggaactgaacctcaagcacctaggcgacgtgcgccagtccacgctgctgatggagctgaccaagcacctgctgttcgagcactggcgcgaccaaggccaggatgcaccgatcgccctgttcggccagcttaagcgtatcgtgcgtgagtggctggaggagtgtctggaatgtaagggtggcacctatccggcgcagttgatgcaccgtgaactggccgacctggcctgccagaagattactcgcggcatcgtcaagcgcgaactagagaaaggccggctggtcaaggccatcctcgacccattcaaccccaccggcagcaccgcgcacgtgcgcttcaacacttctcgcgaagaccgttgggaaacccttgggccgccgcccaagaaccaggtcaactgggtgattctggacagcggctgggaatccgaattctgccgcgtcgccgagtcgcaccccagtgtgctggcctataccaagaaccacaacctcggcctggaagtgccctaccgcttcggctcggccaaccgcatctacatcccggacttcatcgtgcaagtggacgatggtcacggcaagagcgacccgctgaacctaatcgtcgagatcaagggctaccggcgcgaggatgcgaaggaaaaaaagtccaccatggacacctactggattcccggcgtgaaccacctcggcacccacggccgctgggcctttgccgagtttggcgatgtgtacgaaatgcaggacgactttgccaaagaggtcgaagcaaagttcaaccaaatgattgaaacggctgcacctgcaccgggaaacaaggaacactga

SEQ ID NO: 344432 - DNA, 426 bp, Pseudomonas aeruginosa
atgccggcgcggcaggaaggcttcacgctcctggaggcggtggttgcgctgacgctcctggcagtggtcggcggtgcgcttttcgcctggctcaacagtgcctttcggagcatgcagcgggtcgaggcggccgagctgcgcattgagacggcccgggtggcgatggcctatctggagcgcatgaaccctgcgctcgaacccgcaggcagggtccggctggggcattaccggctggagtggcgaagttcgccactgtccgcatcgaaagcggcggtgggccgccatagcggcagtccgggcatctacgacgtgaccttgttcagggtcgtcgccagcatccgggccggcgatggaacgccgcagacgctgcaactggagcttcccgggtacgtggtcatcccagcgcgactgggtgatggaccatga

SEQ ID NO: 344433 - DNA, 3231 bp, Pseudomonas aeruginosa
gtgcacacgatccaaacggacatagtaacggatgaaataattagcgacatattcgcacgggactgcgcactctggctcaccaccacagcattagaggccggcattgaattcgactcactattagacttaatagatggcccatggcgagcagtattcgtcgaaacaacatccggagcttttggacaaacactcgccgaaagagccagcgcaacactatcgtcgaaccagagcagtggttttagccatcttatcgctagcgatccactatcgcttaccctacaacgccattcaaaaccaattttctttctaaatggccgcacggacctcacaggattagagtccagcactctttcgactcgcagttctgatcgtcgccggctcaacatgacggcgcgacttaaagatttagagccccgacgagtaattatcgtcggcgaccaccctgcattagcaatcgaggatctcgccgatctatggcaggatgagtttcgctccttaatcagcattgtttctacagacgcagatgcgacagcggcatcgactgataaatttgaacagcaaaccagccttaaacttatccactggctaactctaacaaccgaacaatttaccaaacaagtcaaagccagactagagaacctcacagaaaaatccaatttactagtaaatgtaaaactacctggcagtgtatctatagaggtcgacctccgggcagcagagtttgcagaggctcctcttcaggacctttgtgactttattagagtctcagacactcttccccttgcagccgaagacttaagggaggacgaatttcaatccttcttttcccgtcaaggatctgcatggagaaattttgcggcagggctcccttggatttcagatcccgaacctcaaaaaaaactattgaagggactccacaatcagctcgcagaggctcctgggtcagtaaaagttttttcaatagtgtccgaagcgggtgcaggaggcacgactcaagcccgaactcttgcgttcactgcagcgcgggcaggattccccgctctcgttgtgaaacaggagtctccattacctagcatacttgaacttacaggcttctttttccgagcggtggccgaaatatccaagcgtgcattggaagctggacttgctgatgtaggcgaaccagtttgggtgttagtgctggatgtacaacatgcagataaagccactgatgagctggaacggttgtgtggggagtttgcacgaagcggaagaaaggtggcaattataaaagtcaccccccccaaccgccctgtggacctcccaaagtctatacattcccaagaactggcctacatccgccactcacttgagtcggatcaagtttcacatctaggcaaacaccttaacttgttcctacgcagatttggaaaagaaaagactgacgatgagtggacaaaattctggcgagcgcacagccccgaattgaactcaggaattgcaagcttctggattaccttagagttttggctcggaggcttcttagatatcggagaatcggttcagaactgggtcattcaacaattcaaatctctgccaaccaatgagattcagcatgcgataatggaaatcgcgtcgcttgcaattgaaagaaagcctactccagagaagctattaaaacccttaacatcaccgcagtatccttggtcctacgcactagaagaggcaaaatcagactcacctggactgggactaatggagggggagtcttttccaggcgggcgcgtctggatcgtcgctcacgacctactcgcgcgctatttaataaacggcatttggaatgatcgtttactatgcgaaagattgggtctaccactctacgaggatcccattgctcttcgcctagcaatgatatcgaatcttgcgatgcgtacaacaatgggagacgcggccgctcgaccattcgcagtagcattagcgatgaacatccttaaactagacgagagcagcggcaatgcagagttcttcaaacactggaggaccgcactccatatcctagaaaaagtcccaccggaagtcacgcttagtagccgatcattcaatcatcatctcgccatctctaaaagacgcgtcacccagggcgacttattccaaattgaagagaatgagaaaaaaacactgcttaaggaagcagcagaatcagtagagtttgcgctggacaacatcgctccaacgccagacgatgaaacaaacttagctcttctcaatactctggctctaacctatcaagatcttgcggagcttgagagaaaaaatggcgatcctacaaggctgaatgagcttctcgaaaaatgtgacgaggttacaaacagggccctgaaagaaaatccaaatagcccatatgtattagagaccgttgcgaagaatcttctccgtcaaggaatgacaggggaggcgtcaggtgagcgcatcgagtcagcagcgaaggctttgtcgttcgtatttcaggcgtcccaactagatagcgcttatactcgcagaatgaagctcggacaactggctgctcaagcgctcaagatactccgtgacgataacgcaatatcaaaaatagatagcctgtgcaaccaaggaattccttacggctacatagctaaggcttggtgctcactgcctatatcaacggcggaagcatcattattgctcgatgaaattgatgcagaactggcagaaccagccataaagatactgagaagctcgccaagtagggactggcttctggtgcggatactatacgacttagtagtaattgccgaaccaacaaacttccaagaacagcttcacctcctggatgaactctccagcactaaagggtatcaactctcactgcagcaggttctagaaagagcgatccttctatttattgcaggccaacacaaacaaggttcggaagagttcagatggctaagaccgagggtaaaagagtcacaaacatctgtttttgtaccaaacagacttagatggttacttggccctgatagattgacaaaggcggtgtgcaccggacaagtagtcgatagtgctgcgtcggcacgagggatggcgaaggttaaagagcttggaaacatctgggcaccttacaaccctcaagaattcgggaagcgcaggatggggtccaatgaacacttcaagtgcatagtgacatttggcgcaatggggccattccttaagcccgttgaagccagccaccgataa

SEQ ID NO: 344434 - DNA, 729 bp, Pseudomonas aeruginosa
atggcagggaatgtacccgtaacttctggttgcgagtggctggccttacagcgtggatggattttaaagcgagggagtgttatggtcgaaggaagctcggatgtagcttatttcaaccatgcatcaaaactttatgaaattgaagaaaaaaaacgtctaattgacgatgatttctcgatattcgctgctggtatgggggacgaaggaggaacctttggaatttctgagagtttcccaacactcttcaacctggcagacattgatgcaaagaacaccccgagcaagaaatacaaagtaattgcacttgtagacgacgacaagatggggcaagcagccgccggcggtatctctagaggtcaccgaagtataattgagtatgaggttatcttcagattaagaagaaaaatgccgctgcgcgcaggctctactcgtgcactagaacaaaaaacgaaagaagcaaattcggagtatggcaatcttgaatgtgttattgaagaccttatttcttcagaatttcatcaaaaatttatatccaaaatgcctcaggcgaattggaaacccagcattcacaaagggactggcgcgcaccactaccttactgaagatggaaaaagacagctactgaaattcactatagagtcagcgacaatcgccgaccttcagtccattgtcgacatccttaaaagtctgcgtacctatgtaggacttcctcctgacggaagcctttag

SEQ ID NO: 344435 - DNA, 3831 bp, Pseudomonas aeruginosa
atgcaatttgttgctaatgggccagacattcctgatgagctattgcaggctcatgaagaaggtcgagtcgtatttttctgcggtgcaggtatttcctatcccgcagggctgcctggctttaaagggttggtggaacagatatatcagctaactggcacaactctctcagccatcgagcaggaggcattcggccgaggccagttcgatgccacgctcgacttgctggagcggcgcttgccagggcagcgtctcgctgttcggcaagccttagcacaggttttgaagcccaagttgcgccgccaaggtgcaacagaaacacatgcagccctgttgagattagcccgcagccgcgagggggctttgcgcctcgtgaccaccaacttcgatcgcgtgtttgacacggcagccaaacgcacgggacaagtattccaggcatattccgcgccgatgctacccattcctaagaacagtcgctggaatgggctggtctacctgcacggcctattacccaaaaaggcggatgacactacattgaatcggctggtgatgaccagcggtgatttcggcctggcatacctcacggaacgctgggcggctcgcttcgtgagcgaactcttccgcaactatgtggtgtgcttcgtcgggtacagcatcaatgacccggtgctgcgctacatgatggatgcgctggctgctgaccgaatgctgggtgaaactacgccgcaggcttgggcattgggcgattgtgagccagggcaagaacatggtaagaccatcgagtgggaagctaagggcgttaaacccatcctttacgatgtccccgctggcagttatgaccactcagcgctgcacaagaccttgcacgcttggggggaaacctaccgtgacggcgtgatgggcaaggagcgcatcgtcgtcagtcatgccctagcgcggccatcggccagtacgcgacaagatgattttgttggccggatgttgtgggctctgtctgacaaatccggactgccagccaggcagttcgcagacttcaaccccaccccgtcgctagactggcttctagatgcgttctcacaggaccgctatcaacacggtgatctcacccgcttcggtgtgccaccaagcgatgagattgatgccaagctgcgctttagcttagttcgccgtccgacaccatactcgcttgcaccaccaatgatgctggtatccggtggcatctcggcttccaagttggacgccgtcatgtatcaacttgtccgctggttggtgagacatttgaatgatccgcagttgatcatttggatcgtgcaacaaggggggcaactgcatgacagctggcactggctgatcgaggaccggctgaatgagtttgctcgccttgagcgcgagggaaaaacatccgagttggatgaagttcgcagccacgcacccaacgccatacctggaccacagatgcgaaccttgtggcacctgctcctcagcgggcgggtaaagtcgtcgtggcgcgacccggatgtataccgctggaaagagcgcttgaagcgggatgggctgacagtgactttgcgactcgacctccgtgagctacttgcgcccaagattaggttgaaaaagccactccgctggggcgaagagtcccaaatcaccggtgagcccgctcgcatacggcagttagtagactgggacttggtgctggccgccgatgatgttcactcgatgcttcgagaccttacaggcgacggctgggagtcagacttaccgtcattattggaggacttccagaaactgctgcgcgatgcgctagatctgctatgcgagctaggcgaagctgatgatcgtagcgatcgatctcattgggatctgccatctatcactccgcattggcagaaccgtggcttccgcgactgggtttcgctgatcgagcttctgcgcgatgcatggctggctgttcgcggcgctaatgctgcccaagctacgcggatcgcgcagtcgtggtttgaactcccgtacccaacattcaagcgtctggctttttttgcagccagccaggacggctgcatcgctcccgagcagtgggtggattggctgctgagcgatggagcttggtggctgtgggcatcggacacgatgcgagaggtattccggctgctggttcttcaaggtcaccgattggcgcagcccgaccgggatcggctggaggcggctatcttgagtggcccgctgcgtgagatgtaccgagatgatcttgacccggatcgttggcaaggcttggtcgagcgatctgtgtggttgcatctctccaaactgaacgcgtcagggcttgcgctaagcgctgccgcaacggtgagattggagggcctatctcgtgcttatccgcagtggcaactggcggccaacgagcgtgacgagttctcacattggatgagtggcaccggcgacccggactacgaggacagccgtgaagtcgatattgcgccacacaagcggcacgagctagtgcagtggctcaagcagccactctctgaccagcaccccttctacgaggatacctggcgcgaggtctgtcgaaagcatctattgaacagcctgttcgcgttgagcgacttggcgcaagaaggtgtttggcctgtagaacgatggcgtaaggcgctgcaagtctggagcgaaaagggtcgggtgttgcgatcttggcgctacgccacaccgctgatacagaacatgccggacgatgtactgttggatgttgtgcatagtgtgacgcactggttggaggaagtttccaagtcggtcgaccatcaacatgaggacatcctactgggcctatgccgtcgtgtattgagcctaccgcttgatgctgcctctggcatgacgcgaaatggcgagccactcaacgagcctgttacggaggcgattaatcacccaataggtcacgtcgcacaggttttgctgaacctttggttaaagcgtgagccgagcgacaacgatcagcttccagcaggaatcgaacctttcttcactgagctttgcaatgttcgggtagatcgatttcgccacggcagggtactgcttgggtcgaggctaattgcactcttccgcgtggaccgttcatggaccgagcagcatttgttgccacttttcaattgggcggtcgatgtggcagaggccaaggctgtatgggagggtttcttgtggtcgcctcgtttgtatcggccattgctcatcgcattcaaatcacagttcctcgaaacagcgcgtcactacgccaatttgggtgagcatgcccagcagttcgcggcttttctgacctatgcagcgttaggaccgactgatggctacacgatggaagagttccgagacgcgattgcagcgctgccccaagagggacttcaggaatctgcacaagcgctctcgcaggcccttgaaggggctgctgatcaacgagaggagtactggaggaaccgcattcagccattctggcagcacgtctggccgaaatcgcgagatcttgccaccccccgcattgctgaatctctcgctcgtttgagcattgctgcgggtgctgaattccctgctgccttgagggcagtccaagattggttgcgtccaatcgagcatccgcactacgtcgtgcacagactgcaagagtctggactatgcggccggtatccagtggaagttttgcgattgctgaatgtaatcatcgatgaccagccgtggacaactcgtgaggtggggcaatgcctggaggcaatcgtgcaggcaactccggggcttgcccaggatgcccaatatcgacgactccttgaatattcccgtcggcgaggatggtga

SEQ ID NO: 344436 - DNA, 3903 bp, Pseudomonas aeruginosa
gtgcaggcactgccttcggccgttagggctcagggcagcctgcctcgcctcgaagagcggagcgcccttcttgccgagcctccggttgggcagccggcgctgcaaaccctgccgtcggttgcgcgcgttgagggcgtgcccagcaatgccacaccgagcaacagccacaagtatctgatcgagaccaacccggcgctcaccgagctgaagcagttcctcaactcggactacctgctcggtggcctgggtatcaatccggatgacagcaagaagcgcctgggcgacggtctatacgagcagcgcctggtacgcgaagcgatcgtccagcgtacggggcagcgcttcatcgccggattgaacagcgacgaagcgatgttccgctatctgatggacaacgccatcgccagcaaggacgtattgggactgacccctggcgtcaccctcagcgccgcccaggtggccgcgctgacccacgacatcgtttggctggaagaagtcgaggtgaatggcgaaaaggtcctcgcccccgtggtctacctggcccaggccgaggggcggttgggcccgaacggcgcgctgatccaggggcgcgacgtgaacctgatcaccggcggggacctgaggaacgccggtaccctgcgcgcgcagaacgacctcagcgcgacagccggcaacatcgacaacagcggcctgatcgaggccggcaaccgcctcgacctgctggccagcggctccatccgcaatgaccagggcggcatcattgccgggcgcgaggtaagcctctccgcccttaccggagacgtcatcaatgaacggacggtgacccagcaccagtcctcctacaggggaaccggtaccactgaggcatttgccgatagcgccgcgcgtatcgaggctgcgcagaagctgaccgtttcggcaggacgcgatgtagccaatattggcggtgtcatcgacagcaagggcgacctcgccttgcaaggcggcagggatgtcctggtttcggctgcggtagcggagcgaggctggacggcaggaagccaggcataccagacccagacgacccagatgggcgccgaggtcgtggcggggcgcgacatcagcgtcagcgccggacgcgatatcagcgtcgcgggcagccgcatcgacgctcgtcgcgacgtgacattcgaggcgggtcgcgatgtgggcctggtcgcggctgccaacgaagagcatgcctatggcaagaccaagaaggtcactttccaggacgacaagatcacccagcaggccactcgcgtggacgctggcggcgacctggcgatcaatgccggacaggacctgcggctggtcgcgagccaggccagcgccggcgacgaagcctacctggtggccggcgacaagctggagctgctggccgccaacgacagcagttactacctctacgacaagaagagcaaaggcagcttcggtagcaagaagacccggcgcgacgaaatcaccgatgtgacggcagtgggcagccaaatatccagcggcggcgacctcaccctgctcagtggcggcgaccagacttaccagggcgcgaagctggaatcgggcaacgacctggccatcgtcagcggcggcgcggtgaccttcgacgcggtgaaggacctgcaccaggagagccacgagaagagcaagggcgacctggcgtggcagtcgtcgaagggcaagggccagaccgacgaaaccgtacgccagagccagctcgtcgcccagggcaacctggcgatcaaggccgtggaagggctgaagatcgacctcaagcacatcgaccagaagaccgtgagccagaccatcgacgcgatggtgcaggcggatccgcaactggcctggttgaagcagatggagcagcgcggcgatgtggattggcggcgcgtgcaggaactgcatgacagctggaagtacagcaactccgggctgggcgtcggcgcgcagttggcgatagcgattgtcgtgacttacttcacggcgggtgcggcgagtgcggcattgggatcgatggcgggtgtgggggcgggctcaggaagcatgatggctgctgccggtagcactgcaatggtccaggccggtacagcagtaggaacagctgccgccggctgggcgaatgccgctggaactgccgtggctatgggcatggccagcaatggagcgatcagcaccatcaacaaccggggaaacctgggggatgtcgtcaaggacgtgacctccagcgatgcgctgaggggctatgtagtcgctggcacgactgcggggctgactgccggcgtctacgacaaatggacctcgacccagaccggcacctcgaccgctctaccgaacaccggggccgtggcgcccgccgcagggttgggcacctggcaaggtgtgggccagttcacctcgaaccagttgctgcagaatggcacttcggtgctgttggaccgagcgctgggcggcaagggcagcctgggcgatgcgttgcaaaacagcctggcaaatgccttcgcggcctacggcttcaagctgattggcgacaccacccatggcgtactggacgacggcagcctcggcaagatcggcttgcacgccctgatgggaggtctggccgccgaagcggtcggtggcgatttccgtaccggagccctggctgcgggagtcaacgaggcgctggtggatagcctcgccaagcaatacgccagcctgcccatcgatgacaagaagggcctgctgaccatgagttcgcagttgatcggcgtgctggcggcttcgacgcagggcgatgcggacgccaagagcttgcagacgggagcctgggtggcggggaatgctactcagtacaacttcctcaaccatgcggaaaatgaggagcgttggaagtcccaaaaggcctgccaaggaggagacgaggccgcctgtgggcgtgcggatgcttgggataagttggaccgcgaccgagatctagccttgatgactgcctgctctacgggcggacaggcatcgacttgtagtgcattgcgtcaagaagcctggaaggctgctcaaagcctcaagcaggccagttggagcccggaagcgagggaacaatacgcgcaagccatgcaaaatccggaattgcgtgcttacacgattgagtcagagcttcgaagcatcaatcaggtaaataatcctattaccgctggagattcaaagcgcctcgctaaagctttggccagttttggatccgacttcgtccccgtctacggtgacacaaaagcattttctgaagctcaagacccctttgactatgcaatggcaggggtgggactggttcctggtgctggagatgcggcacagaaagtattgagcaaggcgaaaaagctcttccaagaagggaaggtggcagagtctgctgatttagtagagggattaacaaaaggggtaaaaaacagtaacgctgcaaaaggatttattcctgcagaaaggactgggcttaattttgaagagaaggtaaaaaataaggccggagggtatgttgatgttgagttgtctgctaggcagaagtttgataagtcaggtgttgtagtagatagtaaattcgcccaaagcgatctagttgctcgttactcgcccgatgggaatctgtatatagattggtatggcactactgtgtctgggaagggagttggtagcgagatgatttctagagcaattgaggcagtaggagcaaataaggttaagacggtttcggcgcagttaggaaaagacaatcttgatgcttttaaagctgggtcttcgagagggctttccaaggagcaggcagtatggaatactccactaggtaagacaatgagctctttaggttttacggaagttgaggttcatggggcaagtgttaaatttcttcatttagagtga

SEQ ID NO: 344437 - DNA, 273 bp, Pseudomonas aeruginosa; identical to SEQ ID NO: 326662

SEQ ID NO: 344438 - DNA, 1653 bp, Pseudomonas aeruginosa
atgatcgatcacggcctggagatcgtggcctacgcactgaaggtgcggcagacttacctgctccctgtgggcgcggcaccagagtcacagtcagcccaggctgaagcctggtcggccgccgcggcttatggtgccctggcacatgacataggcaagatcgtcgtcgacctgcaggttgagctgcaggacggcagcacctggcacccttggaacggaccgatcaaccagccctaccgcttcaagtacgtgaagtcccgcgaataccagctccacggcgctgcatcagcgctactcatccaccaactgcttccgcgcactgcactcgactggctcagtcgctttccagagctgtgggctcaattgatctacctgttcgcggggcagtacgagcacgccgggatcctcggagagatcatcgtgaaggcagaccaagcctccgtcgcgcaggagttgggagggaatccggatcgagcgctggctgcaccgaagcagtcgctgcagcggcagttggcagacgggctgcgcttcctggtgaaggacaaattcaagctgaatcagccgggcggcccgtccgacgggtggctgactcaggacgcactctggctggtgagcaagcccgcggccgatcagttgagagcctacctgctggctcagggaatcgaaggggtcccctcctccaacgcgccattcttcaacatgctccaggaccaggccgtcatccagacgaacgccgaagacaaggccatctggacggccacgatagacaatggtgctgggtggagaaacaagttcacgctcctcaagatcgctccagccttgatttgggctgaccctgcggagcggcctgattcctacagcggatcactcgtaattgaagagggcaacgcctcccctgaaaagccggaaacgacctgcgaaatccccaacgatccgattgaacagcgacaggcgccagaagccaagatgacgctccgccaacctacgccgagcgttgcgaaaccgtcaaacgagatgcgggcgattgcgaagccctcagctgaggatcaggaagaaacagacgatttgtacgcgcttcttggtaatatcaattcgccaccagaagagctagacactagccacgactcaccggctgcttcttctacgaacactcgcggggaggagaacctacagcagccactagggaccaaggagccaacagattgcgctcctgaagcagttgaagatgtatttatgcctagcagaagcactgatctgggacagggattcgttggctggatgaaatctggcatcgcggcccgtcgcctgttcatcaacgacaccaaggctttggtgcataccgtcgacgggaccgccatgctggtcacgccaggaatcttcaagcgttatgtccaggagcatccagagctcgaaaagctggcccaggccaaggagacgaccggctggaagctggtgcagcgcgcgttcgagaaacaagggcttcaccggaagaccagtaagagcctgaacatctggaccatcaaagtctcaggccctcgtaaaacgaaagagctcaaggcctacctactccaggatcccaaattgctgttccctgagcagcctctggacaacccaagcctcacggttatcaccgatgccgaaggaggtgtggaatga

SEQ ID NO: 344439 - DNA, 1035 bp, Pseudomonas aeruginosa
atgcgaatggaagtggacaacacgcgcgtgaacaatccgctgctggcacaagaaatcgctgatttttccagagactgctacgggccttcccgtgcgcggctgttcatgcggcaacccgacctgggctccgtcgccgaggacaacaaggcattgcaagacctgaactggatcggctcccgattcttgttgaacaccccggggtactacgacaccgactactcgaagagtccccgtcagtggtggccctacagcgccacccgcgacgccgggctgcctcaggtgggcggtggtggtggctaccccacctgcaagcagtggtgggctgactcagggatctgcttgcgtgatcggatcaaggaccaggtagatccggacctgatgaccagcttcctcaagtgggcgaaatggctgaaccaggacgaggtgaccgaggcagtcattcgccaggtgatctccccctccagccaggtcaagggcaacgtctacaccgattacggcgggcaggtgggcggcaccgtctggaacggcatcgcgagaaccgcaggaaccttcggcgttgcgctgggcagcctggcctactttccggcgatggatatggtacgccaggcactgccgatggcgatgtcgatcctgaagatggcaatggtcatctgcattccgatggtcctggtcatcggctcctatcaactgaaagttgccatgacgatgacggtcgtcttctttgcgatgatgttcgtcgacttctggtttcagttagccagatatatcgacagcacgatacttgatgctttctatggttcgggatcaccacatctttcattcaacccagtcatggggctgaatacggctactcaagatgcgatcttgaacttcgttatgggttctatgttcattgttttaccactactgtggatgacagcgatcggctggtccggaattcaagcagggtctgttctgaacggattgagcagagggactgaaggagttcaagccgccggcaaggaagcaggaagtagagttaaaaacgcagtttga

SEQ ID NO: 344440 - DNA, 300 bp, Pseudomonas aeruginosa
atgctggtcacgccagaaatcttcaagcgttatgtccaggagcatccggaggttgaaaagctggcccaggccaaggagaccgccggctggaagctggtacagcgcgctttcgagaaacaaggtcttcaccgaaagaccagtaaaaacctgaacatctggaccattaaggtttctggtcctcgcaagacgaaagagctcaaggcctacctgctccaggatcccaaattgctgttccatgagcagcctctggacaacccaagcctcacggtcatcaccgatgccgaaggaggtgtggaatga

SEQ ID NO: 344441 - DNA, 1212 bp, Pseudomonas aeruginosa
atgacatcagacactccaccgattgccgcgcaaggcgtggccaccctgcccgacgaggcatgggcgcaagcccggcaccggacggaaatcatcgggccactggcagcgcttgaggtggtcgggcatgaagccgccgatgaggcagcccaagcgctgggcctgtcccggcgacaggtatatgtcctgatccgtcgcgcccggcagggtactggcctggtaacagacctgacgcccggccgatccggcggcggcaaaggcaaggggcgcttgccggaaccggtcgagcgcatcatccgcgagctgctgcaaaagcgcttcctgaccaagcagaaacgcagcctggcggcgttccaccgcgaagtcgcgcaggcgtgcaaaacccagaagctgccggtgccggcgcgcaacaccgtggcccagcggattgccggactacacccggcgaaaatagcccgcagccggggcgggcaggacgctgcccgtcccttgcaaggcgcgggtggcattccgccagaagtcaccatgccgctggaacaggtgcagatcgaccacaccgtcatcgacctgatcgtggtcgacgagcgcgaccggcaaccgattggccgcccatatttgaccctcgccatcgacgtgttcacgcgctgcgtactcggcatggtggtcacgctggaagcgccgtccgccgtctcggtcggcctatgcctcgcgcatgccgcctgcgacaagcggccctggctggaagggctgaatgtggaaatggactggccgatgagcggcaagcccaggctgctctatctggacaacgcggccgagttcaaaagcgaagcgctgcgccgtggctgcgaacagcatggcatccggctggactatcgcccaccaggccagccgcactacggcggcatcgtggaacggatcatcggcacggcgatgcagatgatccacgacgaattaccggggacgaccttctccaatcccggccagcgcggcgagtacgattccgagaagatggccaccctgacgctgcgcgagctggagcgctggctcgcgttggcggtaggcacctatcacggctccgtgcacaacggcctgctccagccgccggccgcgcgctgggccgaggccgtggagcgcgttggcgtcccggccgtcgttacccgccccaccgcgtttttggtcgatttccggctctgttgcaaaaatcgtgaagcttga

SEQ ID NO: 344442 - DNA, 1578 bp, Pseudomonas aeruginosa
atgcgccagaatttaccagtgacgggtcgaaacttagaactcccaaaagatgccaatattctttcgactacctcccctcaaagccatatcacgtacgttaatcctgacttcattaaaatcagtggtttcactgaggaagaactattaggccagcctcacaacatcgtaagacacccagatatgccgcctgctgcatttgagcatatgtggagtacattaaaatctggccgctcatggatggggctagtaaaaaatcgctgtaaaaatggcgaccactattgggtaagtgcttatgtaacgccaatagctaagaatggttcgattgttgaataccagtctgtaaggaccaagcctgaacctgagcaggttttggctgcggaaaaattatatgctcaattgagaagcgggaaggccgcgaggccgaaatgggctgctagcttttccgtgaaaatactcttgctcatatggggtagtattatatcaagcgcaatggctgccggcatgcttactgatacatcaataagcagcttattgttagctactttaatgtcaggaagcttaagctctgttagtgttttggctattctctctcctcttggaagactggttgaaagagccaggaatatttccaataacccattaagtcaatccctctacactgggcgcaccgatgagtttggccaaatagagtttgctttacgaatgatgcaagctgaaacaggcgccgtagtaggtcgcataggtgatgcatcaaatcggcttagcgaacacacccaaagcctactaaaggatattgagtcaagcaatgtacttacagttgagcagcaggcagagacagatcaaatagcaacggcagtaaaccaaatggcggcaagcattcaagaggttgcgagcaatgcacagcatgctgcagatgcggccggaagagcagacactgagacggcatctggccagcgtctggtagcccacacaagccagtcaatcattgcccttgaaggtgaaattaggcaagccgctcaggttattcatgagcttgaaggtcaaagtaacgagatatcaaaagttcttgacgttatacgagggatcgccgagcaaacgaatttgttggcactcaacgcagcaattgaggccgcgcgtgctggtgagcaggggcgtggttttgctgttgtcgccgatgaggttcgcagtcttgctgctcgcacccagcaatcgacaacggatattcaaagcatgatcagcgctctacaagagcgagcgcaatccgctgttacagtcatggagcaaagtagtcggcaagcgcacacgagtgtagctcacgcagaggaagcagctacagctcttgatggaattggccaacgtgttaacgaaattaccgacatgaacgcgcaaatagcgactgcggtcgagcagcagggagcagtaagtgaagacatcaaccgcagtattaacaatatacgcgatgctgctgataccaatgtacagaccgggcagaataatttgcaaagtgcgaaatctgtcgctcagttaactagcgctctgagcgaactggcaaaacagttttgggaaaaacgaggataa

SEQ ID NO: 344443 - DNA, 1449 bp, Pseudomonas aeruginosa
atgcttgagcgcggcccctggcgcgatacggtgccgaatcgatcagtcggcatgacggatctgacaccgctgccgcaaggagcaaaggctttttcccacggtctgagatcgattcggtcccatctgttccagggacaatgggttctgaacacaaagggctttgttgaagcgtacctaggcaacggcatcaacgtgatctgctcatccaacgtgggtggtggcagccacatctatgccgggatgctggcaaaaccctccaacccagcgtactgggacggtcgccatccccagatctcgcaagctggcatggacaaatactattccgagatcatcgcgctgctacagacccgggcggccacggaagaagacaagagtccgaaccgcatcagtgagacaaattacggtggagagctgtccaccgcagggcttgcgagtccactcatcggtgtgctctttccgaagcaaccaggcagcgcatcgaaagtcacagatgccaatggcattgatcgctgggaatgcgactaccgcaacaacagtgtgctggggtccccgtccggtgccaaaacgacactggactttgccgcgatttggcccgccatgcagcgcggactgaaggtccgtgacctgtgcgaagtgcagaccatccgcaagttgagcgaagcgagcgctgagggaatgcgctatgaaatcctttatcgcaaccaccgggaaggacgtgacgaaaaggtattcgccaagcacgtcgtcctcgccgccggatgcctgaacacagttcgactgctgttcaaaagccgagatgtcgacggcgcgctggatggaatgccacggctcggtatgagcttcggcaccaatggcggatacttcgccttctggaaagaaaacagttccaaagatctctccgaggggttgccgttggccgggccattccggtcgaaagactcccccagcaagtcggtgcaggtgctgcgcgccgccatccagggcatcgatgatattcccatgccggccatactccgccgctggttgcgtcggaattcattcatcgtcgccttgggcaaggacaacaataacggcgcgatgacgatggagagcgggaaattccaaatcacctacgacaagaatgagagcagcgtctatcatgagatcgactacgaagttgaaacaattcaacgtgcaacaggcacaaaaatctacgcccctgcatcaccgctcaccgtgcagccgctaggtggtgcatgtctgggtacgtcaaacgccgatggcgtgatcgatgctaatggcgaagttttcgataacccgggcctctatgtggtcgatgccgcagcgctgccggaatcgaccggcaggccgccaagcctgacgatcgcggtatgggccgccaatgttgcggatcggctgctggcgtcgttacagggggaaccgcagaattcggaaaaaatcgtacgctaa

SEQ ID NO: 344444 - DNA, 369 bp, Pseudomonas aeruginosa
atgcttcccatcacctccaccgttgccgccttcgcagccatcggtctcatcgcactgagcgttcccgtgtccctgcgtcgcatggcggtcaagcagcccctggggccgggcgatgacccggcgctgctgcgccgcatccgcgcgcagggcaacttcaccgaatacgtgccaatcgtgctcatcctgctcgcgctcgcagagtatcggggggtgccgcagggctttgtcttcgctatcgcagggccgctggtgatcgggcgtgtcgcccatgcagtcggcatgcttggcgggatcatgccccttcgtcgcatgggcatgatggccaccttcgtatcgctgctggccggtgtggccgcgcaattcgtttga

SEQ ID NO: 344445 - DNA, 348 bp, Pseudomonas aeruginosa
atgaaatcgaaagccatttttgccgtgacgctcggcgcgatgctgagcgtcacggccgcggcttggacacccggagcctttgcccaggcggcccctgcgaaccaagctgctgcacctgccagtgcagacctcaccgacggcgagatccgcaaggtggacaagaccaccggcaagatcaccatcaagcacgggcggatcaagcacctcgatatgcccgccatgaccatggtgttccaggcacgtgatgccaccttactggacaaggttcaggcgggagacaaggtgcgattcggtgcggacaaagatggcgagaagctcatcgtcacggacatccagcccatccgctga

SEQ ID NO: 344446 - DNA, 1377 bp, Pseudomonas aeruginosa
atggcgggcggcacggtggcggtagccagcgtcagccgcgtcgccatggcggcgctgcccgagccggtcacgcagacctcggccgacaccatgccgccactcacgcccaacacgggcctcccttacaaccccgtcgtcacgctcaacggctggacttgcccttggcgcatgaacaacggcgtcaaggagttccacttggtggcagaacccgtggtgcgcgagatggctcccggcttcaaggctcacctctggggctacaacggccagtcccccgggccgaccatcgaggtggtcgaaggcgaccgcgtgcgcatcttcgtcaccaaccgcctgcccgagcacaccagcgtgcattggcacggccagcggttgcccaatggcatggacggggtggcgggcctgacgcagaaggccattccgccgggcaagaccttcgtctacgagttcacggcgcgccgccccggcaccttcatgtatcacccgcatgcagacgagatggtgcagatggcgatgggcatgatgggcttctgggtaacgcaccccaaggccaagcaccccttgatcgacgaggtgcagcgcgacttctgcttcttgctcaacgcctacgacatcgagccgggggcttacacgcccaaagtcatgaccatgctggacttcaatctctggtcgtggaacagccgcatcttccctggcatcgactcgctgaacgtgcgattgggcgataaggtgcgcatccgcgtcggcaatctgaccatgaccaaccacccgatccacctgcatggccacgagttcatggtcacgggtacggacggcggaccgatcccgaaagccgcgcgctggcccgaggtgaccaccgacgtggccgtggggcagatgcgccagttcgagttcgtcgccgacgaagaaggggactggtcgttccactgtcacaagagccaccacaccatgaacgccatggggcacagcgtgcccaccatgatcggggtggatcacagcggcgtggccggcaagatcgccaagctgatccccgactacatggtgatgggcgagcgcggcatggccgacatgaccgagatggaaatgcccatccccgataacaccgcgctcatgatgaccggcgacggcccgttcggatcggtcgagatgggcggcatgttcagcgtgctcaaggtgcggcgcgaccagaagcccggcgactatggcaatccgggctggtaccaacagccgccgggcacggtcgccaccgagtaccaagggacgatgaccgagccggtgcgctcgtcttccaccggaggcagctccatgccccgtgcatccaagtccacgtcgcaagtcgaggtgcaggtacgcaagccggccagccacgcgggccattga

SEQ ID NO: 344447 - DNA, 1455 bp, Pseudomonas aeruginosa
atgagcagcagcatccactccacgtcccatcgacgttcccgcgctcgcttctcactcgccgccttggccttggcggcgctctccggctgcgccagcgtggacctggcgcaaaacctgtcgcgcaccaatgacgaggccgccagcttcaccggcgggcgtctggccctggctcgctcggatgaagaccatgcgcagcgccgccaagtggcttccgatctgctggctcagccgcttggccagccgcaggcggtggaactggcgctggccaatagcccggcgttgcaggccctgctggcacagcatggcgccgacgcggcccgctccgcgcagggggggcgcatcgccaatccggtgttcggcttcgagcggctgcgcacaggcagcgaactggaattcggccgcttgttgtccttcggactactggatttgctgacccttcctgcgcgaaaggaactggctgaccgccagatcgagcagtcgcgcctgcgcctgacttccgacgtggtggatcagatcacgctggtgcgccaagcctgggtgcgcgcggtggccgcacagcaaagcctgcaatatgccggtcaggtgtacgagagcgcagaggccagtgccgaattggcgcggcgtatgcaggccgtgggcaacttcagcaagctggagcgcgcccgccagcaagcgttctacgccgacgcgggcacccagctcgcatccgcacgccatgccgccatggcagcgcgggaggaactggtacgccaactgggcctgactgacgtccaagcgcaggagttgacgctgcctgaacgcctgcccgaactgcccaagcagccattgcagccggaggaagtaggccaaaccgccagccgcgcgcgcctggacgtgcggctggcccaggccgaactcgatgcctcggcacgttcacggggcctgactggcatcaccagcgtgacggatatggaacttggcgtgacccgcaacaccacgttcgacaacgccgatggacacaaggccaccgggcgaggctacgaaatctccgtgcgcctgccgttgttcgactggggtgacttgcagcgcgatgcctccaaggcccaggtgctggcatcggcccagcgcctggatgccacgctgcgcgcggcgggatcgaacgtgcgagagagctattcggcctaccgctcgacctacgacatcgcgcggcaccagcgcgacgaagtcgtgccgctgcgcaagaccatctcggaggagaacctgcttcgctacaacggcatgttgatcggtgttttcgacctgctggccgacgcacgtgaccaggtcggtgcggtgatgtcgaccatcacggccgagcagcagttctggttggccgatgcagcactgcaagcggcactgatcggcaggcccatggctagcgccgtagcggccggaggcaacccgcagccggccagcagcgacgatgccgggcactaa

SEQ ID NO: 344448 - DNA, 1077 bp, Pseudomonas aeruginosa
atgggtacacccctggcgttcaagcccctcaacgacagagtctcagcgccgcaggctgattcggctgctgcttctgtgaagtggcccaagcggggcttctggaagagcttgcgcatgacgctgcgcttcatcaaccgcccaccaggccctactggccgctggcccgcacagccgctaccgatccatgcgctgacccgcgcggagattcttgcggcgcctgcgcgcaccttgttccgcttggggcattcgaccatcctgctcaagctgcgcagcggcttgtggctgacggacccggtgtttgtcgagcgagcgtcgttcgttcagtgggcaggccccaggcgctttcatgcccctccgattggtttggacgcgctcccggacatcgagggcgtcgtcctgtcccatgaccactacgatcatctggaccgcaacagcatccttgcccttgcgcccaaggtgcggcacttcctgacgccgctgggtgttggcgaccggctcatcagctggggcattgacgcgcgcaaagtggtgcagctgggctggtggcagtcggccacggtcggggacacggcgggcgggctgcaatgcacggcgactccggcccagcatttttccggtcgagggctgttcgatggcgaccgcacactctgggcctcctgggtgctggccgatggcgatgtccgcatcttcttcagcggggactcgggctatttcgacggtttcaagaccatcggcgagcgcctgggaccgttcgatctaacgctgatggaggccggggcctacgacgcccactggccccacgtccatatgtggccaccgcagacggtgcaggcccatatcgacctgcgtggcaagcgcctgctgccaatccacaacggaacgttcgatctgggaggccatagctggcaggaccctttcgagcagatttccgccatggcgcagacccgcggaatcggagtgctgaccccgctcatcggagcgccgatggacatgcttcatcccgatcccacaccggcctggtggcgtgattcgcagccccaagcctctatgcaatttcataacagagttctctcatga

SEQ ID NO: 344449 - DNA, 2445 bp, Pseudomonas aeruginosa
atgaccacctctctcactgccacagttccgatggagttcaagctccccatcgaaggaatgacctgcgcgagctgcgtttcgcgcgtcgaaaaagcgctgaacacgttgcccggcgtggaaagtgccaccgtgaacctcgccaccgaagaagccaccgttcgcgcctccggcgtggatgcagcggcactggcgggcgctgtccgcaaggccggctacgaagttcgcgccgacgagatccagcttcagatcgaaggcatgacctgcgcgtcctgcgtgtcgcgcgtcgagaaagcgctgctgcaggtccccggcgtgtccgccgcgtcggtgaacctcgcgaccgagaaggccaccgtcactgcgctctccggggtgtcgttcgcgacgctggcggccgccatcgacaaggccggctatgtcgccaagccggtcgagggcgctgccactccccagaccgccaagcgccttcccgaatggtggccggttctcgtgggcgcgttgctgacgctgccgctggtgctgcccatggcgctgcaattgttcggcctggactggatgctcgatggctggacccagatggcgttggccacgccggtacagttctggctgggcgcgcgcttctaccgtgccggctggaaggccgtgaaggccaggactggcaacatggatctgctggtcgcgctgggcacgagcgcggcctacgggctgtcggtctatctgcaatggaagcattcgggccacggcatgccccacctgtatttcgaggcctcggccgcggtcatcacgctggtgctgctcggcaaatggctcgaagcccgcgccaagcggcagaccgccgatgccatccgcgcgctcaatgccctgcggcccacggttgcgcgggttctggtcgatggggttgaagtctctacgccggtggaacaggtggcggtgggcgacgtcgtcgtcgtgcgccccggtgaacggatgccggtcgatggcgaggtgatcgacggacgcagccacctgaacgaatcgctcatcaccggcgagagcctgccggtgcccaaggcggtcggcgacaaggtgaccggcggctcggtcaacgaggaaggcgtgctgcaagtccgcacggcggccatcggcgctgaaaccacgctggcccggatcatccgcatggtggagtcggcgcaggcagccaaagcgccgatccagcgtgttgtcgaccgggtgagtgcggtcttcgtgccggtcgtcctcggggtggcgttgctgaccttcgtcggctggctcctgtacaacggcggcgacgtggaacaggcattgatcagcgcggtggcggtgctcgtcatcgcctgcccttgcgcactcggcctggccacgcccacggcgatcatggccggcaccggtgtggctgcccgtcagggcattctgatcaaggatgccgaggcgctggaagtggcgcactcggtcaccaccgtggccttcgacaagaccggcacgctgaccgaaggcaagccgtcgctggttgccatcgaagcgatgggagacgtgcatcccgatgaagtgctgcagctcgccgccgcgctccagcagaccagcgaccacccgctcgcgcatgcggtgatggagaaggcccgggcgcaaggcgtggcggtcgagtccgcacgagaggcgcaggccctgcccggccggggcgtgcaggccgtcgtgggcggccagcacatcctgctgggcagcacgcggctgatgaacgaggaaggcgccaacccgggcgcgctgctggccgaggcgctgcgcctcgaaggcgaagggcgaaccatctcttggctgctggagcgggacggcgacctggtccgcgtgctggggctgctggcctttggcgacacgatcaagccctcgtcctacgctgccgtggcacggctgcgcgagctgggcatccgcacggtgatgctgacgggcgacaaccagggcagcgcgcgcgccgtgggccgtgaactgggcatcgatgacgtccgcgcggaactgctgccgggcgacaaggcgggcatcgtgcaggagctgcgccagcagggccgcatcgtggcgatggtcggtgacggcttgaacgacgctccgtcccttgtggcggcaaacgtcggcctgtcgatgtcgaccggcaccgatgtggcgatggaagcggcaggcatcaccctcatgcgcggcgatccgcgtctggtggccgattcgttcgacgtctcccgtcgcacctactcgaagatcaagcaggggctattctgggccttcgcgtacaacgtgctgggtattccgctggccgcgctgggtatgctcagcccggtgattgcaggcgcggccatggccttcagcagcgtgagtgtggtcaccaatgccctgatgctgcggcgctggcgcggtgctgcgaccggcaccaacggcagcggccagaatcaagaagaaggagcctga

SEQ ID NO: 344450 - DNA, 303 bp, Pseudomonas aeruginosa
atgaacatcggtgaagcctctaccgcctcgggcgtctcggcgaagatgatccggcactacgaagacatcggtctgctgcccccggccagccgcaccgatgccggctaccgccagtatggcgacaaggacgtcagcaagctgcgcttcatccgccattcccgcgacctgggtttctcgctggaccagatcagtgccttgctcgatctctggcagaaccgcaaacgatccagccgccaggtcaaggactggcggaatcgcacatcgccgagctggatcagaaagtgcgggagcttcaggagatga

SEQ ID NO: 344451 - DNA, 150 bp, Pseudomonas aeruginosa
atgctcgaatacctcgtgcgctcgtgccacggcgacgaccggccggactgcccgatcatcgaatcgccggcatctgaaaccaccgggaaccccgaaaaaggcggcggcgaccgtagccgccgcggcaagcgccaccagcttgttccttag

SEQ ID NO: 344452 - DNA, 525 bp, Pseudomonas aeruginosa
atgtccttgaagcccatttctccccaagcagcccgcgaccttctcagccaaggggctgtcctgatcgacattcgcggcgcggacgagcatgcgcgcgagcacattgctgccgcccgccacgtgcccatggagcatctgaaaggcgcgtcccccctggacgctgccggcggcgtgatcttccattgccgatccggcaatcggacgcaggtcaacgcccagacgttgagcgcgtgcgcggcctgcgacgcctatgtgctggaaggcgggctcgatgcctggaagaaggccgggctccctgtggtcgcagatgcgtcccagccgatggagttgcagcggcaggtgcagatcacggcgggcaccttgatcgtgctgggagcagtcctgggcgcgacggtctcgccgtggttccacgtgttgtcgggctttgtcggagccggctttatatttgccggggtatccggtttctgcggcatggctcgggtcttgatgcgcatgccgtggaatcgccgggcggtaggcggttga

SEQ ID NO: 344453 - DNA, 312 bp, Pseudomonas aeruginosa
atggttgcaaagatgagagacaagcagttctttcaggagggggccgctcaggcggccgtcctgctgcgaacggtgggcaatgagcatcgcttgctgttgctgtgcctgctgatcgagcacggcgaaatgtcggtaggcgcgctgcatgagcacgtacccctgagccaatccgcgttgtctcagcatctggccaagatgcgcgaggaaggcctggtcacgttccgccgggaggcgcagacgctgtactaccggatcgacaacccggatgtagccaccctcatctccacgctcaagaccatcttctgtccctga

SEQ ID NO: 344454 - DNA, 948 bp, Pseudomonas aeruginosa
atgggtataagacaggcgcaaatcccggcgtcgtacttcggggtcgtcctgggtctggcaggtctcgggcaggcttggcgtatcgcggcgcagcgatggagtttgccgggcgctgtgggtgagacggtcattgcgatcgcgggtctggtctggttcgtcctgatcattggctatctgtggcaggcaatcaggcgcttcgaggtcgtgaaagccgagttccttcacccggtgcaaggaggcacgcctgccttgctggcggtttccactttgcttatcgccatcgcggtcctcccgtactcaagcatcctggcatggcttctgacgatcgcggggatcgcgtggcacctgggcttctgcctttggcacaccggcttgctctggcaaggcgggagaaacacggtagacatggtgccgaccctgtatttgccgaccgtcgccggcaatttcgtcagtgcggcagcattgggggcgctaggtcagccggattggggatggctgttcctgggagcgggactgttctcatggctggcgctcgaatcgctggtcatccatcggctttggcattcgtcctcagtgcccacgcctcagcgccccctgatcggcatccagttcgcgccgcccgtcgtctgcgcgatggcgtggctggcattgtctccgggaagcacggaccactggttgctcatgctatggggctatgggctctttcagctgctgctcggcctgcgcctgggcccctggctgggggcgcagcccttcattcccacttactgggcctacacgttcggcgtagccgcagcgacggtcacaggcctgcacctggcacagtcgggtgttggtgcggcgcaagtcctggcgctgccggtgtttgtcgcggccaacctgttcatcggctatctggccctacgcactgctcgcttgtttgccgggaagcccaagtcccgcaagtaa

SEQ ID NO: 344455 - DNA, 879 bp, Pseudomonas aeruginosa
atgaccgggcatgcgccagacaccggcatgaagccccgcttgtccgaacgtgtgttcgtccgagcgcagcatcttctgcccaagcgcttcatcacccgcatgctcggcgtactcgcgcacaagcgcgcgggcgcactgacgcaatgggtgattcggcgtttcatcgcccactacgacgtcgatatggcggacgcggcgtcgagtgaccctggagcctacgagaccttcaacgcctttttcactcgtgcgctgcggcccggcgtgcgtccggtggcgacggcgcaattgatctgcccggtcgatggagcgatcagtcagttcggccgcatcgaacgtggccagctactccaggccaagggcaaatccttcagcatcggcgccttgctggctggcgatcaggtgctggcacgcaggttcgagcgtggggctttcgcgaccctctacctcagcccgcgcgactatcaccgcgtccatatgccgtgcgacgggcatctgctttcgatgagctacgtgccaggcgagttgttttcggtcaacccggccacgacgcgcggcgtcgacgcgctgttcgcgcgcaacgagcgtgtggtgtgccacttcgactcgccgcatggccccttcgctatggtgctggtgggcgccgccatcgtcggcagcatcgtgacggtctggcacggcgtggtcaggccaccccacggccgcagcgtgcggcactggagctatcccgaccgtcgcatcagcctgaagcaaggcgaggagatggggcgcttcctgctgggctcgaccgtggtgctgttgtttccgccggggccgatgcggttcaaccccgaatgggctcccgcgcgcccggtgcgcctgggagaggtgatggccgattga

SEQ ID NO: 344456 - DNA, 915 bp, Pseudomonas aeruginosa
atgaaatcgcctgcccacctcaacgcattgcgagcattcgaggagactgcccgccaccagagcttttccgctgcggcggccgaactgaacgtgacgcctgctgccgtcggccaactcgttcgcgcgctcgaagaatggctgggcacaccgctgttccatcgcggcaaccgcggacgatccaggctggttgccaccgaagtggcgcagcgcgccctgcccgacatccgagcaggcttcgatcggttgggcctcgggctggaacggctcaaggaagggtcggccagcggcgtgctgaccgttgcggtgagcccggctttcgccgccaagtggctgctgccgcgcatcgagcgctttcatagcgcatggcctgataccgatgtgcgcttggataccaacctcaagcccgtggatttcatcgcgcaaggggtggatatcggcgtgcgctatggcctggggatgtggccagacctggtggccgacaagctgatggacgaggaggtctaccccgtatgttcgcccgagttgctgcgtcggaaccgggacttgcgcgcgcccgccgatctgttacgggagaccttgatccacgacctgtcgatggacggtcatgcgggcttccccacctgggagacctggatggagaaagtcggcgtgacgggggccgccacacggcgcgccatgaagatcaacaattccgcggcggttctgcaggccgcgatcgaggcgcaaggcgtcgcgctcgcgcgcagcgtgatggcgcgcgacgacgtggcgagcgggcgcctggtccggctgttccccgagatcagcgtcatgtctgcgatggcctactacatcgtctatcggcccgggtgcgcgagcctgccgcgactggtggccttccgcgactggctgctcacggaggtggcggccatatga

SEQ ID NO: 344457 - DNA, 774 bp, Pseudomonas aeruginosa
atgagtcatcaattcgacggaaagaagctcctggtcgtcgggggcaccagcggcatgggcatgcagacggcccgggtggtgctggcccagggcggcagcgtggtgatcgtcggcaatcgcccgacgaagaccgaggaagcgcgcgaggaactgtcgagcctcggcccggtcgccgcagtgacggccgacctctccagcgacgcagggctggccgcgctgctcaaggccatcgacgaacaacatgcggacatcgacctgctggtcaacgccgccggtgtgttcttccccaagcccttcctggagcactccgacgctgactacgaccagtacatgaagttgaacaaggccaccttcttcatcacgcagaaggtcgccgccaacctcgtcgccaaggaccgtcccggcgccatcgtcaacatcggttcgatgtgggcgaagcaggccatcgcggccaccccctcgtcggcctactcgatggccaaagcgggtctgcattcgctgacccagcacctggcgatggaactggcacccaagcacatccgcgtcaatgcggtgtcgccggcggtggtgcagacgcccatctacgaggggttcatcccgaaagccgaagtgcatgacgcgctgcaaggcttcaacagctttcacccgatcggccgcgtgggcaccccgcaggacgtcgccgaagtggttgccttcctgctctcggacaaggcgggctgggtcacgggcgccatctgggacgtggatggcggcgtgatggccggccgcaattga

SEQ ID NO: 344458 - DNA, 282 bp, Pseudomonas aeruginosa
atggtctatttgcaaatcaccctcaagatcgccgaagccaaccgggctgcggcggctggcatctaccagaagtacaaggggccgttcctcgacaccgttcccggtgccgagtccaaggaactgctggtgcgcaacgaagacgtgcaggtactgcatggcttcgatacccaggagaacgcgagcgcctatctgcagagtgcgctgttcaccgcggacgtggtcggtggcctcaaaccgctgctcgatgccgaccccgacgtgcgcatctaccagattgcttaa

SEQ ID NO: 344459 - DNA, 345 bp, Pseudomonas aeruginosa
atgatgcaagactggaatgcctatcgcggcatgctgatggaacgggtgggcgaatacgcccagcagagcccggcggtgatgcaggcgcttggcgccctcagcggagtcgtcgaacaaggcgggcacctgacgccaaagatccacgaactgatcgcgctggccgtggcggtgacgacccgttgcgatggctgcattgcggtccatacgcagaaggcagtcgagcacggcgcgaccctggaggaaatctccgaggctctgggcatcgctatcgcactgaatgccggcgctgcactgacctacacggctcgcgtgctcgacgcccacgcgcaactgcccaaacagtaa

SEQ ID NO: 344460 - DNA, 669 bp, Pseudomonas aeruginosa
atgcgcatcaacgcagatttctcgcgccgagccatcgtgacgcccgagcagtaccaatgggtcgcctccccccagggaggcgtcgagcgcatgatgctcgatcgcatcggcgcggagaaagcccgggccaccagtatcgtgcgctacgcacccgattcgcgcttcccgcatcaccctcatccgggcggggaggagattctggttctgtcgggggtcttttccgaagacgaccggcactatccggcaggctggtacttgcgcaatccacccggctccagccatgccccgtccagccacgagggcgcagacatcttcgtcaagctctggcagatgcagcctggcgagcagcgcaacgtgcgcatcaacacgcacgacccggccgcatggcagcgccgggatggccgcgaggtctgcccgctgttctcggatgctttcgagcgtgtcagcgtgcaacgcctggcaccccttgaagcgttgctgaccgactcggccgatggcatcgagctgctggtgctgaccggcgaagtcatcaccgatggccagtcttgcgagcgtggaagctgggtgcgtctgcctgtcggtgagcgccccgagatcaccgctggcacgcacggcgccaccgtctatctcaagaccggacacttggccgctgcggtgcagggggtctaa

SEQ ID NO: 344461 - DNA, 1149 bp, Pseudomonas aeruginosa
atgcagcccacacgcattgccatcatcggcggcggcctcagcggcctttatgccgccatactgctggaggcccgcggcattcgggactatgtggtgctggaggctcgcgagaccttcggtggccgcatcgtttcctggccggacgcatctcgtccccacgaggaagcgattgggaagctgcccatcgccgggcgcttcgatatgggggcaacatggtactggccggccatgcacccggagctgcaacagcttgtggcgcagcttggcctggagaccgtcgtgcagcatgaaaacggcgacatgttgatcgagcgctccaggacacatgcaccgagccgcgtcgatgggttcgtctccgcgccgcccgcgctgcgcctggcgggcggcatggccgcgttggtcgacgccatccgcgcccgcctgcctgctgacaggctcctggccggccaccaggtcacgcaccttcagcaccagggcgaacggatcgaggtccaaacccgggatgcgttggggcaagtcgtttcccgccatgtcgcccatgtcctgctggcgataccgcctcggctggcggccaacaccatcgacttcgcaccgaccctgcccgacgcgctgcaacggcagtggcaggcatgcgggacctggatggcgccgcatgccaagtacgtcgccgtctacgacacgccgttctggcgcgagcaagggctgtccggcgaggcgcgcagcgccgtcgggccgatgggcgagatccacgacgcctcggccgagggtggcgatgccgcgctgttcgggttcctgggtgtgagcgcgcagatcaggcagcaaacgccggaggcggtcctgctttcccattgccgggcccagtttgtccggttgtttggcgagcaggcggcacggcccaaggcagaattcctgaaggattggaccagcgacccgcgcaccgcggtcgccgccgacgcgcacccggatgtcgaccacccgaccccgcctcccaggacaccacacgatggcacctgggaaggccggctcgtcggcattgccagtgagtggtcgccgcatttccccggctacgtggccggggccgtcgaggcggcacgcctcggggtcgaagcgctgttgtccccccacacggcggcgtccatcctgaattga

SEQ ID NO: 344462 - DNA, 1179 bp, Pseudomonas aeruginosa
atgttcgatttcgacgaggtcatcgacaggcgcggcaccaactccatgaaatgggagcatggtcgccagttcctcacgcccgaacagcgggccgccgacccgctaccgatgtgggtggccgacatggatttccgggtggcgccgccgatcctcgatgccctgcgcgagcaggtggagatgggggtactcggttacggcggtacgccggacagctaccgtgaagccgccgtggactggcaaatgcgccgcttcggctggcaggcccgcccggaatggctggtgcagtccccgggcgtcatcagcgcgctcaacatggcggttcaggcgttcacacagccgggcgaccacgtgctggtacagacccccgtctacttccacttcctgcacgatgtggtcaacaacggccgtcgcttggccctggcgccgctgacgctggaagctggacgctatcgctacgatcccgaggtcttcgaggccgccatccagccgaacacccggctgttcattttgtgcaacccgcacaacccgaccggcaatgtctggacgcgcgaggaactgctgtcgatggcggcgatctgcgagcgtcatggcatcctgatcgtctccgacgaagtgcatcaggacctggtgttcggcgagggccgacggcatgtaccgctggcgatgctggatgacggggtcgcgctcaacaccatcgtctgcaccgcgcccagcaagacgttcaacatcgccggcctgtcctgcgccaacatcttcattcccaacgcacgccaccggcagcgtttttggacgcagtgcgagcgcaacggcgtgttcctcgtcaacacgatgggcacggcggcctgtgaggcggcgtaccggcatggcgagccgtgggtcgacgccatgctcgactacgtgcgcggcaaccagcgctactttgccgcgcaggtcaccgcgctggggctgcccctgaccatcacgccgaccgacgcgctctacctggcgtgggtggacttcagagcactcggcatgccaccggtcgaactgcatgacttcctgctgcggcgcgcccgactctggctcgaccccggacacaagttcggcgcacccggtgaaggtttcatgcgcatcaacctggcctgccctcgcagcgtggtcgacgaggcactgcaccgcctggcctcggccctttcctga

SEQ ID NO: 344463 - DNA, 1029 bp, Pseudomonas aeruginosa
atgaagactacctatcgtgcgatgcaagtaacccggcctggcgtccttgaactggcggagcgcccgacgcctgcgcccggcgtcggagaggtactgatcgaggtcgaagcctgcggtatctgcggtgccgataccggcgacatcgaacgcgccgatcccacgctgcaaccgccgcgcgtacctggtcatgaagtggtcgggcgcatcgcggcgctcggcgagcacaccccgtccaactggaaagtggggcagcgcgtgggcgtgggccgcttgggtggtcattgtggcgagtgcgtccagtgccgccagggccgcttccagctctgccagaaccagcccgtcctcggcgccacctgcgatggcggctacgccgagatgatgctggcacgcgccacgggattggtttcgattccagacgaactcgacgccgatgaagccgccccgatcctgtgcgcaggcatcgccaccttcaacgcgctcaagaaatgcggcgcagaggctggcgatacggtggccatcctgggcatcggcggcctggggcacatggcgcttcagtacgcacgaaggatggggttcaaggtcatcgccatcggacgaggccgcgacatcgcggaagacgcgctgacgctgggggctcacctctacatcgacacccgtgaggaagacgcggcagccaggctcaagagcatgggtggcgcgcgcgccatcgtcacgatgatcgaccacgcggagacggtatcggcgctgctggctggcctggcgcccgaagggcggcttgtcgtgctcaaccccggcaaggagcccctgctggtgcccgccggcctgctggtcggcgggcagcgcagcatcctgggctcgatcaccggcacgccttacgacaacgagaagaccctgagtttcagcgttctggcggacgtgcgcccctggatcgaaaccatgcccctggaagacgcccaggacgcctacgtgcggatgaaatccggcgacgtcaagttccgcatggtgctgaccatgaatcagtcccactga

SEQ ID NO: 344464 - DNA, 900 bp, Pseudomonas aeruginosa
atgtctttacgatctctcgcaccaaaactctttggcatcatcgccgccgtttccctttcagcctgcgcggcacttggcacgcagaccgaatcagggacagtggcggcccaaggcgctcatcccgtcagcttcgagcaaatccgcaatgcgaccgtcaaggtcagctatggcgacaccactttcctgatcgacccgatgctggcggagaaggaaacctatcccaccgcgccgggtgccttcaacgaccacctgcgcaacccgcgcgtcgatctccccaccagcatcgacaaggtgatcgaagccgatgcggtcatcgtcacccacctgcatttcgaccattgggacgaagcggcaaagaagcacatccccaaggacatacccatctttgcgcagaatcccgaggatgccgaaaaaatccgggaggccggattccgcgatgtccgtgtattcggcgagggcaccgagttcaatggcgtgcgcctgacgaaaaccagcggccagcatggcagcgatgccgccatggccgtgcgcggcccacagctcggcaaagtgtccggcgtggtgttccagcgccctggattcaaaacgctctacctcgctggcgatacggtgtggaaccggcacgttgagaccgcactggcgacctacaggccggaagtcatcgtcctgaacaccggctacgtgcgcttcaagggcctggacggcgccatcatcatgggcaaggaagatctcctcaaagcgagcagggccgcacccaccgcctacatcattgcaagccatatggatgcgctgagccatgccacccaatcacgcaaggaactggccgagttcatcgccgagaagcaactcgacccgaagcgcgtgctgattcccgaagacgggcaaagctatacgttctag

SEQ ID NO: 344465 - DNA, 1236 bp, Pseudomonas aeruginosa
atgccaagtccccacgccgtcgtatcgaacacccccacgcttgaactctccgaacgcgatcaacgcggcaacatcatccggctcaccgtggctcaggcgttggccggagccaattcggtggtggtctatgccacgggcgcgatcattggccatatgctggcaccgagcaaggcgctggctacgctgccgatttccatcttcgtggtcggcatggccgcttgcatccttccggcgggagccatcgccagacgtcatggccgtcgtgcggcttttcttgccggcacaggcggaggggtgctgaccgggctgctggcagcgttggcagtcatgctgggatcgttctggctgttctgcctggccaccttctttggcggcgcctatgcggcggtggtgttgtcgttccgcttcgcagcagcggatggtgtcgccgcaccgcggcgggcacgggcgttgtccttcgtgatgggaggtggcgtggtggcgggggtcgtgggaccgcagttggtcacccacaccatgtacctttggccagcgcatatgttcgcagccacgttcgtcgcccaggcgatcgtggcggcgctatcggccatcgtcctgtacggcgtgcgcctgcccatgccttccgccgcggaggtcgcgggaggtcggccgctgggcaccatcgcgcgccaaccgttgttcatcatcgccgccatttgcggcgcggtttcctacatgctgatgaacttcctgatgacggccgcgccattggcgatgcagatgtgcggacactcgcaggaaagctccaatctgggtctgcagtggcacgtcattgccatgtatgcccctagctttttcacagggcgactgatcacgcgcttcggcgctggtcgtgtcgtcgttgcaggcctgctgcttaccgggctgtccgccgccgtggggttgctgggagtcgatgtcgcccatttctggctcaccctggtcctactgggcataggctggaattttggtttcatcggcgcctctgctttggtgctggaatgccatcgtcctgaagaaaagacacgggtgcagtctctcaacgacttcatcgtattcggcaccatggcggtgggctcttttgcctcaggcagtcttctggcggcctacgactggtacaccgtcttgtgggtgtcgttcgttccgctcgcgatagctctggtcgctctgtttgccgcgccaagcgggaacaagcacaacgctgttggtcaagggtag

SEQ ID NO: 344466 - DNA, 1443 bp, Pseudomonas aeruginosa
atgctaggcctagacgctctggaactcgcgcgaatccaattcgccttcaccatttctttccacatcctattcccggccatcacgatcggcttggccagttatctcgccgttctggaaggactgtggctgaagacgggaacccagacctatcgggatctctatcacttctggtcgaagatattcgccgtcaacttcggcatgggcgttgtgtctgggctggtaatggcctatcagttcggtacgaactggagtgccttttcggatttcgcaggttccgttactggccctctgctggcatacgaggtgctgaccgcattcttcctggaagcgggctttctgggcgtcatgctcttcggatggaaccgcgtcggacccggcttgcattttttctctacgatcatggtggcgattggcacactggtgtcgaccttctggattctttcctccaatagctggatgcagaccccgcagggcttcgagctgatggatgggcgtgtcatcccagtagattggttcgcggttgtattcaacccttcgttcccgtaccgcttggcgcacatgtcgacggccgcattccttgccacggcgttctttgtcggtgcgtctgcggcatggcacctgctgcgcggcagcacgaaccccgccatccgaaagatgttttccatggcgctgtggatggctgtcttcgtggcgccattgcagcttctgctcggcgacctgcatggactcaacacactggagcatcaacccgcaaagattgccgccatcgaagggcactggtccaataccccgggggaatcaacgccactgacgctttttggctggcccgatatgcagcgcgaggaaacccgcttcagtgtgaaagtgccatatctcgggagcctgatccttacccattccttgtccaaacaggttccggcgctcaaggagttcaagccagaggatcgtccaaactccacgatcgtattctggtcgttccgaatcatggtggccttgggcttattgatgatacttgcaggtctttggagtgtctttttgcgctggaataaaaagctgtatgaatcgcgagcgttcctgcgtttctgcctgtggatggggccgtccgggctgatcgcgattctcgcgggctggatcacaaccgaggtcgggcgccaaccttgggtagtctacggattgatgcggaccgcggatggcgtttccgcgcacagcgccaaccagttgggattgtctctggccttgttcgtgatcgtctactttgctgtgttcggagccggcacaggctacgttctgcgcttggtacgcaaggggccggcgatgggcgaaggcgcgggagcggagcacgggggccccggcacgtcacgcacgcccgcacgaccgctatctgctgcggaaaacggcctggaaggcgatccgatgaatgccgaacacaacgggagggcatga

SEQ ID NO: 344467 - DNA, 1011 bp, Pseudomonas aeruginosa
atggtgggcgtcgatctgtcgatcatatgggctgtgatcatcgtctttggggtgatgatgtacgtcgtcatggatggctttgatctcggcattggcatcctctttccattcgtccgggacaaggccgaacgggacgcgatgatgaacagcgtcgctccggtctgggatggcaacgaaacctggctggtgctggggggcgcgggtctttatgcagcgttcccgctggcgtattcggtgattctcagcgccttttatcttcccttgatgttcatgctgctgggacttgtctttagaggcgtggctttcgagttccgcttcaaggccaaggaccacaagcgccatatttgggataaagccttcattggaggatctctcatcgccaccttttttcagggcgtgacgctaggcgcatttatcaatggcgttccggttcagaatcgcgcatttgccggcgactcgctcgcctggctttcgccgttccccctgtttaccggggtggcgctgatcgcggcatatgctttgcttggctgcacatggctcattctgaaaacagaggggcctctgcaacaaaaaatgcaccggattgctcgaccgttggccgtcctgcttctggcggcgatcggtatcgtgagtctgtggacgccacttgccgagccaagcatcgccgatcgatggttcagcctgcccaacttcttttggttcctccccgttccgatcctggtgttgaccgccttttactttctgcttcgctcggcgtcgagaggtgatcacgcaaagcccttcctgctgaccttggccatgatcttcctgggattcactggcctgatcatcagcttgtggcccaacatcgttccggggtcgctcaccctctggcaagccgccgctccacctcaaagccagggtttcacgctcgtgggcgcgcttttcatcattccgatcattctggtctacacggcgtggagctactacgtcttcagaggcaaggtaaagctgggacaggggtatcactga

SEQ ID NO: 344468 - DNA, 696 bp, Pseudomonas aeruginosa
atggtgatgtcaatgaacccgcatttgcatcccgacggcgtcagccgtctcgacccattggccgaggtcgccaagaccttggggcatccgcatcgcctggcgctgctggagcagatcgtgcgtggtgagcggtcggtcgagaaactggccgagctgaccgggatatcggtggcgaacgcttcgcagcacctccagcacctgaagcgtgctggctgtgtccagacccggcgggatggcaagcacatgctgtatcgcctggggccagggccactggccgccgtcgtctcggcattgcacgactatgtggcgttccagcacgcccgcatccgcgaagccattacggacagtcggcagcggccgcaggagatggagtccgtctccattgacagcctgcttgaccgtctggaagaaggagcggtcgtgctgctggatatccgcgacggtggcgagttcgcacaggcccatctgccaggtgcgatcaacattccgctggagcaactggcggatcgcgtcggagaactgtcccgaggaacagaggtggtggcctactgccgcggcccctattgcgtgttgtcgatgcaggccgtcaccatcctgcaaaccctcggtgtgcaggccacagcgctggccggcggcgtgccggaatggcgggcggcaggcttgccgctacaaaccgccgttgatgcggcaccgtag

SEQ ID NO: 344469 - DNA, 387 bp, Pseudomonas aeruginosa
atgggcacagtgcttacgcctgccacatgggattcgctatggacctgcttcgtgctcgccctggcgaccagcagcatttcggtttccatcacccagggcgagttgttcgcccccttgcgcaactgggcgcaaaaagtcggccatatgaccggccacttgttccagtgcttcttctgcatcagccactgggttgtgttcctgggcattgccatcttccgccccaccatcaccagcagtggcttggtgctggtggattggatcgtcgctgcgttcttcagcctgacgctgtccacgttggtcagcgggctgatgttcaaggtgctgctcaccgggatggccaagaaggtacgcgacaaggaactcaaggagatgtttgcgcccaagtaa

SEQ ID NO: 344470 - DNA, 321 bp, Pseudomonas aeruginosa
atgcttcaagaactgacaaacgagaatttcgataccgcgctcggtcaatcgcccggtctatacgcggtccgcttttgggcggaatggtgtggtccctgcagggtgatgtccccggtcttcaaggacgtggcgcaggacatgcaaggcaccgcgcagttcggtgaagtcgatatcgatggttcgccggaattggcgggccggtacggcgtgcagagcatcccgaccgtgttgctgttcaaggatgggcaggtggttgaccggctgaccggcgctgccccgaagcccaacgtcatccgcttcatcaacaaccatcttcgttga

SEQ ID NO: 344471 - DNA, 519 bp, Pseudomonas aeruginosa
atgccccatgtcagagtgaaaccgtggcaagacggcgatgaagccccagccgagcttctgcaaagcatgcgggcgcgtcgcccgaatggcgagctgatcggcattgaccgcgtactgctcaaaagcttcccgctcgcaatgggctggaacggcttgctcggtcgcgtgcgagcggagtttgagctcccgctcgaataccgtgaactcatcatgtgtcgcgtggcggtgctcaaccgagccgaattcgagtggaatgttcaccagcccgcctacctgcaagccggaggcacgcagcagaaatgcgatgtcctgcgtgccgatggtatttcctcgctattcgataacaaggagcgagcgctgctcgaactgacggaccaatccacccgcaatgtcgaagtggatgaagttgtcatcgagaagctcaaggaactctttggggagcagcagactgtcgaagccgttgcgacggtcgctgcatacaacatggtgtcccgctttctggtcgctctcgcaatctga

SEQ ID NO: 344472 - DNA, 945 bp, Pseudomonas aeruginosa
atgaaaacacatcgccaactcatcattctcggctccggtcccgctggctggaccgccgcggtctacgccgcccgcgccaacctgaagcccctggtgatcaccggcctgcagcagggcggccaactgatgaccaccaccgaggtggacaactggcccggcgatgcccacggccttatgggcccggacctgatggcgcgtatgcaggcccatgccgagcgcttcgacaccgaggtggtgtttgaccatatccataccgccgacctgtcgcagcggccgttccgactggtcggcgacagcgccgagtacacttgcgacgcgctggtcatcgccaccggcgccaccgccaagtacctgggcatcccgtccgaggagtcgttcaagggccgcggcgtgtccgcctgcgccacctgcgacggattcttctacaaggaccaggacgtggttgtggtcggcggcggtaacaccgccgtggaagaggcgctgtacctgtccaacatcgcccgcaaggtctacctggtgcatcgccgcgacaccctgcgcgcggagaagatcatgcaggacaagctgttcgccaaggtcgaggccggcaggatcgagaccgtctggcaccatcaggtggacgaggtgcttggcaatgacgccggcgtcaccggcgtgcgggtgaagtcggtgatcgacggcagcactcgggacatcgaggcccatggcttcttcgtcgccatcggccaccatcccaacaccagcctgttcgacggccagctggcgatgaacaacggctacctggagatccgcgccggcctgggcggcaacgccacccagacctcggtggaaggcgtgttcgccgccggcgacgtcgccgaccagcactaccgacaagccatcacctcggctggcttcggttgcatggcggcactcgatgcagagcgttttctgagcccggcatag

SEQ ID NO: 344473 - DNA, 1329 bp, Pseudomonas aeruginosa
atgagcctgcgtcttcgggcggtgttgatcgcgagcctctcgctgatcctgctgtgggtggtcgccgccgccctgatgatgcgcggtgttcattccaatctcgaccggaccctcgatggacgcctggccatgtccgcgcgcatggtttcggggctgctcgaacgtgcggcgctggccccgaacgccgccccatccggcttcaccgaggcggtgcgcgtcagcggcaaggaaggcattgcatgcgaaatccggtcgctgcaaggtgaggttctggcaagaacgaccactgggccgcattcggagttcgagtccctaccggccggcttcagcactcgggaagtattggggcaccagtggcgggtgtatgtcctgcgtgccaatggctaccagatcactacggcagatcgcgtcgatcagcgggacaccttgatcaacgatctgctgtacgccgctggcgtgccatttctgattgcctttctgggggggctggttgcactttggatcggtatcgggcgggggctggcgcccttgaaagccctgtcgcagcaactacgcgacaagcacgcggacgacacgtcaccgatcgcggtggatcattcgccgtcggaactgcgaccggtgctggacgccatgaacggccttctgcggcgcttggcgcgggcgctctcgaaccaacgggcattcacggatgctgcagcacacgagctgcgcaccccgttgacggtgatcgacacccatcttcaagtggcgcgggtcagcgagggagaagacgtcgggtcttcgctggacagtgcggaccaaggcgtgaagcgcctgcggcgcacgttggaccagatgatggtgctggcacgcgccgaagcaccgatccatgacggtgacgagtgcgcttcggtcatggatgtagtccacggcatcatcgagcgtagcggcgacgatgctggcgggcggctgacgctgctgaccgagggtagtgacgcgggcagccccattccacgatccatgctggagatcgcgatccgcaacctggtggacaacgcattgcgttactcgccaccggacagcgccgtcgagttgcgggtacgcttcgatgcctcggcgcgggcctgcctgctggaagtggcggaccgtggtccaggcctgagcgcggagcagaccacgcaaatcggacaacgcttttggcgcggcgaccaggggcgtcagcgcagcgacggtgctggcttgggtatttcgatcgtccgcgccatcgtcgaacgcttcggcgggcggctggagatgatgcccagagacaacggcggcctggtcgccgagcttctcgttccgttgcgctga

SEQ ID NO: 344474 - DNA, 669 bp, Pseudomonas aeruginosa
atgcgggtgttactggtcgaggatgatgagctgatcggcaaggggatcgtggcaggcctgcgcaagcacggcattgaggttcatcacgcctgtaccgcgcacgaagcggaggccatgcagaaggaaaacaccttccacgccctggtgctcgatctcggccttcccgaccgcgatggcatggacctgctggccagcatgcgggcgtttgaacctcatcttcccgtgttaattctcaccgcgcgcgacgcgatcgagcaccggctgaagggcctgcacggcggggcggacgactacgtggtcaagccattcgatctgcgcgaactcgcggccagactgcatgcgctggtcaggcgaactcagggccgcgccgcccaggtcatcgtcgccggccccttgcgcctggagccggagagcgggctggcttggcttcatggcgagtccgtcacgttgtcgcgccgggaggtcgatcttctcgcacacctcgccagtgcggatggccgctgggtgtcgccggacttcctcaatgaacgcatctacgggctctgcgaggaagtcagcagcaacgccatcaacgtgcatatccacaacatccggcgcaagctgggagccgaagcgatcgagacctcgcgcgggctgggctaccgcctgggatggaggccttcatcatga

SEQ ID NO: 344475 - DNA, 1344 bp, Pseudomonas aeruginosa
atgccgaccgccaaaccggacgatgccggtgccgcgttggatatggccgaggatcaggctgcggcgcagaagctcgcgacgctcgggccggtggccggaaccctgttgttcttcggtttcggcttgctgctggcgttcaccccctgcacactgccgatgatccccatcgtctcgacgctggtcgtcggcagccaggccaatccgcggcgcgcgctgctcctgtcctcggcctatgtcttggcgatggcgggaacctatgcggccgtgggcgtggcggccggactcgccggcgccaacctccaggccacgttgcaatccccgtggctgttgggcgccttcgccgcgctgttcctcatcctggcaagctcgctgttcggcctgttcgagttgcgcctgccggcggccctggtcaatcgcgtcgaatcggctggaagagggaagaccggcgggcgcatcgccggggccgcggcactgggctttctgtcggcgttgctcgtggggccgtgcatgaccgcgcccctggcgggtgcgctgctgtatatcggacagaccggcagcgccttgtatggcgggcttgcactgttcgcgctgggcatgggaatgggcctgccgctgctggccatcgccgtgttcggtgcccgggtcctcccgcggcccggcgcgtggatggagcgggtgcggatcatcttcggctacgtcatggttggcatggcggtcatgatgctggcccggttcctgcccggcacggcgagcctggtgctgtggggtgcgtggatcttgtccatcgcggtcggcctggttgcctggggccaggccgtcgcggcccggcatcggctggcctggacgctgcgttccgtggccgtgttcgccgggctgtggtccgtattgatgctcgtcggtgccgcgtcaggcggagagtctgccttgcagcctctggcgcatctgcgcggagccgccgccgcgcccgccgctgccgagatgacctacgttcaggcgaaatccgccgcggacgtggatgcccgcatcgccgaggccggcgcgcgcggccaatggacgttgatcgacttctatgccgactggtgcgtgagttgccacgtgatcgagcgcaatgtcttcggcaatccggccgtggccgcccgtctggcacaggtgcagatcgtgcgcccggatgtgacccgcaacgacgcggaagatcaggcgctgctcaggcattggcaggtgcaagggccgcccacgctgattctggtcgggcctgatggccaggaacgtcgggcacagcgcgtcgtcggcgaaatccacgcaggtggcttcctggaacggctcgacgccgcgggggcgccatga

SEQ ID NO: 344476 - DNA, 840 bp, Pseudomonas aeruginosa
atgatcgggattggcccgttttccatcgacgtggtgatcgtcgccgtctccgccttgctggcctggaccgtggcacgcatgctggcgcgccggttgcccgactcgccctacaaagccgcaggcagcctgcttctcgatgcgctgctcgtaggtttgatcgctgccaggctcggctacatcgcgcgctggtggaaggactatgcccaggctccctggtcaatgatctcgatcggtgatgggggattcctatggtgggccggcctactggcggcattgctgttcgccggttggcgcacgcgctcgatccgggcgctgcggatgccagtcttcgcaggtgtctttgccgggatcgtggcgtggggggctgcgggcggcgtggtcgagctgctgcggcgttccgcacctcccttgccagatgtgcaactggccatgctcgacggacaaccgattgccctgaattcgtatgccggtcggcctgtcgtcgtcaatttgtgggcgacctggtgccccccgtgccgaagggaaatgccggtactacagcaagcgcagtcagtttttccggggatcgccttcgtcatggtcaaccaaggcgagcaggcctcggtcatccagagttttctcgaacaagaaggactggtgttcaaccacgtgctgcgtgacccggcatccgacacgatgcgggtgatgggcgcgcgcgggctgcccaccacgctctttttcgatagcgatgggcgcttggtggatacgcatatgggcgagctgaccatggccagcctcaagaacaccatcacgcgccgctacgcgcaagagtccagccccaacagcacaaaccaggagtaa

SEQ ID NO: 344477 - DNA, 804 bp, Pseudomonas aeruginosa
atgttccaacaccacacacgctatcgaatccctctcgggctctgcttcatgctgatggtgggttgcagccaggcggagaacgccaatacgccacccgctaatactccgcccgccaatctgccccccgccgtcaaggcgctggaggatcagggcctgaccgtgatgacggagttcgacgcgggtaaagaagtgcgcgcctttgccgcagtcgcgggcgaccagccgatcgcggcctacctcaccaaggacggccatgtcatcgtcggcacgcggctggacgccaagggcgatcggatcgacgatgccaagctacaggagctggtcgccaagcccatgggagaccgcgcgtgggcgcagttggagtcatccacctgggtgctcgatggcaaggccgacgcccctcgcgtgatctacacgttcagcgacgccaactgcccgtactgccatcgtttctgggaagccgcccggccctgggtggatgccggcaaggttcagttgcgccacgtgctggtcggcatcatcagccaggacagtccgaacaaggcggccgccatccttggtgcgcctgaccgctccgcggcgctgctggagaacgagaacaagttcgaccggggcggcatcacgccggccaagaccgtcccggccgacgtgcgcaagattctggaagaccaccagatgctcatgctgacgctggggttccgcggaacgccggggatcgtcgtccgcgatgagagcggtgcactcaagaagtacaacggcatgccccgcccagaggccatggccgaggtgctcggtcctcgctga

SEQ ID NO: 344478 - DNA, 801 bp, Pseudomonas aeruginosa
atgctgatcggggcgctgctgggggtgctcatcggcgcgctattgggcctgaccggcgccggcggcggcatcctggccgtgccggccctggtcttcggattgggcatggccatgcggcaggccgctcccgtggcgctgatcgcggtgggggctgccgcagcagtcggggcgctgcaaggccttcgccaaggcattgttcgctacaaggctgcggccgtcctcgcggcatcgggggtcgtcgcatctcccttgggaatacgcctggcccaccatttgccggacacctggcttgccgcaatattcgccgccgtcatggtgatcgtggcccaccgcatgttccgctcgtcgcaaggccacgcctcggagcccggggcaaccgcgcctcctggcaaggcgtgccaggtttccgccgagacaggccgcttcgtctggacctcgcggatgtttctgacactcgtcgcgatcggcgctgtgtctggcgtgtccacaggcatgctgggagtgggcggcggcttcatcatcgtgcccgcactgacctacttcagcgagctgcgcgtgcatagcatcgtggcgacgtcgttgatggtgatcgcgctgatatctgcggcaaccgtctcgatggcctgggcacaagggttcaccatgacccaaggtgcctgggcgttctcgctcgcggcggttggcggcatggggatcgggcgactggtcgcgccgcgcatcccagcaagggagctgcagcgcggattcgccctgacatgcgtgctggtcgcggccttgatggtcgtccgcaatttttcgtag

SEQ ID NO: 344479 - DNA, 1371 bp, Pseudomonas aeruginosa
atgcagacattgaaagtggatatcgcgatcatcggcgcgggcaccgcggggatcacggcatttcatgcagcgagggccgcgggcaagaacgtagtcctcatcgatcgcgggccgttggggacaacctgcgcccgcgtgggctgcatgccgtccaaggcagctctgcatgcgggcatgcggtggtcgaccgcgaaaggcctgcccgaaggcagcgcactgttgcaaccacatggcccgcaagcattgtggctccacgctaggcaaacgcgggacgcgctggccagcggtgctgcgcaacggacgcgcaacgcggcaggagaccagctgatcatggccgaggcgcgcttcattgctcccggtgtcttgcaggccggcccctatgttgtcgaggccgacgccgtgatcgtggcaaccggctcccgccccatcatcccgcgcttcctggagggcgtgtccgaccgcatcctgaccaccgattccctgttcgagcaggacgtgctgcccaagcgcatgggtattctgggcctgggcgcgatcggtctagaactgggcctcgcgctgtcgcgcctggatgttcaggtgatcgcggccgaccagcgcgagaccattggcggaatcctcgatccagaggtgcaagctgccgcccgccagaggttcagccaggagcttccgatgtggctgggcgggtcggtcgagatcgacgacgcaggcgagcagatacgcatgcgccagggcgatcacagcgcctgcgtcgatcgccttctggtcgtgaccgggcgcactcccaacactgaagcactgcacctcggtgctgcggggattgctctggatgaacatggacgtccacacgtcgacccgcagaccatgcgcgcagcggacgtgcctgtgtacttcgccggcgatgtccaacccgaccgaccgctgatgcacgaggcggcggacgaggggcaaatggccgcgcacgccgcactggccggcctgcacggtcaagcctggtcggtacccgcgcgccgggtgccgatcgcgatcctgttcaccgacccggacgtgtgttcggtcggcctttcgcatgaggctgcacagcagcgcggcgccatcatcggcgtggcgcaaggcgggggcaacgggcgctccaaaatactggacgcccaagacaacctactgcgcatctacgtcgccccggacagcggcgccgtgctcggggccagcatgctgctcacgcagggcgaacacctggcgcacttgctggcttgggcaatccaggcgaagcagagtgtcaatgatctactggcaatgccgttctaccacccctccatcgaggagatgctgcaaagcgcattgaagtcggcattgcagcagctaaacccgtaa

SEQ ID NO: 344480 - DNA, 891 bp, Pseudomonas aeruginosa
atggaactgcgccatcttcgctactttgtcgtcttggctgaggaactgcatttcacacatgcagccgagcgtctgcacatcgagcagccaccactgtcccgagccatcaaagagcttgaggatgaattaggtgcaacgctcttcgacagggatcggagaggaacacgcctgactccagccggatcggcgttcttgcaagacgtgcggagagtattctcggctttggaacagagccgggagaacgtcagggcgattgctgcgggcttacaaggcagcctacgcatcgccatatctgatggcactgttgacccgcgcctgtccgcctacctcgcccactgtcgcgaagaagaacctgagatagaaatccggctgagcgaagttcctctgtcggagcagttgcgtgggctgcgatcggttgacttcacgatcggctttgcccataccgcagaggttggcgatgaaatcatcgcggagccaatatggcatgacccgctgatcttggcagtacccgcgcgacatccacttcttgctcataaggaggtgccacttacaaagcttgcttcctatccgctcgtgctgtgcgatccgcaagtatgcgaaggctacagccgcgagctgacacggctgctgcggctactggagcaagaaccgaacgtcgtcgagcacgcatcctcattggacatgatgctcactttggtaggcgctggatatgggcttggtttcaccacggcggcgaggctcgcggtcagccaccgtgcagatgtcgttgcccgtcctttagcggcggattcggccgtgatcaccacctatctgcttcggccacacagcgacacttcatgcccagcattggagcgcttcattactcgactgcgctcccaggcggacggatag

SEQ ID NO: 344481 - DNA, 225 bp, Pseudomonas aeruginosa
ttggcattcggcaaggccgtgcgcgcgtttcgtatggatcagggtgttgctcaggaggagctggcggcactggccggtattgagcgttcgcacatgggcaagatcgagcgcggggagcacttgccttcgctgtccgtgatcctgaaagttgccgcggcactcaagatgagtggcaccgagctgatggctgcaacggaacgcaatcttcatgccgacgcaggctaa

SEQ ID NO: 344482 - DNA, 456 bp, Pseudomonas aeruginosa
atgtcgcttgagggggccagcgacccagccctcaagacgcaacctttgtgggccgagagcatggccgtcgccgtgccgccgcggttccatttactcgacagggcaaagctcaccatcgccgatctccagggctacccgatctatcgctggcaggccgaggcttgccctctgctagatgagaggctgatctccctaatgccgttggaccaggagaacatccagcgggtgacttcattcgagatgctggcgctatgggttgcggctggctacggcgtcggggtatccgcgcgagcgcgcattgaccatggtcagggatgggggatcaccatgcggccgctctctgacggtccctatgagatggtcacgtacctgcaccggccccacgcgcaagccgactccgtttcggagcgcttcgagcagagagcgctgcaaatcaccggggctggtgccacgtaa

SEQ ID NO: 344483 - DNA, 1944 bp, Pseudomonas aeruginosa
atggcactctctgatctgaccgtccggcaggcaaggaccaccggcaagcgctacaccatctccgacaacgactgcttgggcctgatggtctctgccgcaggcggcaagtcgtggatcttccgctactactggctgggcaagcagaagcgcttgtccctcggcggctatcccgccctcagcctgcgcgaggcccgcgccgagagagacaaggcccaagccctgctcgccagggggatcgatccccaaatcgaacgcgatcagcgtcggcacgcggccaggctggcaggcgaatataccttcaagaacgtcttcgatgcctgggtcgagcatcgccgcaaggaactcaaggagggccgccagagcacgctctcgcagatcctgcgcatcttcaacaaggacgtgctgcccaccctggggaagatgtcggtctacgacattcgccgcccccagctcctgggcgttctggcggcgatcgagaaacgcaaggcgttcaccaccgccgagaaggtccgcacttggttcaaccagttgttccgctatgccctggtgatcgccgaggggctggaagtcaacccggccgcggacctggatgtggtggccgaacccaagcccccggtggcccataacccctacctccacctgcccgagatgcccgagtttcttcagaagctgcggtgctacaaccctcggggctggcagactcagcttggcgtccggctgctgttcctgacgggggtgcgcacgggcgagttgcggttggccgaaccagaacagtttgacctcgaccgcggcttgtggatcatcccgccgcaggtggtcaagcagctccaggacgaaatgcgcaaggctggcaagcggccgcaggacgtgccgccctacatcgtgcctctgtccctgcaggccatcgagatcgtgcgctatctcctgggcgtgatgcggccggcgcagaagtacctgctgtcgcaccgcagcgaactcaagaagcgcatcagcgagaacaccctcaacaaggccgtgcagctcatggggtatgaggggcgcctgaccggccacggcatccgcggcaccatctcgacggcgctcaacgagatcggctacccgaagatttgggtggacgcgcagctttcgcactccgatccgaacaaggtcagctcggcctacaaccacgccaagtacgtggaaccgcgtcgccggatgatgcaagactgggctgaccgcctggacctgcttgaacagggccaagtggaagccgcgagcgcgcacctgaccatccgcatcgatggggtgccggcgatggcggaagcggacgaagcggtgggtgcggcctccacggtgtccgagcccgttgtccctagcgtcccgccagtggtcgcaacgcccatcgtcgtgacctcgaacagcggcggaatcacgttccagcggctgtcgcaggtgccgccgcctcccacgcatgccccggaaccggaagtgtccgccatccagcgcgagcgcgaagaaatgctggccatgtacgaatcgccgaacaatctgcctgtcccgctgttcggcaagctggccggcaagtccaaagaccagatcaaccgggaactgaaggcgggtaagctgctgtccatcagcctgggcaaccgagggcagcgtgttcccgactggcaactggtgccgctcaagcacaggctggcccagacgctcatgaaccagtgcccgcatgcggactcgtgggacctgtaccgcatgctgacccagccgcacccggacctgggggatcgcgcggccattgatgtggtcacgccgaccaacgtgcccgcgatcatccgggtcatcatgggcgactacaagcgccgtgaggatgcgcccgaggcctttgccctgcagcctatccccgaagatgtgcggcagagcgtccgtaggctggtggacaacgcggtggtgcttgagggggcctga

SEQ ID NO: 344484 - DNA, 948 bp, Pseudomonas aeruginosa
atggacctgctgcagggcatacgaaccttcgtccgcgtggtggagcacggcagcttcacccaggccgcccgcctgctgggcacctcgccggcaaccgtttcgcggcaggtcgccgggctcgaacaggcactctcggcacgcctgctgcagcgcaacacgcgcagcgtggtggtgaccgaaaccgggctgcgctactacgaacactgcaagcagatcctgcgcacggtcgccgccgcggcggcggacgtcgaagacagccagtcgcaccccagcggtcgcctgcgcgtccacgcggctaccgaactcggcctcggacacctgatgccgctgctggccgactacctggaccggtacccggaggtctgcgtcgacctgtcgctgacccaggacagcccggcactgctcgacgaagggctggacatgctggtcgtcctcggccgcgcgctgcccgactcgtcgctggtcgcccgcgagctcggccacgtgttcagcgtggcctgtgccgccccggcctacctggaacggcacggcgccccgcggtccccgtgggagctgcggcaccatcgctgcctgcagatcgccggggcgtccggtgcgcaggcctggtccttcgtccgcgacggggccgaggcgcgcgtcgaggtccgcgacgtgctcaaggtcaatctccccgaagccgcctgcctcgccgccagcgccggactcggcgtctgcctgctgcccggtttcgtcgccgcccgggcgttgcaggacggtcgcctgctgcgcgtgctgcccgactaccggctgctgccgcgcgaggtcttcgccctgtatccgtcgcggcgctacctcgacgcgaagatccgcacctggatcgacttcctcagggaacgcctgcccctggcgctcgaacgagaccgggcgatcctcgacgaccgccgtcactgggcgccgggctggacctag

SEQ ID NO: 344485 - DNA, 1131 bp, Pseudomonas aeruginosa
atggcgagctgggacattttctgtagcgtggtcgacaactatggcgacatcggcgtcacctggcgcctggctcgccagttggccggggagcatggccaggcggtgcgcctgtgggtcgacgaaccgcgcgccttcgttcgtatctgcccgcaggcggacccggcgatacaggtccagcgccatgccggcgtggaagtgcgcgcctgggacaagacatggaccccggtggaggccgccgacgtggtgatcgaggccttcgcctgcgaattgccggaagcgcaccggcaggcgatgcgcgagcgcgggcgtccttctctctggctgaatctggagtacctcagcgcggaagagtggatcggcggttgccacgcgctgccttcgctgcagccatgcgggctgtccaagtactttttctttccggggtttcgcgagcccagcggcgggctgttgcgcgaggccggcctgctggagcgccggcgcagcttccaggcctcggcgcgcgcgcaggaggcgttcctcgccgctctcggggtgcggcgcaaggtcggtgagcggctgctctcgctgttcgcctacgagaacccggcgctacggtcctggctcgactcgttgcgccgcgctcgccaacccagcctgctgctggtgccggagggacgggtgctggccgatgtcgccggctggctgcaactgcccgggctggccgtcggcgaggtccacgtgcgcgacgccctgcgcgtccaggtattgccattcatggcccaggacgactacgaccgcctgctctggtgttgcgacctgaacgcggtgcggggcgaggattccttcgtccgcgcgcaatgggcgggccgcccgatggtctggcacatctatcagcaggaagaggaggcgcacctggcgaagctcgaggcgtttctcgatctctattgcgccgcccagccaccggcgctggcgcaaagcctgcgcgccttctggctggcctggaacgtcggtggcgaacttggcggactctgggaaagcctggaagagcgtctgcccgactggcggcgggaagcgcagcgctgggcggacgaacaggacgcgcgtccggatcttgcggcaaggctggtgcatttttacgcagattggctatga

SEQ ID NO: 344486 - DNA, 1428 bp, Pseudomonas aeruginosa
atgacgcgtctgttgctgctttcgctttgcctgctggtgctcgcgccgttgccggcggccgcgcgcatcaccggccagccggacacctggcagcgggaacagccggagacccgcgacctggcgagcatccgtcgcagcggcgtgctcaaggtgctggtgaaccagagccgcaacagctcgggcgaggtgaagggcgagccgatcggcgtcgaataccgccgcctgcgcgccttcgagcagtacctcaacagccgctcgccctccgcgcgggcgctgaccttcaagctcatccccaagcccaaggaccaactgctcgccgccttgcagcgcggcgaaggcgacctggtggcgcccggcgaactgctgccggcccatgacggcctgcgcgtcagcccgagcgcgccggtgcgcgccgacgtgccgctggtgctggtggcgcgcaagggcaaccggcgctacacgcgcctggagcaactctccgggcggaccatcccgctgccggccggcagcgccgccgaagaggccatcgaacaggtcaaccagcgcctggcgcaacggcgcatggcgccgatccgcatcgaacggctggacccctcgctggcggtcgaggacgtgatggaaatggtccaggccggcatcctcggtttcagcgtggtcgagcaaccgatcgccgagcgctgggccaaggtcctgccgaagctgcgggtggatcgccacctggtgctggacaatcgcgccgacatggcctggtacgtgcgccgcgatgccagcaccctgcgcgccaccatcgaccgcttcctcgccgattaccgggcgccggcggatcaggacgtggccttccagcgggtctaccggcgtgcctacaaggtgcgcaatccccttggtgcggccgatcgcaagcgcctggaagcggtgcgtcccttgctgcagcgctacgcgcagcgcagcaacctcgactggttggcgctggcggccgtggcctacaaggaatcgcatctcaacccggcggcgcgcggtgccggcggcgccagcgggctgatgcagatcaccccggcggcggcgcgcagcgtcggggtcggcaatgtgcacgacaaggacagcaacgtgctggccgccagtcgctacctgaccaagatccgcaagcagttcttctccagcaagcacctcgacgaacgcgaacgcctggccttcaccctggcggcctacaacatgggaccggagcgggtgcagaacctgcgcacccaggcccgtcgccgggggctcgatccgaaccgctggttcttccaggtcgagcgggtggccgcggaagagatagggatgggcgtggtgagctatgtcagtagcgtgaacaagtactaccttgcatatgagcgcgagcgggaacgtctcgaggctggcaggcgcggaacgacgacggcacagaaataa

SEQ ID NO: 344487 - DNA, 489 bp, Pseudomonas aeruginosa
atgccgtcattgcgtcaattaatcgtcttcctctgctgccttggcgccgccctcgcccaggcgacgcagcccgtgccgctgggcggacggccgatcgtcaccctgctgcaacccggcaagccgcccctgcgactgaccctcgccgacctcgaagccctgcccggcgagattctggaagcccagctgcccggcgaagccaatgccaagtggcagggggtgcgcctcagcctgctgctggaacacctgcgcctggccccgccgaagcgcctgcgggtgctggcgctgaacgactattcgtcgatcattccgtacagcgacctcgagacctaccagccgatcctcgcctatcgccgcaacggtgcctacatgacgattcgcgagcgtgggccgctattcatcatctaccccatggcccgctatcctgagttgagaaaccaggtctactacaaccgaaccgtctggcaggtcagttccatcacccttgagtaa

SEQ ID NO: 344488 - DNA, 954 bp, Pseudomonas aeruginosa
atgcgcctgcgcaaccgggcacgctggcagcgctggctggaccggcggatcccgccggcgagcagcgtcgagctgaaccagcggcgcatcttcatcctgccgacccgtcagggcggcgccttcggcctggcgctgctggtgatgctgctggcggcgatcaactaccagaacagcctggcctatggactgacgttcctgctcctgtcgcttggcgtggtgaccatcctccatacctatcgcaatctcgccggcctgcgcctcaccgcgctgggcgcggaggcggtattcgtcggcgagcgtgccggtttccgggtgcgcctggaaagcccgcggcgggcgcgccaggctatcgccgtcggctggccggagcggcccctggagtacagcgacctggggcgcgacgcggccggcgaagtcctgctgttccatcccgccgagcgccgcggctggctgcggccggcgcgcttgcgggtggaaagccgctttcccctcggcctgctggtggcctggagctgggtcgacctgcggcaacaggccctggtctatccgcggccgctgcccggcgagcgcttccaggcgcccggcgagcgcgatgccgagcagcaggggcgcgccctggcgaacgccggcgtcgatgattaccagggcctgcgcgcctaccagccgggggattcgcggcgacgcctgcactggaaggcgttttcccgtggccaggggctgctggtgaaagacttcgccgcgctcggtggcgacgacctgtggctggagttcgagcgcctcggcggcgacgtcgagagccgcctgggacgcctgtgccaggcggtcctggagttgtccgcgcggcagcaaccctacggcctgtcgttgcccgggatgcgcctgccgccggccaccggcgaggcgcagcgcgaggcctgcctgcgcgccctggcgctgttcgggacgccgcggtga

SEQ ID NO: 344489 - DNA, 573 bp, Pseudomonas aeruginosa
atgccccacgccccgctcgcctccgctacgtcggacaccagcccgttatcggaagtcgccgttttctggcgcgaggccggccccagcttctggttcgccaaggacccccgcttcgaccggcgcttccgcctgcgcttcgcccaggcccatgaactggcccgcgccgagcgcctgcggccgggccacgcagacgcccaggcacatctcggcctgctggtgctgctcgaccagtatccgcgcaacgccttccgcagcaccccgcgcatgtacgccagcgacgccctggcccggcgctgggcgaaccgggcgctggcagccggcctggaccggcaggtcgaggaagcgttgcggctgttcttctacctgccgttcgcccacgccgagaacctcgtcgaccaggatcgctcggtggcgctgaatcgcggcctcggccagccgtacctggaccacgcccgtgggcaccgcgagatcatccgccgcttcggccgcttcccgcaccgcaacccgatcctcggccgcccgtccagcgccgcggaactggccttcctcgccgctggcggcttcgccggctga

SEQ ID NO: 344490 - DNA, 906 bp, Pseudomonas aeruginosa
atgcacctttctcccgaatcactcgaggcattcgtccaggccgtctccctcggctccttcagcgcggcggcgcgcaagcttggcaagagccagtcgacggtcagcgaggcgatcgcccggctggagatcgatctcggtctggaactgttcgagcgcagcggtcgccagccgcgtctgaccgaggccgggcgcacgctgctgggacgggtcgaggaggtcctcggcgcctccgaccgcctgcgccgggttgccgcgctgctcgccggcggctcggagccacgggtgaccctggcgctgtccgatacctatcattcggcgcgctacgaggcgcgcctggccgagctggacgcgcgctacccggaactggagttcgaatgcctgatcgccgaggaccaggacgtgatcgcccaggtcagccgtggccgcgccacccttggcctgctcgcggcgcagccgcactacccgccggaactgggcgtggcggcggtggccgagcgcgccgagttcggcctgttcgccgccgtcgaccatcccctggcgacgctctcccgggtgaccgagcgcgatctttccgaatggcgcctgctgcgcctgaacacctacagcgagaccggcgcggcgatcaacgacggcctgccgtccagcggcgggcgctgctggtcggcgcccaactatctgctgctgctggagatggccacccacggcttcggctgggcggagctgccgcgctggctggtcagcggctatgccaacggacggctgcaggagttgccggtggccggctggccgcgcagccaggcggtggacgtggtctggtcgcggcagcggccgttgggtccggcggccaactggctgctggatcgcctgctggatcgcggcctgccggcggacgggggcggccgctga

SEQ ID NO: 344491 - DNA, 369 bp, Pseudomonas aeruginosa
atgagccgcccgttccgccttacccgtttcatcctgccgttgctgctgagcctgtgccagccgtcgttcgccgccgaactccgcgcggttcccgaagcccgccgccaggagctgctgctggccgcctctacggcgtcctgcggcgaggcggactgcccgacgccggaacgcgtcagcctgctggcgctgcaggtggagacccggatcttcgtcacccgcctggctctcgaggatttttccccggtctcgcgccagcccgccgagcttccggacttccgcctgttcggcgacctcggcctcgcggcaagtcccttcgcctggcaagcgtcgaccggcgagcgcgcggcgacggacgccttgcgcttctga

SEQ ID NO: 344492 - DNA, 639 bp, Pseudomonas aeruginosa
atgagttcgaacgaaacacggcccggcgtggtgatcgccgactccctcccggtcatgcagtgggccctgcagcgttacctggacgaagcgtgcggacgccaggtgctggcggtggtcggcgacagcgacagcctgctggcgcggttggccgagctgccgccggactgcatcctgatcaccgagctgggcctgcccgggcagcgcagccgcgatggcatccacctggtggaatggctgacccggcgttgcccgcaactgaaggtgatggtctattcgatattcagcgcgccgctgctggccaaggcggtgctgcgcagcggcgcctcggcctacatcagcaagcgcagccccctggacaccctgcagagcgcgctggaatgcatggcgctcggacagaccttcctcgaccccggcctacagccgcaacgacacgccggcaagccgctgagccccaccgagatcgatatcctccgtcgcctggcgcggggcgacacggtcagcgagatcgcgcagcggaccatgcgcagcgtgtccaccatcagcacccacaagaagaacgcgatggtcaagatcggcctcaacagcgatgccgagctgatcgccctgggcgtgctgaactggcttcacgaactctgctga

SEQ ID NO: 344493 - DNA, 1248 bp, Pseudomonas aeruginosa
gtgtcatcggcagactcgacgccgccctggctgaccctggtgggcatcggcgaggacggttatcccggcctcggcaagcaggcccggcgtgccctgctgcaggccagccggatcgtcggcgcggcgcgccagctggaactgctgccgccgtgcatcggcgccgcccgcgaaacctggccgacgccgttctccctggaaccattgctggcccggcgcggccagccgacctgcgtgctggccagcggcgacccgatgctgttcggcgtcggcgccagtctcgcccggcaactgccggcgaccgaactgcgggtcctgccggcgccctcctccctctcgctggccgccgcccgcctcggctgggccctgcaggaggtcgcctgcctgtcgctggtggcgcgcccgctggcggcgctgcaggcacaggtccacgacggccggcgcctgctggtcctcagcaacgacggcgacagcccggccgccatcgcccgcctgttgaacgcccgtggcttcggcgccagtcgcctgagcgtgctggaacacctcggcgggccgctcgagcgccgtctcgacggcctcgccggcgactggtcgctgccgcgcgccgccgatctcaacctggtggcggtggaatgccgcgccggcgccggcgccgtgcgcctgccgctgaccccgggcctggccgacgaagcctatcgccacgacggccagttgaccaagcgcgacgtccgcgccgtgaccctggcgcgcctggcgccctgccccggcgagctgctctgggacgtcggcgccggctgcggctccatcggcatcgagtggatgcgcgcacatcccggctgccgggcgatcgccgtcgaggccaacgaagaacgccaggatcacatccgccacaaccgcgacgccctcggcgtgccgaccctgcacctggtcgccggcagcgccccggaagcgctgctggagctgccggcccccgacgccatcttcatcggcggcggcgtcaccgccgagggcgtcctggaaacctgctgggagcgcctgcgccccggcggccggctgctggccaacgcggtcaccctgcagagcgaacgggtgctgctcgactggcagcagcgcctgggcggcgaactgacccgcatcggcgtcgcccacgcgcgtcccctgggcggtttcgacacctggcgccaggcgctgccgatcaccctgctggaactgcgcaagccgctgccccgggacgcccgccgcgatgcgtga

SEQ ID NO: 344494 - DNA, 267 bp, Pseudomonas aeruginosa
atgcacgtgaccctggtgatcgccggcggcatcgtcctgctcggcctgttcctgctgttcggcaagctctggggtggcgatccggccagcctgggcctggccgcgacgctgttcgtccccgtctggctgggcgtggccctggtcaacctgtggatcggtgtgcgccacgcaggctacggcctgcaggaagagttgccgatcctgctgctggtcttcgcgctgccggctgcgctggccggcatgctgctctggctgctgccgcgctga

SEQ ID NO: 344495 - DNA, 1332 bp, Pseudomonas aeruginosa
atgccccgttcgatcgtcatcgtccacggctggagcgacgattcgaagtcgttccgccgcctcgccgagcaactcgaggcctggttcggcagcgcgccgacgcagatccgcctggccgactgggtttccctgcaggatgacgtcacctacgccgatctcgccaccgccctcgaccgcgcctggaccgccagtggcctgtcgcgggcgccgcgcagcgtggacgtggtagtgcacagcgccggcgcgctggtcctgcgcgactggctgacccgccgcttcaccccggccagcgcgccggtcaagcgcttgctgatgctcgccccggccaacttcggctcgccgctggcgcacaaggggcgctccttcatcggccgcgtgctgaaaggctggaaccgcttcgtcggccagaccggcacccaggtgctcaagggcctggaactcggctcgccgtactcctggactctcgccgagcgcgacctgttcgccgccgagagctggtacggcgccggccgcctgctcgccacggtgctggtgggcaacgtcggctacaacggcgtggaggccatcgccaacgaagccggtggcgacggcacggtgcgcatctccaccgccaacctcaacgcccgccgcctgaccctggagctggacgtgcgccagcgcgccaggcccggttggagcctggaacgctcgcgtggcgagatcgccttcgcgatcctcgacggcgagaatcattccaccctggcgctcaaggaccgcggaccgaagaatccgctcagcctggaactgatccgcgccgccctggaagtcgaggacgccgactacaagacgtccgccggaagcttcccctggcagcgccgcatcgaccagttcgatccgggcatcgccgagcgctcgccgcgctacctgaacctggtcagtcacgtctgcgacgacctcggccaggaagtgcacgactatttcatccagttcttccgcaagctgaacagcgaccggcgtttcgaacagcgcttctacgaacgggtgatcgccgatgtccacccctacgaggacaaccccgcgtaccgttcgatccatctgtcggtacaggccctcgacgaactgctcgccggtttcgccgtggacagcctgtcgctcagcgtctccgcccagccgctgttcgacccgccgcgccaaccggtcggctacagcgcggtgggtcccggcgacagcgagggcctgggcgttccgcgcgagcgcctcggggagttcttcgccgcccaccagaccctgctgctgcgcatccgcctgacccgcctggtagacggccgggtgttcctcctcaaggacgcctga

SEQ ID NO: 344496 - DNA, 1512 bp, Pseudomonas aeruginosa
atggacaagggagcgaagctgttcgccgtcttctgggtggtgctcggcctgggcctggtggtcggcctgccggtaggcatccatttcattctcggccagtacgacgatgcccgtttcagcgggccgcaactggcgttcgaagagcaggggcgcgcctacctggcattcactctcgacgagtaccgggccgaggaagtggacaatggcgtggtccacggcagcagccgggtctacgcccaggtggtcgacctcgcggacggccgcctgcgctggagcacgcgactggacgccgacaacgcgcgcggcgacgactggggcgcgggtgaactgctcgggcaatcgtcgcgctacctgttctacctgcgcaacgcgctctacgtgctcgaccggcgcagcggcgagccggtgctggcgttcgacgagctggagcggcgcactggaggcctgccgttgaagtcggcgccctgggggaaggacgcctatcgttacgaccaaggccggggcggattgctgatgctcgccctggacggccgcgtctggttcctcgacggtgacagcctggccctgcgcgaagccccggagatggatgcggcgcggtacttccatggcgacccgccggcgccagcgggctccgggatcgcctggcaggcgccgggcctggcgcgactgcccgacgggcgcctgctggtcttcgccagcgaccacgaggcccgcgccctggaacgcggcgaggcgctgccggcggcgaacgaacggctgcggcgccagcgtctgcagctcggcacgctggattggcgttcgcctgccggcaaccggctggcgcccttgctcgacacggctttcctgcgggccgggctgttgccggatccggactccgccgaagcggcggcgaagctgttcgacgaacccgccgagcgcgagcgccagcgcccgcacctgccgcccgagccgcagccgccggcggagttcgacgaacggctggagcgcttccccggcccccgcgcgttcctcgccgcacgcgacgcctatcgccaggagcggcgacgctggatcgccgcgcacgaggcctggcgcgaccgcgtcgccgccctcgaggcggcggcggacgccgagtatcggcgccgccgcgacgagcaggcacgcgagcaggcgctgtatcgccgctatgcccaggcgctgcccggcggcgcttccggactggcgcggcggccctggcaggtggaaggcaactggctggtggtgcaccggcgcagcctcgccgaacgcagcgagctgctgctcagttcggtatccgccgggggccacctgaactggaccctggagctgcccgtcgagtaccccgagcggttgttccggctggacggggagaacctgcttctcagcgggcgcgcagaagatggtggacgcgtgctgcgggtcgacctgcgccgcggcgctggcgtcgcccatcgcctcgcgcgcggcgccggcgcgccgttgcggcggatcgaatggccggaggcaaggccatga

SEQ ID NO: 344497 - DNA, 1530 bp, Pseudomonas aeruginosa
atgaaaaccacgtcccccggaactcctcccgttccacgtcctgaagacgagaacctcggtgtcggcgcgaacatggcctacggcctgcagcatgtgctgaccatgtacggcggtatcgtcgcggtcccgctgatcctcggccaggcggccgggctggcgcccggcgacatcggcctgctgatcgccgcctcgctgttcgccggtggcctggcgaccctcctgcagaccctcggggtgccgttcttcggctgccagctgccgctggtccagggggtctcgttcgccggcgtggcgaccatggtggcgatcatcggcagcggcggcagcggcggcatccccgcggtgctcggcgcggtgatggcggcctcgctgataggactgctgatcacgccggtcttctcgcgcatcaccaagttcttcccgccgctggtgaccggtatcgtcatcaccaccatcggcctgaccctgatgccggtcgccgcgcgctgggcgatgggcggcaacagccaggcgccggacttcggcagcatggccaacatcggcctggcggcgatcaccctggtcatcgtgctgctgctgagcaaactcggcagcgcctcgatctcgcgcctgtcgatcctcctggcgatggtcatcggcaccgtcatcgcggtgttcctcggcatggccgacttttccagggtcaccgaagggccgctggtggcgttccccacgccgttccatttcggcatgccgaccttccacgtcgccgcgatcatctcgatgtgcatcgtgatcatggtgaccctggtggaaacctcggcggacatcctcgcggtgggcgagatcatcgacaccaaggtcgactcccagcgcctgggcaacggcctgcgcgcggacatgttctccagcatgctggcgccgatcttcggttccttcacccagagcgcgttcgcccagaacgtcggcctggtcgcggtgaccggaatcaagagtcgctacgtggtcgccaccggcgggctgttcctggtcatcctcgggctgctgccggtgatgggccgggtgatcgccgcggtgcccaccgcggtgctcggcggcgccggcatagtgctgttcggcacggtcgccgccagcggcatccgcaccctgtcgaaggtggactatcgcaacaacatgaacctgatcatcgtcgccacctcgatcggcttcggcatgatcccgatcgccgcgccgagcttctacgaccatttccccagctggttcgccaccatcttccattccggcatcagctcctcggcgatcatggcgatcctgctcaacctggcgttcaaccacttcaccgccggcaattccgaccagcagtcggtgttcgtcgccgccagcgagcggaccctgcgctaccaggacatcgctgcgctgcacgagggcgactatttcctcgacggcaagctgtacgatgcccagggcaacgaggtaccgctggctggcgaggactgccatggcgcgccgccgcgacggcgcagcgaaaccgtggaagccggtagcgcctga

SEQ ID NO: 344498 - DNA, 645 bp, Pseudomonas aeruginosa
atgggtgcggatgccaggaccagacccggggcgctgcgcggcggtcgcaacggcgctctcagccagggcgcggagggcgccatccagtggctgccgaccctgctgcgcgggcgcccacggcaacgccgcgatctgttgcggcaaccgcggagccgaaggcccggcgaactctggctggtgatcgtcgacgcttccgccagcacccgtcggcacggcgccctggcccaggccaaggggctgctggcgagcctgttcgaagaggcctaccggcagcgcgcgcgcctcgccgtgctgcatgccactggcgctcgggcgcaatggctgtggcaggggcagaaggtctcgcgggagctccaggactggctgcagcagctcggcgccggcggcggtacgccgctgctcgacgccctgggccaggctgccgactggctggcgcgccggcaacgacagaagcctgccgagcggcaatgcttgctgctgcttaccgacggccgcctgcgcgactggccggccgtaccggcggccgcctgcccgagcctgctggtcgacctggaaagcggcccgctgcgcctcggcaagggcgagcgcctggcccgggaactgggcgcgcagtacttgcacatcagcgcgctgcagcccgcctga

SEQ ID NO: 344499 - DNA, 939 bp, Pseudomonas aeruginosa
atgtctgcatccctcgcattcgtcttccccggccagggttcgcaatccctcggcatgctggccgagctgggtgcccagcagtcgctggtgcgcgataccttcgccgaggcctccgaggcgctcggctacgacctgtgggcgctggtccagaacggccccgaggagcgcctgaaccagaccgacaagacccagccggcgatcctgagtgtctctatcgcgctctggcgcctttggctggccgaggggggcgcgcgtccggcgttcgtcgccgggcacagcctgggcgagtactccgcgctggtggctgccgagtgcattgccttcgccgacgcggtcaggctggtcgagcgccgcggtcaactgatgcagcaggcggttccggcggggcagggcggcatggccgcgatcctcggcctggaagacgccgacgtgctggcggcttgcgccgaggcggcgcagggcgaagtggtcagtgcggtcaatttcaatgcaccggggcaggtagtgatcgccggcgccgcggctgccgtggagcgcgccatcgaggcgtgcaaggcgcgtggcgccaagcgcgcggtggcgctgccggtcagcgtgccgtcgcattgcgaactgatgcgtccggcggcggagcagttcgccgcctcggtcgaggccctgcaatggcaggcgccgaagatcgccctggtgcagaacgtcagcgccgcggtgccggccgacctgcaggccctgcgtcgtgacctgctggcgcagctgtacagcccggtccgctgggtcgagagcgtccagttgctggcggaaaaaggcgtcaccgacctggtcgagtgcggccctggcaaggtcctggcgggcctcaacaagcgctgcgccaagggcgtgaatacccatggcctggacggtgtcgaggcgttcgccgccacccgcgccgcactggcctga

SEQ ID NO: 344500 - DNA, 579 bp, Pseudomonas aeruginosa
atgcccagcctgatcctcgcctccagctccccctaccggcgcgaactcctgacccgcctgcgtcttccgttcgaatgcgccagccccgacatcgacgaaagccatcgccccggggaaagcgccgaacaactggtgcgccgcctttccgccagcaaggcggaagcgctggccggacgctatccgcaacacctgatcatcggctccgaccaggtcgcggtgctcgacgacaatatcctcggcaagccgcacaccgtcgagcgcgccgtccagcaactgctggacgccagcggcaggagcgtgacctttctcaccggactggcgctgctcgacagtcgcaatcggcacatgcaggtcgactgcatcccgttcaccgtacacttccgccaactcgacgaggcgcgtatccgccgctacgtcgaagccgagcgcccgctggactgcgccggcagcttcaaggccgagggcctgggcgtcagcctgttccgcgccaccgaaggggaggactccagcagcctggtgggactgccccttatccgcctggtcgacatgctcctcgccgaaggcgtcgaaataccctga

SEQ ID NO: 344501 - DNA, 501 bp, Pseudomonas aeruginosa
atgcgcctgcctgcgaacctcggccgcctgctgctggccctgtgcctgggcgccctgttgagcgcctgcagcaccttcggccagcgcgatccgttgcgtatcgacctggtcggcctggaacccctgccggggcaaggcatggagatgcgcttcatggtcaagctgcgggtacagaaccccaacgatcagccgatcgaatacaacggcatcgccctcgacctcgacgtcaacggccagcccctggccagcggcgtcagcgaccaggccggcgaggtgccgcgcttcggcgagcgggtggtgagcgtgccactgaccgtctccgccttttccgctttccgccaggcctggggcctgagcaacaacgctccgacccggggcctgccctacgtggtgaagggcaagctcgccggaggcctgttcggcacagtgcgcttcagcgaaaagggcaccctcgacttccccgggccggccgtcggcgtgccgaagaccaaggggctctga

SEQ ID NO: 344502 - DNA, 228 bp, Pseudomonas aeruginosa
atgagcaccgtaatctcgttccgcgccgatgatgccctggtcgcggccctcgacgaactggcccgcgccacccaccgggaccgtccgtaccacttgcggcaggcgctcgcgcagtacctggaaaggcagcagtggcaggtcgctgccatcgatgaaggcctggccgatgccaatgccggtcgcctgctggaacacctcgagatcgagaagcgctgggggctgcaatga

SEQ ID NO: 344503 - DNA, 390 bp, Pseudomonas aeruginosa
atggcatacgcagaatggatcgcagtgaaggtcgttgtatccaactccatcggtacggcgggcatccgcaacgccaccctgcaatggggcatgttctgccgctgctcgaacagggacgacgaaatctcggccgagaaagacagcagcatgaacgtgcaggccggcagcccgcagtggatcgcttcctgcggacgggagaacgccgcgtccggtacccggggctgcttcgactgccacgacggcaacaccaggatgggtaccttcagctgggatgatccccggaaatccggcgccactcaaacccggcacttcacgccggcgtcgcagaactacgccggtatcagcagcggcggcaacgccaccggagcggcatcggcgaggtcaccctga

SEQ ID NO: 344504 - DNA, 924 bp, Pseudomonas aeruginosa
atggatgcgaatgaccgccgcttcagtgggttcagtctgagtaccggcgtacttcggtattcggatctggcctatctgctggctaccagcgatgaggatatccaagaggggttggttggcaccctcctgttcactatcgaccgtggtacgccgggagctgcgagcctggactggctggcctgctcgggtacggtctgccatcttccgagtgagcgttatgttgcgctgggcgtccagggccaggtgcgggtaatgggaggtggctcccagagcgatgagtcgatttcgaacagcggtagggatcctcgttcgagaggaccgttgagggaagtgagaggcgtcgccagggggcgcgcttatgccgtgggcacttgtcgtcaggcttatgttcgtgaagatgaaggggtatggcgttgcatcgatcagactgcccagggcggagatgtggcgctaaccgacaccagcttcgaatccatcgatggcttcagcgaacaggaaatctacacggttggctgggagggagaaatctggagttacgatggttctgttttcactcaggtaagcagccccaccaacctcgccttgtacaaggtgcgttgcgctggtgacggttacgcctatgcctgtggacaactgggcaccttgttgcgtggtcgcggcgacaagtgggaaatcatcgagcatgagtccactcgggaggacctatggggcatggaatacttcgacggccacctttacgtttcctcgacgcgcttcgtctatcggctggtggacggacgcttggagcgagtggactttggcgatgatgtcccagcctcctgctatcacctgagcgcggcagacggaatcatgtggtcggtcggagcgaaggatgtcatggagttcgacggacaatcctggaagcggattctcgagattcagtga

SEQ ID NO: 344505 - DNA, 1164 bp, Pseudomonas aeruginosa
atggccaacgaggtgtacgccaacgacatggagatctcctgcaaggcggcgagcggcaagtccatcgcggccttcccggacgtctgcttcaccccaccgcaggcgccgccgacgccgatgggggtgccgatcccctatcccaatacgggtttggcaaaggacacgaccaagggaacccggaccgttcggatcacccgcaaggaagtgatgctgaagaacaagagctacttcaagaccagctatggcgatgaagccgggcgggcgccgaaaaagggggtcattaccagcaagatcaagggcaaggtgtacttcacctcctggtcgatgaacgtgaagttcgagagcaagaacgttgtccggcacatggatctgacgactcacaatcacggttcccaaccgggaaataccatgacctggacctatgccgaccgcatggcctacgccaagggcctgagtcagtgcgacgatgagaggacgcgtgccaaggatgcttgtggagacaccagcaagaaggtggtctgcccggatatctccgccttgaaaaaggcatccgctgctcgtgccgccgccaagaaaaaagccggtgacaagttcaaggacaatgccgattaccagagtcggcatcaggaggtgcaacgcgaattttccgccttggccgaaaagatcaataacgacccctgccagaaggccttgcgctgtttcctggccccttacaggccgaaccgctgctgccctgggcagaccggcgaccacttggttgacgctgcctcgttcggcccgcgcaaagggaagaaaataaccggctggagcaagtaccagaccaacaaggcgccttgtatctgcgccgaggggccgaaccagacgacggcgacgcatggacaattgcatacgcggagaggcgtggttgcactgcatgagcaagatgacaagggggaatggccgagagggcgagctacccaggtaggggcaaaagcggcgcgaaagacttttccggactccaactgctcgcaggagtgcttggaggcgcaactgaacaagtatcacgacaccgcaaaggatgacggggcggaaaagcccatcaaggcgaatgcctcaatgacgagtgatgtcggtgagagggccgctgcccgtgtcgagatgttcgaacaagtaactctcagataa

SEQ ID NO: 344506 - DNA, 126 bp, Pseudomonas aeruginosa
atggtgccgctcgggcatcaaccgaaccgcgccgcgctgcaccggatcgggatcggcgcgatcgccgtgaaggaattcgacgagaccgacgtcgagctcgccgaagcgctcaaggctgcccactag

SEQ ID NO: 344507 - DNA, 1128 bp, Pseudomonas aeruginosa
gtgctggtagggcggcgggcggtccgcgtgctgtgctatgttccgcccatgccacgccgccttcgccatccgcctgctgaccttcgactgccccgctgggttccctgcctggcgctgttggcgctgagcggttgctcgaccgtctcctactacgggcaactggccagcggccagttcgccctgctgcgcgcccgcgagccggccgccgcggtgatcgccgacccgcagcgcgacgcgcgcttgcgcgaacgcctggcgcgggcggaaaaggcccggcaattcgccagcgaacgcctcgacctgccggacaaccgcagctatcgcctgtacgccgatatcggccggccctacgtggtatggaacgtattcgccaccccggagctgtcgctgcaaccggtcacccattgcttccccatcgccggctgcgtggcctaccgcggctactacagcgaggccgccgcgcgcgccgaggcggcgcgccagcgggcgctcggcgacgacgtctacgtcggcggggtgcaggcctactcgaccctcggctggttcgacgatccgatcctcagcagcatgctgcgctgggacgacgaacggctggcgaccttgatcttccacgaactggcgcaccagaagttctacctgcgcgacgacaccgccttcaacgaatccttcgccaccttcgtcgaacaggaaggtacccgccagtggcgcgagtatcgtggactgccgccggcggacggccgcgaggagaagcgccgcgagcagttcaccgcgctggtcctggccagtcgtgcgcgcctcgaagcactttatgccgggccgctggacgatgccgccaaacgtgccggcaaggctgccgaattccagcgcctgcgccgcgagtacgcggcgctgagccagcgcgaatggggcggcgagtcgccgttcaaggcctggatcgactcgccgttcaacaatgccaagctgcttcccttcggcctctacgaccaatgggtgccggcgttcgccgtgctgttccgccaggtcggcggcaactggccagcgttctatgcgcgggtccgtgcccttggccagctacccttggcggagcgccaggcggcgttgcagcggctggccgccgcagcgccctga

SEQ ID NO: 344508 - DNA, 702 bp, Pseudomonas aeruginosa
atgaacgacctcaccctgcattacctctacgatccgctctgcggctggtgctacggcgcctcgccgctgctcgccgccgcccgcgaggtgacaggtctggacatacgcctgcatggcggcggcatgatgaccgatgccaaccgccagccggtcggcgccggcctgcgccactacgtgatgccccacgacctgcggatcgcccagctgaccggccagccgttcggcaaggactacttcgacggcctgctgcgcgacaccggcgcggtgttcgactcggccccgccgaccgccgcggtgcttgccgccgaagcgctcggcggcctcggcgcggcgatgctggcgcggatccagcgcgcccactacgtcgagggccggcgtatcgccgagcgtccggtactgttcgggctggctgccgaactggggcttggccagggtttcgccgaggcgttcgacgcctgctccggcgagccgctgcgcgtacacttcgccgacagtcggcggctgatgaaccgtctcggcgccgccggcttcccgaccttcgccctggagcgcgatggtcgcctgcaggtgctcgacaccgggcgctacctcggccagccggacgagtggcgggctttcctcgagacgcaaaaggacatcgccagctctaccctgacaagcggcgtgccggctccattctgcggcatcgacggttgcccttga

SEQ ID NO: 344509 - DNA, 417 bp, Pseudomonas aeruginosa
atgagcttctcgcagaacgtcctgcgcctgcgccggcagaacgccctgacccaacggcagatggccgagcggctgggcgtcaccctgagccagttccgccacttcgagaccaaaggcgggcagccgtcgctggcggtactgaaaaccttcgccggacgcttcggggtgtccctcgactggctgatctgcgaccgcggcgaacggcgggcgctgcaggcagacctgcaattgcagttcgaagccatcggccgtctgcggctggacgagcggcgcgccatccgcgcgctgctcgacgagctgatccgccagtacatggccaagcgcaacctgccagcgaagccccggccagcgcccggggcgccgccaccaccggtgcgtccggcgaaccgcgccgaggccacggacgcgccgccgtag

SEQ ID NO: 344510 - DNA, 924 bp, Pseudomonas aeruginosa
atgaaccggctccccactcgcctgctggccgccacgctgctcctgggcagtaccccgctgcatgccgaagacgccgcctgcgcccgcgtcaggctcgctgatccgggctggagcgatatcgcggtgaccaatgccagcgccgccttcctcctggaaagcctgggctaccgggtgaagatcgagaccctgtcggtgccgatcatctacggcggcctgcgcgatggccaggtggacgccttcctcggcggctggatgccggcgcaccaggactaccatgagcggttcgtcgccagcggccaggtcgagcgcctggggcgcaacctcgacggcactcgcttcaccctggcggtgccacgctacgtctgggatgccggtatccatcgcttcgaggacctcgccaggcaagcgcaacgcttcgatcgcaaactctacgggatcggctccggcgcgccggccaaccagtcgatccagaagatgatcgacgccaaccggttcggcctcggcgactggaagctggtggcctccagcgagcaggcgatgctcgccgagctggctcgcgccgagaagcgccagcgctggctggtgttcctcggctggaccccgcatccgatgaaccttcgccatgagctgcgctatctcgacggtggcgagcagtacttcggcgagcgcgggcaggtctacaccctggcccgcaagggctacgccgcgcaatgcccgaacccggcgcggctgctggccaacctgcgcttcgcgctggacatggagaaccagatgatgagcgacgcgctgcaaggctcggcgacagcggccacggccgcccgcgcctggctcaaggcgcatccgcaagtgctcgacgcctggctgcgaggggtcaccgcgcgcgacggcggcgacgccctggcggcggtgcgcgaccggttgtag

SEQ ID NO: 344511 - DNA, 1374 bp, Pseudomonas aeruginosa
atgaaaatcatcatcctcggtgccggccaggtcggcggcacactggccgagcaccttgccagcgaagccaacgacattaccgtggtcgacaccgacggcgatcgcctgcgcgacctcggcgaccgcctcgacatccgcaccgtgcaaggcaaggcctcgttccccacggtgctgcgccaggccggcgccgacgacgccgacatgctggtggcggtgaccaacagcgacgagaccaacatggtcgcctgccaggtcgcctacaccctgttcaacaccccgaccaagatcgcccgcgtccgcgaaccggcctacctgacccgtaccggcctgttcgacaacgaggcgatcccggtggacgtgctgatcagcccggagcaggtggtcaccaactacatcaagcgtctgatcgagcatccgggcgcgctgcaggtgatcgacttcgccgagggcaaggcccagctggtaggcatcaaggcctactacggcggcccgctggtggggcaggagctgcgccagttgcgcgagcacatgccgaacgtggacacccgcgtcgccgcgatctaccgccgcaaccggccgatcattccccagggcgacacggtgatcgaggccgacgacgaggtcttcttcatcgccgccaaggcccacatccgcgcggtgatgggcgagatgcgccgactcgacgacagctacaagcggatcatcatcgccggtggcggcaacgtcggcgaacgcctggccgaagccatcgagagccgctaccaggtgaagatcatcgaacgcagcccgctgcgctgccggcacctgtcagacaccctcgacagcaccatcgtgctcaacggcagcgcatccgaccgcgacctgctgctggaggagaacatcggcgagaccgacgtattcctcgccctgaccaacgacgacgaggccaacatcatgtcctcgctgctggccaagcggctcggcgcgagcaaggtgatgaccctgatcaacaacccggcctacgtcgacctggtgcagggcggcgagatcgacatcgccatcagcccgcaactggcgaccatcggtaccctgctggcgcacgtccgccgcggcgacatcgagagcgtgcattcgctgcgccgtggcgcggccgaggccatcgaagtggtggcccatggcgatgccaagtcgagcaaggtgatcggccgctcgatcaacgagatcaagctaccgccgggcaccaccatcggtgccctggtgcgcgacgaggaagtgctgatcgcccacggcgacacgcgcatcgaaagtggcgaccatgtgctgctgttcctggtcgacaagaagtacatccgcgatgtcgaacggctgttccaggccggcctgacgttcttctga

SEQ ID NO: 344512 - DNA, 1452 bp, Pseudomonas aeruginosa
atgcactacgcctccattttccgcatcctcggcgtcctgctgatgctcttcagcagcgcgcagattccgccgctactggtcgccctgttctatgccgagccggtctggcagccgttcctgctggccttcgtcatcaccctcgccacaggcgcctgcatctggtggccggtgcgcggcgtacaggaagagctgcgcatccgcgagggctacctgatcaccgcgctgttctgggtcgtcctcggcagcttcggcgcgattcccttcatgttctccgaaaccccgcacatgagcctcaccgacgccctgttcgaggcgatctccggcatcagcaccaccggcgccaccgtgctcaccgggctcgaccggctgccgcgggcgatcctctactatcgccagcaactgcaatggttcggcggcatgggcatcgtggtgctggcggtggcgatcatgccgatgctcggtatcggcggcatgcagctgtaccgcgcggagatgccgggtccgctgaaggagcagaagctctcgccgcgcatcgccgacaccgccaagaccctctggctgatctactgcggcctgactctggtctgcgcgctggcctactgggctgccggaatgagcctgttcgacgccgtcgggcacagtttctcgaccatcgccatcggcggcttctccacccacgacgcgagcatcggctacttcgacagcccgctgatagaggcgatctgcatgttcttcctggtcgtctcgggaatcaatttcggcctgcatttcctcgcctggcgccgccgcaacctggcccactacctgcgcgatccggagtgccgcgcctacctgtcgatcctgctcgcggtattcctggtcacagcgctggcgctggtcgcccagcgccactacgaacagccgttgcaggcgatccgctatgccgccttcatggtggtctcgatcggcaccactaccggcttcggcctggccgacttcgccacctggccgaccttcctcccgcatctgctgctctacaccaccttcatcggtgcctgcgccggctccaccggcggcggcatgaaggtgatgcgcatcctcctggtgtaccgccagggcatgcgtgaattcatgcgcctgctgcaccccagcggggtgttcctggtcaagctcggacgccggccgattcccgaccgggtggtggagtcggtgtgggggttctgctcgatctacctggtcaccttcgtcgtgctgatgctggtgctgctggccctgggcgtagacctgctgaccgccttctccagcctttcgtcatgcctgaacaacctcggcccggccctcggcgaggctgccgcgcactatggcggcctgccggacagcgccaagctggtgctggccttcgccatgatgctcggccgcctggaagtgttctcgctgctgatcctgttcaccccggcattctggcgctactga

SEQ ID NO: 344513 - DNA, 315 bp, Pseudomonas aeruginosa
atgatcgaaggtctggaaaagatgctggccaagggcgtggacaacgcgctgctgcgcttcggcctcggaaagggctacctggatgcgggcaacgccgaacgcgccgcagagcatctgcaaagctgcgtggaacaggaccccgggtattccgccggctggaagctgctgggcaaggcgcgccaggccggcggcgacctcgatggcgcaaggcgggcctgggagcaggggctgaaggcggccacggcgcacggcgacaagcaggccgaaaaggaaatggcggtgttcctgcgcaagctggacaaggcgaagccctga

SEQ ID NO: 344514 - DNA, 270 bp, Pseudomonas aeruginosa
atgtcgaaacacacccgttacgctcctccgcagctccacttcgaaccggaccaggcgctcctctacatctatcggaacgcctccagcgacgccctgttcgagaccgctcaggaacgcctgaaaggtcttgtcggcctcctgcaggccctggagcgatttcgtacgcgtaccggcggcgacctctcgatcggccgcgcgacagacatcctgcacacgctggcgtccgacgcgctgacactgcacatggccgcgcgcaacgtcgccccctga

SEQ ID NO: 344515 - DNA, 267 bp, Pseudomonas aeruginosa
atggataaccaacgacaatacccacgaacccctatcaaatgccggattcggatcagccacccgcaactgggcgagctgatggctcagactcgcgatctctccgataccggtgtctacgtgaagcatcccgaccttcttcgactggacgtcggcagcatcgttacgggccaggtgcaggatttgcccatcgaggcgccggtattgcgcatggaagtggtacgcatcgacgccgagggcgtcggcctgcgcttcctcgccgatcaatga

SEQ ID NO: 344516 - DNA, 888 bp, Pseudomonas aeruginosa
gtggagaaattcaaaggtgccctggtggtgggtgccctgcgcctgttcgcattgttgccctggcgcgctgtacagggcgtcggggccggtattggctggctgatgtggaagctgccgaaccggtcacgggaggtcgtgaggatcaacctgtccaagtgcttcccggaactgtccgagactgagctggagaagctggtcgggcagagcctgatggacatcggcaagacgctcaccgaaagcgcctgcgcctggatctggccgccggagaagtcgctgaagtacatccgtgaagtcgagggcatggaggtgctggaagaggcactggcgtccggcgacggcctggtcggcatcaccagtcacctgggcaactgggaagtgcttaaccacttctattgctcctatgccaagccgatcattttctatcgtccgccgaagctgaaggcggtggacgaactgttgaagaagcagcgcgtccagctgggcaatcgggttgcaccctcgaccccggaaggcatcctcagcgtgatcaaggaagtgaagagaggcggttgcgtggggattcccgccgacccggaaccggcgcgtactgccggtctcttcgtgccctacctcggcaccacggcgttgatcagcaagttcgtcccgcagctgctatcgcgtggcaaggcgcgcggggtgttcttccatgcggtacgcctgcccgatggcagcggctacaaggtgatcctcgaagcggcgccggcggacatgtacgacaaggacctggatgtctcggtggccgccatgagccgcgaactggccaagtatgtacgggcctatccgagccagtacatgtggagcatgaagcgcttcaagaaccgcccggacggcgagaagaagtggtactga

SEQ ID NO: 344517 - DNA, 948 bp, Pseudomonas aeruginosa
gtgagccagactacgcccgccgtgcgcaccttccaagacctgattctcgccctgcagaactactgggccgagcagggctgcgtggtgctgcagccctacgacatggaagtgggcgccggcaccttccacaccgcgactttcctccgcgccatcggcccggagacctggaacgccgcctacgtccagccgagccgccgtcccaccgacggccgctatggcgagaaccccaaccgcctgcagcactactaccagttccaggtggtcctcaagccaaacccggagaacttccaggaactctacctcggctcgctgaaagccatcggcatcgacccgctggtccacgacatccgcttcgtcgaagacaactgggaatcgccgaccctcggcgcctggggcctgggctgggaaatctggctgaacggcatggaagtcacccagttcacctacttccagcaggtcggcggcatcgagtgctaccccgtcaccggcgagatcacctacggcctggagcgcctggccatgtacctgcagggtgtggactcggtctacgacctgatctggaccgacggtccgttcggcaaggtcacctacggcgacgtgttccaccagaacgaagtggagcagtccaccttcaacttcgagcatgccaacgtgccgaagctgttcgagctgttcgacttctacgaaagcgaagccaaccgcctgatcgaactggaacttccgctgccgacctacgagatggttctcaaggcctcgcacaccttcaacctgctggatgcgcgccgcgccatctcggtcaccgagcgccagcgctacatcctccgcgtgcgcaccctggcccgtgccgtggcgcagagctacctgcaggcccgcgcgcgcctcggcttccccatggccacccccgaactgcgtgacgaagtactggccaagctgaaggaggccgaatga

SEQ ID NO: 344518 - DNA, 705 bp, Pseudomonas aeruginosa
atgcgctcgaagcggcgtctggcggccagcacgatgttccgctccgagctttaccggccggttggcgcagcagtatccaggcatgcagcccgacctcgatgctttagtgctccgggccgaagccttcacgctgcgaggcttccccggtgccaggcgttaccggacacagcggctcgccggacggtcatagcctggagcggatcgatagcctccgtgctcgtcgcgatttaccaactcggcggccggagagggctgtggaaaaggcgcaagggctttttccagggggaaactccggattctcctgcgccgccttcccgatggctcgttgcagcccgcccatggcggcaaccgctagcggccggtgtctggggcgcgagaagtcgtcgatgcgttccagacactcatgtacgccaccgaagccgttgcgtcgttgcagccattgccgctggccgactgtgcatgaacctcgctcagtcgggcatccaagcgacgcaggcagatggcttccggaaccgaagcggcgcgccgcaatccatgccggcggcgtggagccgggcaaaagcgacaatgaaagggagagtacggagaacggatatttcatcgggcgatccttgcccgattttatccacagcccggcttgagccgagcctcatttgccgatacagaaactcgagaagatccgtcccagcagatcgtcgggagtga

SEQ ID NO: 344519 - DNA, 681 bp, Pseudomonas aeruginosa
atgctgccggaggagcgcttgcaggcgatcgtcgattgttccttgttccataagctcgatagccaggcacagctggcactggcccgcatggcgagcgtgcgggtctatcggaccggcgaagccctgttccggcgaggcgacaggagcggaactctttttctcgtctgcgatggctgggtgcgcctggcgctggaccgtggggccaaggagttttccctctccctgcattcgcggggcgaagtcctggctgaacatgtcctgctcggcgtcgggtatcacgagagcgattgcctggccattacccatgtccgcgtgttgaggttcgtctccgttgccatttccgaggcgattctcaacgacttgtggggctcgctgaacgctcgtatggcacagcgggtacagttgctgctggagcgcgtggaggatctttccctgcacaccctcgataccaggctggctcgcctgctctgccgcttgagtgcgcagagggttcccttgccgtatctgtcgcagggtgtcctggcgagcatggccaacgccagtcgaaccaagatgaaccagatgcttcgccggttccagaggttgggcgtaatcgaaatgcgaggcggtcggatcatcgccgtggatggcgagcgcctgctgatgctctgcgacgacaccggccgacgccctgttacctag

SEQ ID NO: 344520 - DNA, 630 bp, Pseudomonas aeruginosa
atgccaatcagaacgatcattgccgacaagcaccagatgtttcgtcaggggctggctgccttgttgaatacggacaaggaaataatgacgctggcgcaggccgatgatggcgagcaagcgttgtttctgatcgagaccctcaagccggatatcgcgatattggaagttgcgctgccgcgcctgagtggtatcgaaatagcgcagcgtatctcgcgtatggaaatagaaacctgcatcgtcatcctgacttcctgcgaggacccgttggtggcggtgagtacggtcgaggccggtgcgtccgcctatgtcttgaaaaaggctcccttcgacgcccttgtcacggcgctccataccgtggtgaccggaggaaccttcatttcgcctgaattgcgtggacagttccgcgagttgggacgaaagggcgtcaggaatatcacgctttcttccagggaacgcgaagtcatacggcttatcgcctgtggaaaaagcgccaaggaagtcgccaaggcattggatataagcccgaggacggtggatacctacaaggaaagaatgatgaagaagatccaggcccacggcgtggccgatatcgtccgttatgccattcggataggcgtgatcgatcgctga

SEQ ID NO: 344521 - DNA, 669 bp, Pseudomonas aeruginosa
atgactatggagatcagttacgtagaaaaaaccagaggcaagttgtccgcgaatgccgccgccgggaccaactactcgcttacggtcgtcaacaacagcgcccaaccatgggtcttctacgtgtaccagaagatgccgaaccaggaccgaagcatcttttccgtcgcctggttcgccagtccctaccagattcgggtgggcgaccggattcgtttcagctggcagatagactacaacttcgtctggagcgataccggtaccttggtccccggggtgaatttctatgcctcgggctccatggatgccgatccggcgggtgccaacaccacgctgttcaacctcgacccgggccctggtctgtccgtccctacccaggcgccgccggcgggcaccctggtgatcaatgatggcagcgatgtgcccaacaatcgctattccgtcgggatcggcatgtccggtagcgggaccttcgtggtgcaggccgggaccaatctcaggcaccagttcacgccgacgcccagctattgggtggctgccggcatcggccagcaggtgggtaccgtcctggatatccagaccgtcacgcaaaccagcgaggtgcgatacgaccctgcggtttacgaccgtacggcaaccctgcaacccgataacacctggtcgctcagctga

SEQ ID NO: 344522 - DNA, 756 bp, Pseudomonas aeruginosa
atgaaaggacatggaatcgccgctctattcctgagtggcctgctgttgctcgcgcccgctgtatcccacgggctgatcatcgtgatgccgaactccgactgggtcacccagtatgccgtcgggctttgcaacgcgaagtaccagaccgacaactacctggactggcatcaactggtcgccgctcccaacggctcggtgaaggtcgccgagggcgaagtggtctgcatccttggccacggggcgccgggcaagatcggcgatgtcgctggtgacaccatagccgccacggtggcggagaagctcgaccatacggcggaagcttccaatccggtcctgctcatggcgtgcatgtcggccgtggccccgctatcggggcgctcggtactgcagtccttcgagagtgtgcggggcgcctggagcggcaatgcggtgacggccagcctggggatctgcgtggcgaaccggaacggcagctcgccgctttaccggaccgtgctgaagaaccccctgcccgggtcgggagactgttcgatgaaagccctcaccgatgagcaggcccgcctgaagctgcagatccaggcgaacatcgccagttgccagacgcgctccggcccccttgcgatagggcagtgcatgtacgacctggacaacgacgacggcaaggcgatcaacgacaagttctacgttccgttcctggcctacatcaccgacaaatcctgcaatcagaccccgggtacggcgagcgggacgatgtga

SEQ ID NO: 344523 - DNA, 591 bp, Pseudomonas aeruginosa
atgtcttctttcattccgatcggcgcggtatgcccgttcgccgggcaagtgaacccggtatcgggagcggccaacggcacctgggcgaacagcagttgcgcggggagctcggcgaagcccgcgcaactgtcggccgacgcaccgctgctctatctcgaaaaccagggttggatgctgtgtgacgggcgctggctggcaagcagcggttttcccgagttgttcgcggtgatcggctacctgtacggcaagaagagcgaagggggcgtcgacagctaccgcctcccggactatcgaggtctattcctgcgtggcttcgacgcgggtgccggactggatcccgatgcggccagcaggctctcgcccaccggcggcaataccgcgaatgtcgtcggttccctgcaatgcgatgcgttgcagagccatgcccaccagtatcaggtcgttcagcccgcggggatttcccagcagggacaagcggcgggagccagcttcacttcgcaggccacctccgttccggatgctcccgcacgctcgtccgtggaaacccggcccaggaacatcgcggtgaactacatcatcaggttcaggtga

SEQ ID NO: 344524 - DNA, 576 bp, Pseudomonas aeruginosa
atgcaagtctatgcggtcgtctacaccagcagcggacgcttccttctgttctggaagctggccaagggatatttcttcttcgacgcgaagacgggcaagggcaagatcgtcaagggcggcgcgaacctgaacggaggaaacgactatgcgctcccgggtggccgccgggaggagagtgagaccgtggcggcaggggcggcgcgggagtttctagaggaaacggccgcggacgtaaggggactacccgttcaggagagaaccttcgggagggacttctgtgcaggctatttcaggatcgaagagaaggagatcgagggattgctcgcgcgcatccaggaccccaatctcgtttcggccatgaatgcctcgattgatatcgagcatggctcgatcacccgctatgcgcagatccatacgcgttacccgagtgctccgcgggacaatgaactggagacggggtatctctggagcgtccatgacgaagcgaactggaaggtcgtcctgtcgtggaagaacagccccgccctgggctggtatttcgatatcctcgattatcttaaaacctcgatcctgtag

SEQ ID NO: 344525 - DNA, 642 bp, Pseudomonas aeruginosa
atgagcgcgttgccgcagcacaggccgatgccgcgccaggtgttcgacgacgatccccaggtgctctccgaggtgcttcgcgagggggtcaacctggcggtctggacgcggcggctgagcccggcgctgcgcgacttcgccgccgtcctggtacgcagccagccgaccctggcgctgagcctgacgctggaaatgcgcgaggatcgcctgccgacctgggaggcgctgcgggggatacgggatctgcctggccaggcagacttcctcgacgacctcggctggctggtggaggccttcgcctgcctgaccggcgcccagcgcatcggcctgcgcctgcgggcgctggacacgccgatgtgtccgcgcttccatgtcgatcatgtaccgttgcggctggtcaccacctaccagggcgcggccagcgagtggctggacgagtccggcctggatcgccggctgctaggaggggcgcaggcggaagaggtcgaaccacagtatataaacagcttgtccacaggtgatgtcgcgttgctcaagggcgagcgctgggagggcaacgaaggcgcgggtctggtgcaccgctcgccacggcatgcgcctggggcgccgcgcctgctgctgaccctggactggctgggctga

SEQ ID NO: 344526 - DNA, 369 bp, Pseudomonas aeruginosa
atgcgtccgttcctgcttttcctctcctgcctgccgggcctggccctggccgaagcctgcatcgtccacagccaggcgaagaacctcgatgtgaaggtctgccagcagaaccgcaatatcccggccaagctgttccgcgagggtttctgccagccgcagctgccggaccagaaggtcgacgtctccttcgccgaggcctgccccgccggtgccttcggtgtctgtcgcgacgccagggtagccaacacgccgtaccggcaggacatcttctactacggcgtggccagcgacgcgcgctatctggaaccgttctgcgccagccagagccaggggcgctgggaagccgccgatccggcgaaacagccctga

SEQ ID NO: 344527 - DNA, 969 bp, Pseudomonas aeruginosa
atgcttcgagagatacccacccacctgatcggcggccccttgggcgccggcaagaccagcctgatccgcgccttgctggcccagaaacccggcggcgagcgctgggcggtgctggtcaacgaattcggcgagatcggcctggacgccgcgctgctggccacgcaagccgatggcgtggcgatcggcgaggtggcgggtggttgcctctgctgcgtcaacggcgtgccgttccaggtcggcctcggccggctgttgcgccgcgcgcggccggaccggctgttcatcgagccttccgggctgggccatccgctggcgctgtggaaacagttgcaggccgcgccctgggccggggtgctggcgctgcagccgccggtgctggtgctggatgccgccgctctggctgccggcgagccgctgccggaggcccaggaacaggcgctggcggtggccggcctagtgctgttgaacaaatccgaagcgctcgacgcggcgcaacgctcgaccgcgaccgcgcgtctgcctgccgtgccggtgcgctggggcgtgggcggacggctggcgttggcggatctcccgggcggcgcgccgcagccgcgcagcgaagcacgctgggcggcgttgccggacgcgccggcggagttgcccctgttgctgtgcgccgaccgaccgttgcgtgccgtgcgcgaacaggacggtcagctcgccatcggctggcggctggctccgtcggtacgcttcgaacgcgccggggtggaggcctggttgcgccgtttgtccggactgcggcgggccaaggcggtgctgcgctgcgcggacggctggtacgcggtgaatgccgcgccgcttgtggataactgggtcaagtcctcgtggcggcgagataatcgtctggagctgatcctcgaacccgggcacgacgaagaggcgctcgaacgcgcgttcctggcatgtcggatggtggcgcaatga

SEQ ID NO: 344528 - DNA, 744 bp, Pseudomonas aeruginosa
atgtccgtagcccgccgccttccttcgccgctcctggccgtcctgaccgctctcgccgccaccgtcgtccaggccgaggatacgccctgcgcgagccccgcggaatgcaacacgcgcggcacccaggcttatcaacagggacgttatccacaggcgctggaagccttcgaatggcaactgcgcctggccgaacgccagcaacagggggaggcggcgcaggagcaggcgctgaacaacctgatgctggccaacctcaaggccggccatgccggccgcgcccgcgcctggctcgctctggcgctggcgcgcggctacagcggtcctgccacccgcttcaatctcgaacaggtggccagccaggtggactacccggccctccagggtctcgccgggcattacctgcgctacgccgggcaggccgaatgggaaagcctggagatcgaaccggtgaagggcggctaccaggccagcttcgccctgatgcgcatcggcaacccggagaagctgatggagtacggtcccgcggcggtcggcgagttgtccggacggctggaagggaaaggcgcgctttaccgcttgcgcagcgagggactgggcaccggctgcagcctgcaggtgctgcaggagggcatcgacctgcgggtgatcgagagcctcggcggcgcttgccagggctacggcggcatgggcatagccgccgccggtggctggctgaagatcgccagccaggccaagggcggttga

SEQ ID NO: 344529 - DNA, 789 bp, Pseudomonas aeruginosa
atgcgccttctcttcttcagcgcccttctcctgctcttcggacaggcccaggccagcgaatggaacgacagccaggctgtggacaagctattcgaagccgccgggatgaaaggcaccttcgttctctacgacgtgcagcggcagggttatgtcggccacgaccgagcacgcgcgcagacccgcttcgtccctgcctccacctataaggtggcgcacagcctgatcggtttatccacaggcgcggtgaagtccgccgacgaggtcctgccctatggcggcaagccccagcgcttcaaggcctgggagcatgacatgagcctgcgcgaggcgatccgtgcatccaacgtgccggtctaccaggaactggcgcggcgcatcggcctgcagcgtatgcgcgccaacctcgcccgcatggactatggaaatggcgaggtcgggcaggttgtggacaacttctggctggtggggccactggagatcagcgcgctggagcagacccgtttcctcgcccggctggcacagggagaactgccgtttcccgagccggtgcaggccaccgtgcgcgacatgaccctgatggaacacggcccggactgggagctgcacggcaagaccggctggtgtttcgattgcacgccggaactcggctggtgggtcggctgggtgaagcgcgacgagcgcctctacaccttcgccctgaacatcgacatgcccggcggcgaggccgacatcggcaagcgcgtcgaactgggcaaggccgctctcaaggccctgggcgtgctgccctag

SEQ ID NO: 344530 - DNA, 1071 bp, Pseudomonas aeruginosa
atgttttccatgaatatgaacgttccgttcgtgaaagaacgaagcgaaggtattgttcgctcttcgaaaaacaggaattcgcgttatctgctgctgtctttttcccttgcggcgctttcatccatgtccggtgtcgctttcgccgatgagaccgggtatacgaccaatgatgaactgcggtccgccgagagcagcctgaacaatcgcatcgatcgcgcttccacgacgctcgacaacaagctctcccaggtcgccagcgatgtcgccagggttgacagcaaggtcgatgccagcgaaagacgcctgcaggaaaatatcgatggcaacaaggcggacatcgagcagaaggtggtcgatagcgagacacgcctgcagaagaacatcgacgacaacgtgaaccagttgaacggccgcatcgatacggtcagcgatcgcgccagcgatctcgagaacggcagaagcgggatggtccaggtgaatacacccgcccgcggaccggtccccggtcccaaggcgagcggcgccaattcgatggcggcgggctccgcggccgaggcttctggcaacgacagcaccgcgctgggcaacaatgcgaaggcgacggcgaacaacagcatcgccctcggcgacagctcggtcgccgatcgcgcgaactcgctgtcggtcggcagccgtgggcatgagcggcagatcaccaacgtcgccgacgccacgcagggcaccgacgcggtgaacctgaggcagatgaacgaaggcctgcgggtgaccgaggagaatgcccggcactacaccgatcagcgcttcaaccgcctgcacaagaagatcgaggacctcgacgacgacctgagcgcgggtatcgccggcgccatggcgatggccgcgctgccaccgccctaccaggccggcggtacctccaccgggattggcgcggccacctatcggggccagtccgcgctggccttcggcctgtcgtcgatcagcaaggacggcaagtggagcacccggctcagcggcaacatgaataccgctggcgatgctggcgccgcggtgggcgtgggttacaactggtaa

SEQ ID NO: 344531 - DNA, 1020 bp, Pseudomonas aeruginosa
atgagtgcttgtctatccaagctcaccagacgttccctttttgccgtcgcccttctgcccgtgtccgcccgcgcggggctgatggatgtttgcgtacccgtgggctcgtccagcgtgcaggtggcatttcccggaccgatcacggtgcagcgcgacgcgccggcaggtaccgtcctggcgaccagggaagttcccaccgccatggagtgcgccaacctgtactacccgaccgggagcaaggcggtgtatttcaagtggggttccaacccgtcgatccagtctttctccgccccaggatattccgtgtacccgacaggggtggcgggtgtgggcctgtactggggtaccaggaatcatgagtcggtgacctacaacatgagcgtcggttcgctgaacgacgagagctccctcctcgaggtaccgttcccctatctgttgggctcgcgcacctatcccttcacccaggtcttcaagctgatcaagaccgggcctgtcagcggcgggaccttcagctttcccagtttcaaggtgatgacacgtccggtctcgctgcagggggacttctacaagaaggacctcttcaccttcagtttttcgccggtccaggtggtcggctcttcctgcgagttgaagaacagcggcaagaccgtcgaccttggccaggtcgaggccagtggtttcaaggggccgggcaccacgctgggggccagggcgttcgccctcgaactcaactgcacgccgggcgccaggatgaacctgactctcgacaagaccttccagaacaccagctacgtgggcactatcaacctggtcagcacttcgagcgccagcggagtgggtatccaggtcctcgatgcggccaacgggcaacccatcccgttgggacaggcgcatgccatgggcgtggccgccagtggcgacaccttgctggcgctggtggcccgctacatccagaccggccagcgggtcgttcccggcaaggcgcaggcgatcctgagcttcaccctcagctacaactga

SEQ ID NO: 344532 - DNA, 420 bp, Pseudomonas aeruginosa
atgtccgaaacccatgccggcggctgccactgcggccacctgcgctacgccgtcgccgcgccgctggacgacgttgcccattgccattgctcgatctgccggcgcaccaccggcggcatcgtcaccacctgggccacggtgccgcgcgcggcgttccgctggctggcgggcgaaccggcggagtacgcctcgtcggccagttgcacgcgctatttctgcccgcgctgcggagccaacctggcgctgcatacccggctcagcgtggacaccctggacttcaccgtggccagcctcgaccacccggagcgtgctcccgccaaccggcatatctggctcggcagccgcttgccatggctacacctggacccgcagttgcccggggaggacggggagttcatcgccgcagcggacgacccgtga

SEQ ID NO: 344533 - DNA, 192 bp, Pseudomonas aeruginosa
atgggatactcttcgcaagcgcatccgatatcgtccccgacagcctcgcactggcgcgattgcctgctcagatggcgccataacgtccggtcccgccggctgctggcacagatgagcgaacacgacctcgccgacctggcgatcagcccgagcgaacgctacgtagaagtttcgaaacctttctggcgctga

SEQ ID NO: 344534 - DNA, 1458 bp, Pseudomonas aeruginosa
atggcggaaacgatcattctcatcggctccaagatcggtagggatagcatcctgtcatcccttggcaagccggaatacagctacttcttcctcctacaggaattcctcccggcgctacatgccttggggcgggtgatcgaagtggcgtccacggcggaagtcgatcgcctgttcgacgattattcgagcaaagggcacccggtggtgttcctgagcttcagtcctccccatcagaccccgctggggctgcgttgcccgactgtgccgctgttcgcctgggagttcgacagtctgccgaacgtggcctgggagggcgaaccgcgcaacgactggcgctatgtgttcgaaagagtcgccggcgcggtggtgaccagccgcgaggccgcgcagttggtcagggaggtttcgccgctgccggtgctggcattgccggcgcccgtctgggcacgcttcgccgactccgagccgagcgaattgacgctggcggcaagagccttttcctttgccggacaggttatcgacagtccgctgctgggcctgagcgccgatgggctggtcaggcggccgccggtcgtagaagcagaagaggcgccagcagaggaacccaccggagagcaggtggcgtcgccgccgccccgcaatacgcgctgggcgctgagctgccggttggcggaggcctggtggaacgagattcgcggctgttatgcgaaacctgtcgtcgtcgccgaaccgaacgtcgcgccaccagcgcccatccagcatgtgcaggtcgatggcgtggtattcaccacggtgttgaatccggccgacgggcgcaagaactgggtcgacctgatcaccgcgttttgctgggcgttccgcgacgttccggatgccacattgatcgtcaagatgactcaccacgacctggaatactaccggatagtgttgatcacgctgctctcccgtctggctccgttcgcttgccgcgtgctggtgctccatggctttctcgaggatccgcagtatcgcgaactgatggcagctaccacgttctacgtgaacgcttccagcggtgaagggctgtgcctgcccctcatggagttcctctgcgccggcaggccggcgattgcgccgcggcataccgccatggccgattacctgaacgacgatatcgcgcttccggtggcctgtgcccccgagccgacctgctggccccacgatcccaccggaatgctggtgacccaccggcatcgcctggattggcagtcattgatggaggcctatcgccaggcctatgcaatggcgaaggaggaaccggagcgttatcgcgccatgctgtcgcgagccagacatgagatggaggcgttctgttccgtggagcaggtgagtggtgccctgggggacttcctggggcgaattgccggttcagagagcacgactcccggttccgttgattcgctgcggagtctggcgtga

SEQ ID NO: 344535 - DNA, 1491 bp, Pseudomonas aeruginosa
atgaaaatcctcgttcattcggaaatatcggcagcaaccatcgcgcgtagcctgggactgcccgactacagctactacttcgtgctcaaggaattccttccggtacttcgggagctgggcgacgtagtggtggtggaagcacctgggcgggaagtggatgcgttatacgaccaggccatctcggatggcgagtcctgtgtgtttctctcgttcactccgccgcacaagacgcctctggagctgcgttgcccaactttcccggtatttgcctgggagttcgactcgattcccagcgagccatggctcgaagaagagcagcagaactgggccgtggtattgaagcgctgcggggcggcgatcacccattcggagctcaccgtccgagctgtgcgcgatctgctgggtcaggagttcccagtgctctcgatccctgcaccggtctgggacaagtacgaaggcttgcgttccaccgcgaccgctgggcaagtccagcaccggcccctgcggatcgcccgaggcgtggtgctcgacagtcatgacgtgtctctggcgccctatatgccgggcatcgatgctgtccaacgggcggttaccgccgcccggggcgccaacgccgggacaacgagcgcgcccaatccccgctcgccactgaggatcaccctggattatctggggcagtggtatcgacaggtcctgctcggcagagaacctgccgcgcccgcgccggacgggcaggagaagcgactcgagccggagaacccggtcgaaccgcaaggcctgcccccggttggcggggaaagctacgagatgccggtcctgaagctggccgagcatagtctgcagctttccggtgtcgtgttcacggcgctgttcaacccctacgacgggcgcaagaactgggtcgatatgctgacggcgttctgcgcggcgttccgcgaccagccgaacgctaccctgctgttcaaactgggccatcatgaataccagtcggcgatgaacgacatgctgatgtgcatggcccggatgccggcgttccgttgtcgcgtcgtgctgctccagggattcctcgaaggaaacgacttcgagtcgttgatccgcggtacggcgttcgtcgtcaatgcctcccatggtgaggggcagtgcctaccgctgatggagtttctctcctgcggaaaacccgccgtagcgccacggcattcggcgatggccgactatatcgacgagcgggtagccttcgtggtggattcctggctggacgctaccgcttggccgcacgatccgcgcctggcctatcgcacactgcggcaccaggtcgactggcagtcgttggtggcggcctatcgggccgcctatacctgctatgccgaacggccggaactgtacgcacggatgtccgccgatgccattgagcgcatgcgtggacactgctcgcgcgaagccgcgcggcggaagctggagacctttctcgagcgggaggcgctggaagcatga

SEQ ID NO: 344536 - DNA, 891 bp, Pseudomonas aeruginosa
atgagcctgcgtcgtctgttggaggcctggcgagggccgcaatcgttggagagggaaaggcccgtcgaagctccggagaatgctccggattacgtcgattcgcgggattgcggtctggtggacgcggtgcagagcggctggtaccagagcgagaccgacgaattgttcaagggctttccggtgagtgcggacgatgtggtcctggatgtcggctgcggcgctggcggggcaaccctgttctgcgccaatcgcggcgcccgggtgatcttctccgatgtggtcgaggagaagatcgaggccctgcgccaacgtgtggcgtcgaccccggcacgggatgcgcaggggatcgtctccgatagctgcccgctaccgctggaagatgccctggcgacccgcgttatcgcgctggagatgctcgaacacgtggacgatccggcacaggtgctggccgagctggtccgggtggggcagccaggggctctctatctgcttgccgtgccggatgcggctggcgagcatctgcagaaaaggttcgcaccgtcctattacttctcggcgccgaaccatgtgcgcattttcgagcgcgagcagttcgccgggttggtcagggagtcgggattggaggtactccaacagtcgaccttcggtttctactggaccttgtggatgtgcatctactggacttgcgcgcgggcaaccggtgccgagttggagggcgcctcccacgacgtggtacagccgccgtatccgccattgctcaacgattgggcgaagctgtggcatcaattgctcaagatgcctgagtcggcgccgatgaaggcggccctggacgacctgctgccgaagagtcaggtgattgtggcgcgtaagccggagagtcgccgttcatga

SEQ ID NO: 344537 - DNA, 1158 bp, Pseudomonas aeruginosa
atgaatcgtcgtatcgacgatatcgaagtgctgagagccgtagcggtacttttcgtggtgctgcagcacgcccagggcaacctcttcagttggtcgagcccggcgctggaatggttctacaccttcattggcggctctttcggcgtggacctgttcttcgccatttcggggttcgtcatcgcccgcgacttgctgccacgcctgcaggccagcggaagccgcaggcaggcctggtacatcctgctggcattctgggtccgccgtgcctggcgcctctggccgtccgcctggctgtggctcgcggtgatcctcggattgtgctgggggttcaaccagagcggtgtgttcggcagcctgcgcgccaacgctgaggccactctggccgcattgctgcaagtggcgaatgtgcgcttcgcccttaccttcggtgaaggcgaaatcggtgtcagtttcgtctactggagcctgtcactggaggagcagttctacctgctgttcccattgctggccttgcttgggcggcgctacgtgctgccagtggtgctggcgctgattttcctgcaatgcttcgcgccgcgcctgcagtcgttgtggctgatgatgctgcggaccgatgcgctggcttatggaatcctcattgcgatgattcacgagcgtttcactgccggacgggtgcctgcgtggttgcatggtcggcatctttcccgcctgttgctggtcctcgccctgctgtgcctgaccctgctggcgagtcgcctgccggtgccgtccttcagtatgggcctgattgccctgctttgtgccgggctggtctggatggcggcctacgacgcgaacctgatctgcccgccgggtttgttgaagaggctattgatatggatcggcaatcgttcctacgcgatctatctcatacatgtgccggcgttctttttcactcgcgaactgttttatcgcctgtatccagaggaacacgtcggaccggcatatttctttccttacctggtggtttccgtgggtctgatcctcatgttcagcgagcttaactatcgctgggtggaaagcccgtttcgtcgcttcggggcccgccagtccagaattcttctcatacagggtcggacgcccgaaaccatggccgtgctaccggccgagcgtatctag

SEQ ID NO: 344538 - DNA, 831 bp, Pseudomonas aeruginosa
atgctggagttcttcaagcgcatatccgggcggcctcagcccgtatccgtatccgaagtgccgaccgcaccggctgacgaggccgtcgaggagcagtccaccctgaccgatgcctatctgagtggctggttccagcaggagagcggcgaattgttcgagggtttcccgatcatggcggaagactcgatcctcgacatcggttgtggtgatggacccttcgtgcaattttgcgcccagcgcggagccgaggtgatcttcgcggatatcgatgcggccaaggtcgctgccgtcgaacaggctctccagggctcgcccgcgcggggcatcattcctctggtgacagacggtgatccgattccgttggaggatgcgcgggtcaacaaagtcgtggcgatggaggtactcgagcacgtggccgatcctgcgcagttcatgcgtgaactggtgcgtgtcggcaaaccgggcgcgctgtacctgcttaccgttcccgatccgcttggcgaaagcgtgcagaaagagttggcgccgccggcttatttcgagcatccgaaccacatccgggtgttcgagcgtgatgatttcgcccgtttggtggagtccgccggcctggtgatcgaacggcgtacccagtatgggttctactggtcggtctggtggttcctgttctgggcctgcaggcaggaactgtcgccgccctggcatcccttgctggagagctggacgcggacctggaacatgctgttgtcgatggaggacggcccacgcatcaagaaggctctcgaccgcgccatgccgaagagccaggcgatcattgcccgtaagccactctga

SEQ ID NO: 344539 - DNA, 1428 bp, Pseudomonas aeruginosa
gtgcagggatgttggcggttcgtgaggctcgatcgggaggagtgggggtgcgtactcgcggtgctggcggccgtgttgttcgttcgcctggcgatgggcttcgagtttccgattccctggaatgacgaagcggcgttcatctcccagggattcgagttcagccgtacggggagcttctatgttttcggcttgaacaccgagcgggtggtgatgtggatgccgccaggcttcatgctgctgctggctgcggcctacaaggttttcggctatagcttcgagctgtcacgctggatttcctgcctgctctatcttggcgctttcggggttgccctgggcatcctgaggagcctgcgcctggagggctgggtgcgtctggtggctctggtcctgacggctctggcgttcgtctctccttattcgctggcgatctccaacatggcgcggatggaggcgctgtacgccttgttgtttctcgcctccctcctggccatgttacgcgagcgccccgggctggggctggccctggtgctgtttggcgccaccgtgcacttcaacgcggtctacatgctgttgccctacctggcactgatcggctggaagatccttcgccgcgaaagcctgacgctgaccccgggcgagctgctggcgctatgcctttccaccctggcgctggcggcctatggcgtatttgtcgtcaggcacatcggcggctttctcgaggacatgaagttccagttcgacttcaagctgggatgggcggtcatggatgggccgatgggatggttgcaggtgggggcgatggtggccctggcagccctgcaacttgcctggcgtcggcgtttttgccgcgaagcgatgctttcgctgtatgccgcgggcttcatggcgttggcgctgaatggccataacatgtggtatggctttgcctttgtattcgcactctggctactattgctgagcgtgctgctgagctttgcagggttggcgcggcgaccgctcttcaaggggctgtcactgctggtcggatgcctgctcctgctgccgttcgcggtgcatggctggagcagaaacgatgtcttcgtacccttgtggccgcgcgccgagctgcttcagcggccgttcctggcaccctctgaaatcgccaaggttcgcgcctggatcgcgaccctgccgccggagactaccgtctcctttggttactcgggggtcgagcctttcttcttcgccgatctggccagggccggcgtgcgctggagcattcccggccacagcgtgacccaggtgctgccaccacgccgtaacgactaccgggtgttctgcgacagcgctcttttccccacctaccttgcgcgtttcgactgggatgggtttcctcgcaagagcgccgataccggctgtgtcattctgcccgcgggaggtgaaagatga

SEQ ID NO: 344540 - DNA, 1629 bp, Pseudomonas aeruginosa
atgaggcaggccgtggatctcggcggcggtcgccgctccgccctggggggcgtgctggccggcctgctgggaccggccttgctcgccttggcgttgttgctcttcctcctcgaaggctggaagccgatcgaacagatggatgatgcctacatctcctatcgctatgcgcagaacctggtgaacggccatggcctggtgttcaacgctggagagtgggtggaaggctataccaatctgtcctggaccctcatggtcgccgcggggatgtggctgggcatggacggaccccaggccgggcactggctggggctgttctgtgggctcgggctgctgtgggccagctaccgctatgcgcagctcgtcctgccgcgcggcggccactggttggcaggcgtggcgccgctgttgattctggcaagcaacagcttcgcctgctggagcctgtccggcctggaaacaccgctgttcgcctgggctgtgacggcagccctgcgtgcctatgcgctcgggcgcatggggccggtcgcggcctggtcgatctgcgccagccttacccgccccgaaggggctctgctggccggcgtgctgctgggctgggactggctgatgcgggtgcgtcagcgtcggccttgcgacctgaagggggtgttgcgtctctcaggaccggtgctggcctatgccatctatttcctcggccacctgctgttccgactccattattacggcgattatgttcccaataccttccatgccaaggtgggcggcattccattgagccggggcttcgactatctgtatggtttcctgaaagatggagcgggacttctcttgctccccgcgctatggggatggaggcgttttccggaggtgcgaatgggggttgcctatcttctggcgacctgcctgtacattcttctcgtggggggcgatgtgttttcccatggaagatttctgttgccggtattcccggtactggtcgtcgcggcactcgccggtgtctaccatgttgcccgacagcggcggatattcggctggttgttgggggcgacgctgccggcatcgatgctggtcgccttgtatatcggtgatggaagtgccgggagattgttagtcaatgccgtgcagagtacggatgcggcgcaatttccttactcggcgaagcgcgcccaggctcgcaatcataggttcatcttcactgcggagcatatgcggcagtggatgcagcgccttgctcggctccagccaccggtgcgcctggttgcggcgatcggtatcggccagccgggttatttcgccggggacatgcgcatcctcgacctggttggcctcaccgatcggcatatagccaagagcgagagaacgctgccgaacaccttgatcctgcccggccaccaccgtacggatgctccctacgcgttggcacgcaagcccgatgtgatcatgattccacgcaaggacgacccgaatattctgatcccgctaccggcgatgcgggatctatggaaccaaccggccctgcaagaggaatactactgggacgatgacctgggtacctatctgcgcaaacctgaactacgccgccgagcccagtcgccccgaggccatgctggcgaagccccgcctgcgtag

SEQ ID NO: 344541 - DNA, 1059 bp, Pseudomonas aeruginosa
atgctcggcatcacccgcttcatactggcgctcctggtgctgctttcacatgccaccggcagcaacttccacttcaatccaggagtagtcgcggtcatcgtcttctacttcaccagcggttatctgatgcagcgcagctatcgccgcttcgtcagccactccgctacgccagtccgcagtttctataccgatcgttttctcaagctctttccccagtacgggctggtcgtactggccagtttcgccgctatcgcctggctcggcccggcacagcatgtgctgttcatgaaccagccggccagcctggaaaaagtattgctcaacctggcgttgctgccggccaactacgtcttcgaaccattgatggtagaaagactgctgcctcatcccatcgtaccgccggcctggtcgctggccgcagaattccacttctatctgcttctacccacgatagcgttactgccgagaagggcgtttctcgccgtgctcgcggtgacgaccagcatccaggtaacggcgctgttcttcggcagcggccccttcaacagcgataacttcgggtatcggttcatttttggcgcgctgaccttcttcctcttcggctatgcccatgcccgccgcgaagagcccggctatgcctggatccctctcgcgctctggcttgtctatgccagcctgttgctggtcgtggcgccaacgtttggattgttcagccatcccttcgtcatggagttactgctgggcgccgtgctggcctggccattgctgtctgccgcgctaggagcccgtcctgacaacgtctggctgaagaaggctgacaacctgctcggccggctcgcctatccgatcttcatcagccatttcctggcattcttcttttgcgaaaaactgctcggtttcgaccagggccagcaaggcgcggcgatccccgccagcattgcgctgtcgctggggatatcctggctactgttgcgcctgcagacgtcgatcgatgcgtatcgcctacgcaggcggggcttcgccagcatggcctcggggcgactgggctcggcggcgtag

SEQ ID NO: 344542 - DNA, 1680 bp, Pseudomonas aeruginosa
atggccaccggttttctcgcggatcgacagcgccttctatggatcgttgtcctgtccctgctgcttctgaccctggtaacccagcgcaaccacaatacaaatagcgatcctcgcgccactctactggtcagccaggcactggttcagcatggcacgatccagctcgacagcctgggcgagccactactgcaaagttacgggtacgtcatccagcagaagaacggccactactaccactactttcccctcggcagcgccctgcttgccactccagtcgtggcaatcgccaacgccgctggagtggacatgcgccaacacgagcccaccatgcagatgatcatcgtggcgctctgcgctatcggtatactcctgctgctctatcgcaccgcccgcctctatctgggacgtgacgcaagcctggcgttgaccgccctcggctggttcggcagcgcctatgccagcacgctcggcaccgcgctctggtcccacgacctggcggtgctgttcgccagcctggccatctatcttgcgctcagggaaagaccgcttaccggcaagttcgctctgatcggcgcgtccctgttcctggcctatctctgccgaccgaccatggccctgctggctccagccctgctcgcctttctcatgaccaggagctggaaaacggcgatcgcagccgccctggtgcaaggcgggctattgatgcttttcgtgctctggagtttccatgagttcggtcaaccgttgccggactattacctgcccaagcgcctggaaggcacccagttcgcgactgccctctacggcaatctgttgagccccgcccgaggactgctggtctactcgccattcctgctgctgccgatcctgtgcctgccctttttgctctggaagcaaaagagaaacctgccgctactgatcctcgccctgggatggcccctgctgcactacctgacggtttcccgcttcccccattggtgggcaggctggtcgtatggctcccggctgatggtcgacgcgcttcccggtctactgctcggcactgccgtctgcctggcatcgctggaaaaatggcggcggccggccctcgccctgttcgccgtcctcgccgccttctctatcttcgttaatagctatcagggtctatacaatacctatgccctgcaatggaacgccgcaccgaacatcgacgagcatccggaactcctgttcgactggagctatccgccgttcctcaacacccagcatcgccagcaggagcggctggatcgcttccacctggcagtcatgccaccgctgcaaggcaaggtacgaatcacctatgatgaaccgaatgccggcttcgacggtttttccgtgatcgagaacggttttcgctggaccgaaggcaccgcgtcaacgttgagcttcaagctggaaaatgcctccacgctgtccggccggctttccctgcaggcaggctttctcggcagccagcgactggccgtttgcctgaacggcaccctcgttttcgaaggcgcctatcagggcggcgaacatgacatccgtatccaggtgccagccggcctcttgcatgacggcctgaaccgcctcgatttcgcacttcccgacgcccatccacccggtacggcggacacacgcatccttggaatggcattccacctcctagcggtggactga

SEQ ID NO: 344543 - DNA, 738 bp, Pseudomonas aeruginosa
atgaaaaagatcctgatcgtcggtgccacctctgccattgccgaagccaccgcccgtcgcttcgccgcccaaggggccacactgctgctcctggcccgtgatcgcgaacgcctgcaactgctggcaaccgatctggaagtacgcggtgctgccgcggtacataccctcggcttcgatgcggccacgaacaacgactacccggtcctggtgcactcctgcatcgagaccctcggcggcctcgaccaggtgctcatcgcccacggcacattgagcgaccagaaagcgtgcgagcagagcgtcgatctgaccttgcgcgaactgaccatcaacgccttcagcgtgatcgctctgctcaccgagctggccaagcatttcgaggcccagaattccggctgcatcgccgtgatcggctcggtggccggcgaccgcggccgccagtcgaactatgtctacggtaccgccaagggcgcgctgagcctgttcctccagggattacgaaaccggttcggcaagagcggcgtgcaggttctcaccatcaagcccggattcgtcgatacaccgatgactgcggcctttcccaaggggccattgtgggcaagcccggagaaggtcgccgcagatatcgagaaagcgatcgccaaaggccgcgatgtcctctatacaccaggcttctggcttccgatcatggtcatcatacggctgctgccagaacgtcttttcaagaagctgagcctctga

SEQ ID NO: 344544 - DNA, 1302 bp, Pseudomonas aeruginosa
atggaagtcttcggctggggacgctatccccgtatcgacgccaccctcgtgtcgccgcgtagcgtggacgaactgcgccgtcgcatccagctatcctccgggatcacccttcgcggccatgggaaaagctacggcgacagcgcccttggcgaatcgatcgccgatagccggaacctcgatcacctgcaatcgttcggagaacctaccggcgtacttcgttgcgaagcgggcaccaccctggccgacctggccgctaccttcctgccacgcggctggttccttccggtaacccccggcaccgctcatatctccgtcggcggagccatcgccagcgacgtccacggcaagaaccaccacctgcatggttgcttcagcgagttcgtcgactccttccgcctgctgatggccgatggcgacctgctgcactgttcgcgcaacgagcaccccgagctgttccatgcaacctgcggcggcatgggccttaccggtgcgctggtcgacgtcaccctgcgcttgaggcgcgtgcccagcgcctggatcgaccaggtcacctgcaaggcgaacaatctcgaggaagccttcgagctattcgagcagcaggcggctgccacctactcggtggcctggatagactgcctggcgaatggcgcctcacttggccgctcgctgctgatgttcggcgagcattcttcgcacggcgggctggaactgccgcccaggcgcgcgcttgcggttccgctggaaatgccatcggccctgctcaatcactattcggtgcgcgccttcaacagcctgtatttccagcgaattcgccagccccgcgtggaacagcgggtcgactaccgaagcttcttctatccgctggacggtatcggcgactggaacaggatgtacggccgcaacggcttcctgcaataccagttcgtcattcccgccagcgccggcctgcccggcatgagacgtatcctcgaacgtatagcggcctcgggccgtggttctttcctggcggtgctcaaggctttcggtgaaggtaacgaaaacccgctgtcgtttccgcagaagggctacaccctggccctggacttcaagatggatgcaagcctgttgcccctgctcgacgagttggaccgcatggtgctcgatcatggcggacgactgtatctggccaaggacgcgcgtatgagcgcagccaccttcaaacagagctatccccgctgggaaaacttccaggaaatccgggaacgctacggcgccctgggcaaattcacttccctccaggcccgccgcctgggtctggactga

SEQ ID NO: 344545 - DNA, 402 bp, Pseudomonas aeruginosa
atgaagctggccctgatctacacgttattggcggcgatcgcaacaatctgcaatatcggggcacaggagttgagcactcgtctgtatttcggcccttacgccatggccctctccatcatgatcggcactgccgttgggctgctggtcaagtatgcgctggacaagcgctacattttccgtttcaaagccaacaacctttcccacgacagccagaccttcctgctctatgcgctgatgggtgtattcaccaccgcaatattctgggggttcgaattcaccttcgaccacctcttcgacagcaaggaaatgcgctacctgggtggggtgataggcctcgccgtcggctacttcgccaagtacaagctcgaccggcgcttcgtcttcggcatggcggatacctga

SEQ ID NO: 344546 - DNA, 879 bp, Pseudomonas aeruginosa
atgcatactaccgtagagcggagctcctctctagcgcagctgaaggggctattggcgctaatgagacccaggcagtgggtcaagaatgctttcgtggttgcgccactgcttttttccggcgagttcctgcaggtcgacgcggtccttcatgccctggccgcggttctgctcttttgcctggcctcctccgctacctatatcgtcaacgatctgcacgatatcgagcgtgatcgcctgcacccgaagaaggcccttacccgcccgctcgcttcggggttggtgtcgcccctgcaggcgaagtatctgctggcgctcctgtaccttgcattgctcggcggcctgctgatcagtccgccggtgatcatggtgatcggcctgtacctgctgttgaacctggcctacaccttcttcctgaagcatcagccggtactggacatcttcactatcgccttggggttcgtattgcgtgtctatgccggggcggtggcgctagcggtaccggtgtcttcctggatgttcgtcaccacattgtgcctggcgctctatctggctgcggtcaagcgacgtcaggaactggccaggaacggcagccagagccgtgaagtcctgcagcactattcgctggcgttggttgatcgttatgcggaaatgtctgcaaccggggctttgctgttctacagtctgttcgtgatcactagtcgagaggaactggtggtgaccattccgctcgtgctgttcggtctgttccggtactggtatgtggtggaagccaaggagggtggtgagtcgccgaccgatgccctgttgtccgactggcagcttctggcgacagtggtcctctgggggctggcctgcgcctatgcgctctggccgcactga

SEQ ID NO: 344547 - DNA, 420 bp, Pseudomonas aeruginosa
atgaaggattactcctacctgatcactcctttcctggcctggctggtggctggcagttgcaagttcgtgatcaatagcctcaaggcaggaaaaccggctttcggccttatcggttatggtggcctgccaagcaaccacagcgccatcgtcggcagcatggccgctctcattgctctgcgggaaggtatcggccatccggctttcggcgtggccgtcacgctggccttcatcgtggtgctcgatgccaacagcctgcgacggcagatcggactgcaggcgcgggcgatcaacgagttgcgtgacagccgtgaaaagggcgcattgcgtgagcgcatggggcacagtcggacggagattctcgccggcctgctggtggggagtctggtggcctggctggtggtgctcgtgctgcccgtctag

SEQ ID NO: 344548 - DNA, 381 bp, Pseudomonas aeruginosa
atgcaggatcagctcgtgccaggcgacgtccaccacctgggacggcatcgcgaccatccgcttgccggccaggcgacacagcagcaggtattcgcgcaggccgtggaggacgcgctggacctgttcctcggcaaggtgcggatagcgttcgcgaaccgcctgggcgacccgtggcggcaggcgcagctgccggatgaaacgcaggcgccggcggtccaggccgcgacggtagaaatagccgccggcgagcgcggcgccggccagcagggtgatgccgaggatagccatggattacgtccctgtcgggccccgcctggcgcggcggggcgtcattgctccagcagcgcctggttcagcgccgtttccaggacgcttttatag

SEQ ID NO: 344549 - DNA, 2835 bp, Pseudomonas aeruginosa
atgaaccgacagcccgccctcagcctcgacctcgacgacggtatcgaccgcaaggtcctcggccagctgcgccaacgcttcctggcgatcactgccggccgcctggagcgtgcccggcaggccctgtccgctcgccaggagcgggtcctgcgcctgctgccgctgctgttccacatcaaccatccgctgctgccgggctacctttcggcgaccgtgccggctggcctgagcggcttcgagccggacccacaggcgctcgccgaagcccagcgcctagcccgttcgttctgctacaagccgcgacgacaggacgccggacagcagccgatccatggcctgttcctgatgggcagcctgggcagcctggcccaggaggaacagagcgacctcgacctctgggtctgccacgccgccgacctcgacgccgccgcacgccgggaactgcgccgcaaatgcgccctgatcgaggactgggcccgcgcccagggctgcgaggcgcactgcttcctgatcgacgtcgaacgcttcggccggggcgaggacgactgcggcaatacccagcacttcctgttgctcgacgagttctaccgcagcgcgatctggctcggcggacgcacccccttgtggtggctggtgccaccggcccatgaacagcgctacgacgagtactgccgcgccctgctcggcaagcgcttcgtccgcgccgaagaagttctcgaccttggccatctcgcacggattcccgcgcgggagttcatcgccgccgggctctggcagttgtccaaggccatcgactcgccctacaaatcgctgctcaagctgctgctcaccgaggcctacgccagcgagcacccgcgggtcggctgcgtcgccctgcgcttcaaggagcaggtattcgccggccagctcgatctcgacgcgctggatccctatgtcctggtctaccgccatctcgaacgctacctgcaggaacgacaggcgcctgagcgcctggaactggtgcgacgctgcctgtacctcaaggtcggacgcaagctcggcggtcgccagcgccaggcgcgacaggactggcaattgcagtcgatggagcgcctcgccgcggaatggcagtggcaacctcgacgcttcgccctgctcgacagccgcagccaatggaagatgcgccaggtactggaggagcgtcgctgcgtggtcaacgagctgacctacagctatcgcctgctcttccagttcgcccgtcggcagggtgccgacagcggcatcgacagccgcgacctcggcctgctcggccggcgcctgtatgccgccttcgagcgcaaggccggcaaggtggagcacatcaacccgggaatcgcgccggacctgggcgaagacgtgctgacgctggttcagcgccccgccgggagcgaccacgcgccaccgcattgggcgatctatcccggcgccctgggcgtgcgcgaatggcccgactacgcgccgctgcaacgcgccggccggctggtcgaactgctcgcctggtgccatcgcaacggcgtcatcgacagtgccacccgcctctccctgcacccgggacagagcgacctcggcgaacccgagctgagcagcatcctcgccagcctgcggcagttcctgccgctgccgctggcctccgtcgacgacgccgagctgctccagccacggcgatcgaagagggtcctgctgctggtcaacgtcggtatcgacccgctgcgccaccacagccagatgaacctgcacatggccaccgggcggaccgacgtgctcggctacgccggcgtgcgcgacaacctggtgctgaccctcgacctgctcggcctgaacagctggaacgagctgacggtgcgtcattacgaaggcccccaggcactgcccgaatgtctcgccgacttcctcgacgcggtgcgcgagaagcccggcgcgccgccgcgaccgcccgatctggcggtgcgctgcttctgccgcaaccgggccgaggccatcgcccagcgggtcgaggcgctgttccgggaaacctacggattgctgctcggcggccagccgagccgctacctgctacaggtccgccagcactaccacctgctggagctgtccccggagtcggtcagtcacgccagcctgcccgacctgcccagcctgctccagcacctgggccgcgagcgcggcgcctacagcgccctgaagctggatcgccacgcgctggaaggcgaggatctcgggccgatcctgtccatgggtcgcccgggctgcatccaggtgttctaccggcgcgatttcgacagcgcggaaatcatcctgctggacgaacgcaactcgctctggcgccagcgccaggcgctgcgcgacgaacgcagcctgctcgcgccgttgcagcgcttcctgcagtcgctgctctaccggcgcagcgccctgtcgctggcgggaccgacaccggcaagcctggacatccactattacgaggtgctcgccggcgctggcgcgctcgcacgcatcgaaccccgcgaggctcccgaggccccggccagccatccgctgtacgagatccaggccgtgctggagcgcggcgaacgcaagcgcgtgcaggtcacgctgtactgcgaccaccgcgagttctccgaactggaatacggcgccggcctgtaccgcaccgtggcccggcatatcctcgcgcaccgggcgcaagccgagccctacccctgctacctgaccgacctcgacctgtcgcggctgttcgccgacgaacagccgcagacgctccactatctgcgctataaaagcgtcctggaaacggcgctgaaccaggcgctgctggagcaatga

SEQ ID NO: 344550 - DNA, 942 bp, Pseudomonas aeruginosa
atgtcgtcccgcgaaatccgcatcgccacccgccagagcgccctcgccttgtggcaggccgaatacgtcaaggcgcgcctggaacaggcccatcccgacctgaccgtcaccctgctgccgatgaccagtcgcggcgacaagctgctcgacgcgccgctggcgaagatcggcggcaagggcctgttcgtcaaggagctggagaccgccctgctcgagggcgccgccgacatcgcggtgcactcgatgaaggacgtgccgatggacttccccgaaggccttggcctctacaccatctgcgagcgcgaagacccgcgtgacgccttcgtctcgaacacctacgcgagcctcgaccaactgcccgccggcagcgtggtcggcacctccagcctgcgccgccaggcgcaactgctggcgcgccggccggacctgcagatccgcttcctgcgtggcaacgtcaacacccgcctggccaagctggatgccggcgagtacgacgcgatcatcctcgccgccgccggcctgatccgcctcggcttcgagtcgcgcatccgttcctcgatcagcgtcgacgacagcctgcccgctggcggccagggcgcggtcggcatcgagtgccgcaccgccgacgccgacctgcacgccctgctggcgcctctgcaccacgccgatacggcgctgcgggtcactgccgagcgcgcgctgaacaagcgcctcaacggtggctgccaggtgccgatcgcctgctacgcgattcgcgagggcgaccaactgtggctgcgcggcctggtcggccagcccgacggcagccagttgctgcgggccgaagggcgggcgcccctggcgcaggccgaggcgctgggcgtacaggtggccgacgacctcctggcgcagggcgccgaggcgatcctcgcagcggtctacggcgaggctgggcatccgtga

SEQ ID NO: 344551 - DNA, 756 bp, Pseudomonas aeruginosa
gtgagcgcctggcggctcctgctgacgcgtcccgaagaggaatgcgcggcgctggccgccaccctcggcgaggcgggagtccactgcagcagcctgccgctgctggcgatcgatccgctggaagagacgccggagcagcgcgcgctgatgctcgacctggatcgctactgcgcggtgctggtggtcagcaagccggccgcgcgccttggcctggagcggctcgaccgctactggccgcaacccccgcagcaggcctggttcagcgtcggcgcggcgaccgcggcgatcctcgaggactacggcctctgcgtaacctatcctgagcagggcgacgacagcgaagcgctgctggcgctgtcggcgttccaggactccctgcgcgtgcatgatccgaaagtgctgatcatgcgcggcgaaggtggccgagaatttctcgccgagcgcctgcgcggccaaggcgtgcaggtggactacctgccactctaccggcgccgggctccggaatatcctcccggggagccgctggcaagggtgcgggcggaacgcctgaacggcctggtggtcagcagtggacagggtttgcaaaatctgtatcagttggcggcagccgattggcccgagatctgccggttgccgctgttcgtgcccagcccgcgggtcgccgaaatggcgcgcgaactgggcgcgcaacgggtgattgattgccggggcgcgagcgcgccggccttgctggcggccctgacgagcgccgcctag

SEQ ID NO: 344552 - DNA, 492 bp, Pseudomonas aeruginosa
atgctcctggccagcccccgcctgcttttccttctcgcgttcctggcctgtgtcgccctcatgggcggggcgctgtacctggaacacgcggtgggcctggaaccttgcccgctatgcatcgtgcagcggatcttcctggtcctcatcggcctcgtctgcctcgccggcgcgatccatgggccggcccggggcggacgacgcatctattccgtgctggtattcctgctcgccctccttggcggtgcgaccgccgcccgtcaggtatggttgcagacggtgccgctggagcagttgccggcctgcctgccgagccttgactacatgatggaggcgctgccgttccaggagatcgtccgcctggttctgcatggcaccgccgactgtgccgaggtcagttggacgctgttcaccctgagtcttccggagtggagcctgctggccttcgtcgcctatctcggcttctccatcatgcagttcctgcgccgcgcctga

SEQ ID NO: 344553 - DNA, 630 bp, Pseudomonas aeruginosa
atgccgcaccgcctcctcatcgccctgctgctattgccgctgccgcttttcgccgccccgcccagggatgagctggcctatgccgtaggcgctcggctgggcacccgactgctgcaggaaatgcccgggctggagcttgccgagctgctcaggggactggaacgggcctatcgcgcagaggagctcgagctgccgcccgagcgtatcgaacggctgctggcgcaacaggacaactccacgccggcgcgagcgcccaccacgcccgtcgaagcgcgcttcctggccaacgaaaaagcccgcttcggcgtccgcgaactgaccggcggcgtgctcgtcagcgaactgcgccgcgcccagggcatgggcatcggcagcgcaacccaggtacaggtccgctatcgcggcctgcttgctggcggccaggtgttcgatgaaagcgagcgagccgagtggttcgccctggacagcgtgatcgaaggatggcgcacagcgttgcggacgatgcccatcggtgcgcgttggcgagtggtgattccctcggcgcaggcctatgggcacgaaggcgccggcgacttgatcccggcagacgccccgctggtcttcgagatcgaactgctgggcgcccactga

SEQ ID NO: 344554 - DNA, 1989 bp, Pseudomonas aeruginosa
atgtcgggccttgcctatcgacgggatatcgatggattgcgagcgctggccatcctgccggtggttctctaccacttcggcctgggtggcatcaccggcggttacgtcggcgtcgacgtgttcctggtgatatccggctacctgatcacctcgatcatctcgcgcgagcagcaggtcgggcggttcagcttcgtcgatttctgggcacggcgggcgcggcgcatcctccccgcgctgttcgtgatgatggcggcgagcctggtggtcggctggttcctcatggctccacgggactacgaggaactggggcgctcggtgcgctaccagacgatgttcgtctcgaacatcctgttctggaaacaggacggctatttcgatgcagcctccgaattcaagccgctgctgcacacctggtcgctgtcggtggaggagcagttctatatcctcttcccgctgctactcgcggcgatctccgggcgcctgctgcgctggcgcctggcgatcctcctcggcgtgctgtcgctgtcgctggcggccagtatctgggccctgggccagcgcccgagcagcgccttcttcctgctgccgatgcgcgcctgggagctgctggtgggcgccgcgctggcgttgctgccggctagccagcggcgtttctcgccgtggagcctgcaactggcggcgtccctcggcgtggcggcgatcctcctgccggtgttcctctacgacagccatactctgttccccggcctcgcggcgttgccgcctgtgctcggtaccgccctgctgatctgggccaacggcgccggcgagacctggacccggcgcctgctggggctgccgccactggtctggttcggcctgatctcctattcgctgtacctctggcactggccggtctatgtctttgcccagtatcacgccctggatgtcctgggccagccgatgcggctgggcttgctgctggcgagcatcgggctggcggcgctgtcgctgcgttatgtcgaggcgccgttccgcgagcgcaggctgttcgccggacgccggcagatgctcggcgcggcgctgtgcggcctgctgctgctgggcgccgccggccaactggtacggcaccatgacggggtgccgtcgcgtctctcggagcaggccctgcgctatgccaaggcgtccaaatggcgggatgggcagaccgactgcatgttcgacaagcaggcactcggccaggacacgatttgccgcttcccggcccggatgtccgccgagcgaccgttgctgatcagttggggcgacagtcattccgcggccttgagtccgctgttgcatgaggtggcggccggtcgccggttgccgatatggcaggcttcgctggccggctgcccgccgctgctgggcatgcgggaaaaggacaattgcctgcgcttcaaccagcagatgctcgacttcgtcgagaaacagcggccggtcggggtgatcctcgccggacgctgggacatgtacatctatggtgactcgcaggacggtgcgcgccatatgctgcgcgagccggacgacgcgccggacagctcgatcgccgaggcgctgctgcgccagcgcctgagcgggatgatcgacaggctgaacgccgccgggacgcatgtctggctggtcaaggatgtcccgctgctgccgttcaaggcgccggcgcggctggtgcggctgagcctgagcggggaggacgtcgggcaggcgcgcttcccgttcgtcgagcatgccgctcgcgtcgcctacatcggcgcgctgttcgacgcgctggccgagagcaaccccaaggtcagcgtgctcgatcccgcgagcgtgctctgcgacggccaggactgtttcgccgaacgtggtggctggtcgctgtacatggacaacaatcatctctccggccatggcgcccgcgcgctcgcaccgttgttcgagccggtgttccaggacctggacgcgtcgcgcgtcgccagccagcactga

SEQ ID NO: 344555 - DNA, 3003 bp, Pseudomonas aeruginosa
atgattcgaggctttgttcttttcgaaacggtgaaaacagattttcgccgtcgctgtttcctcattcgatatccgttcggcgacgatcgctggcagggcgatgccgcccccaacgagagcgaagccatgtcgcagacgccgtccctcgcccagctccagcccgccgatgccttcctgcgccgccatctcggccccgatccggcggagcagcaggccatgctggatttcctcggggtttccactcgcgccgagctgatcgtgcagacggtgccgccggcgatccgcctcaaccgcccgctggaactgcccgccgcgctcgacgaacaggccgccctggcgcgcctgcgcagctatgccgaactcaaccagcgctggaccagcctgatcggcatgggctaccacggcaccgtgacgccgccggtgatcctgcgcaatgtgctggagaatcccggctggtacaccgcctatacgccctaccagccggaaatcgcccagggccgcctggaggcgctgctgaacttccagcagttgaccatcgacctcaccggcctcgatctggccagcgcctcgttgctcgacgaagccaccgccgccgccgaggccatggccctggccaggcgggtggcgaaggccaggagcaaccgtttcttcgtcgacgcgcattgtcatccgcagactgtctcggtactgcgcacccgcgccgaggcgttcggcttcgagctggtcatcgacgagccggacaacctggccacccatgccgtgttcggcgccctgttgcagtacccggacagccgcggcgagatccgcgacctgcgcccgctgatcgacctgctgcacggccagcaggcgctggcctgcgtcgccagcgacctgctcgccctgctgctgctgaccccgccgggcgagctcggcgccgacgtggtgctcggcagcgcccagcgcttcggcgtgccgatgggctacggcgggccccacgcggcattcttcgccacccgtgacgcgtacaagcgggcgatgccggggcggatcatcggtgtctcccgcgacgcgcgcggcaacccggcactgcgcatggccctgcagacccgcgagcagcacatccgccgggaaaaggccaactcgaacatctgcaccgcccaggtgctgctggccaacatcgcctcgctctacgccgtctaccatgggccgcaggagttgaaacgcatcgcccagcgcgtccagcgcctggccgcgctgctggcggcgggactggagagcaaggggttgcggcggctcaaccggtatttcttcgacaccctgacctacgaggtcggcgagcggcagccggcgatcctcgaacgggcgcgggcggcgcgggtcaacctgcgcgtggtcgacgaccggcggctggcgctgagcctcgacgaaacctgtgacgcggcgaccctggcgagcctgttcgagatcttcctcggcgccggacacggactggaggtggagcgcctggatgccggcgtggtggccgacggcattcccgccgtgctgcaacgcacttcggcctacctgcagcatccggtgttcaatgcccatcacagcgagaccgagatgctccgctatctgcgccagctggaaggcaaggacctggcgctgaaccaggcgatgatcccgctcggctcctgcaccatgaagctcaacgccagcagcgagatgatccccatcacctggccggaattcgccgaactgcatccgttcgtgccgcgcgagcaggccgagggctatcgccggatgatcgacgaactggaagcctggctgcgggcgatcaccggcttcgacgcgatctgcatgcagcccaactccggggcccagggcgaatatgccgggctcctggcgatccgccgctaccaccagagccgtggcgacagccagcgcgacatctgcctgatccccgcctcggcgcatggcaccaacccggcctcggcgatcatggccggcatgcgggtggagatcgtcgagtgcgacgtgcgtggcaacgtcgatctcgacgacctgcgcctcaaggcggccgaggcgggcgagcggctgtcctgcctgatgatcacctacccctcgacccatggcgtctacgaggaaggcatcggcgagatctgcgaagtggtccaccgccacggcggccaggtctacatggacggcgccaacctcaatgcccaggtcggcctggcgcggccggcggatatcggcgccgacgtctcgcacatgaacctgcacaagaccttctgcattccccacggcggcggtgggccgggcatggggccgatcggggtgaagcggcacctggcgccgttcgtcgccaatcacccggtgatccgcgtcgaagggccggatccgctgaacgatgcggtcagcgcggcgccctggggcagcgccagcatcctgccgatcagctggatgtacatcgccatgatgggcccgcagctggccgacgccagcgaggtggcgatcctctccgccaactacctggcgaaccgcctggacggcgccttccccgtgctctatcgcgggcgcaacgagcgtgtcgcccacgaatgcatcctcgacctgcggccactcaaggcgcagaccgggatcaccgaggaggatgtggccaagcgcctgatggactacggcttccacgccccgaccatgtccttcccggtgccgggcacgctgatggtggagccgaccgagagcgagtcgaaggcggagctggatcgtttcgtcgaggcgatgctgagcatcagggccgagatcggcaaggtggagagcggcgactggccagcggaggacaacccgctgaagcgggcgccgcataccctggccgacgtcaccggggtctggcagcggccctacgagatcgccgaggcggtgaccccgagcgcgcatacgcgggcgttcaagtactggccggcggtgaaccgggtggacaatgtctacggcgatcgcaacctgttctgcgcctgcgcgccgctggaggactaccgcgagtga

SEQ ID NO: 344556 - DNA, 351 bp, Pseudomonas aeruginosa
atgaacaggatgggccgactggctttgttcagtcttcttgtaggaatttccagtaatcttttcgccgacagcatcagtggggtcatctacttcacgggtgccatcgtcgagccaccgtgctcgatgaacgcctcgcagcagggcgagtcgcgaggtagcttccgcctcagcggttgccccatgcatgcgcgtaccgctgacgtcagcatccgctccatgcgcaccggcgaggtgcgcagcctgcagcccagcggcctgagcctgggcggccgggatttctcggcgcgctacgacctggccgccagttaccgccgtccgggcagctacctggtgactgtcagctatccctga

SEQ ID NO: 344557 - DNA, 558 bp, Pseudomonas aeruginosa
atgcgcccgtcgttcgccagctggggcctgctagccgccctgctcctgcccggcccgctgctccaggcccagccgctgtccccggccctgcagcaattgctcagcctgagcagccagcgtttgcaactagccgatcaggtagccctgagcaaggcgcagtcgggcaaggcggtgcaggacagcccgcgcgaggagcagcagctgcagatgctcgccggtcaggccgctggccatggggtcgacgcggagcaggtgcgcctgctgttcgccgcgcagatcgaggcgaacaagctggtccagtatcgcctgctcagccggccgctgcccggggcgggccaggtgatcgatctggagcccatccgcgagcgcctcaaccagctcaacctggaactgttgcagggctatgcgccggcgctcgccgaactgcgcggcgacgattgccggccgcgactcgaccaggcgctgcagcggcagattcgcgaagaccgcctggacgacctgcacgccatcgccctgtcacgggcggcgggcgacatctgtcactgggcctcgccctga

SEQ ID NO: 344558 - DNA, 1107 bp, Pseudomonas aeruginosa
atgaacgatatcgacgtactggtgatcggcgccggagtcctcggcctggcctgcgccgcgcgcctggccgaagccggccacggtgtactggtggcggagcgcgaacgcctggccggcagccacacctccagccgcaactccgaagtcatccacgcgggcctctattacccacccggctcgctcaaggccgaactctgcgtcgagggccgcgaacgcctgtatgcctggtgcgcgcgccacggcgtcggccaccggcgcatcggcaagctgctggtggcggtggcggacggcgagcgggaaaagctccaggccctgcatgacaatgcccgtgcctgcggggtcgacgacctgtcgccattggacggcgccggtctgcgtggactggaaccgcaggtccgtggcgtagccgcgctgttctcgccgagcaccgggatcatcgacagccatgccttcctgcagtccctgcaggccgccgccgagcgccgaggcgcacagctggcgctggacacccgggtcgactgcctggagcgtcgcgacggcggctggcacgccgaaggccggagcgtcggcgaacccttccagttgcgcgcgggctgggtgatcaatgccggcggcctgttcgcccaggaactggcgcaacgcaccgaaggcctcgacccagccctggtgcccaccctgcacctgtgccggggccgctacttctcctacagcggccgctcgccgttccgccacctggtctacccgatgcccgaggctcgcaccgccggcctcggcatccacgccaccctcgacctcggcggccagctgcgcttcggtcccgacgtcgattacctcgagcgggtcgactaccgcgtcgacgaatccctgcgccagcccttcgcccaggccatctcgcgctatttccccggcctcgacccacgccgcctggtggccggctacgccggtatccggcccaagctcggcgggcccggggaacccgccgccgacttcgtcctccaaacccctgccgagcacggcctgcccggcctggtcaacctgttcggcatcgagtcgccgggcctcaccgccagcctggcgctcgccgagcgggtcgcgcgggcgctctga

SEQ ID NO: 344559 - DNA, 378 bp, Pseudomonas aeruginosa
gtgttgctcgggctgttgttcgggctgatgctgggcaggctgttcggccccggctcgctgccggaggctgtgccgcaattgctggcggtggagcagagtgatgaaggcctgctcctacgcttcgaccgccaggccgcgatcacggcggcgcgggtggagggtgccctgaccttgcgtatcgccgcccgcggcgtgacgcagcagggcgacgggcgctggcagggccagccgctgcgttggcgtatccgcgaagaggggaagatgctgctgctgagcctggtctcgacccgccccctggaggggcgctggcaatggtcggagagcgggggggactggcgcctggccgtcgaactgcaggggctcgacggccgggaataa

SEQ ID NO: 344560 - DNA, 1395 bp, Pseudomonas aeruginosa
atgacgcgctccatcctgtatcgaaccgccagcctgttcctgctgggcgcctggcttgccggaccgtcttcggcgaaggaagcgccggaggacttcagccacctggtgccgctggccctgcaaggcgagggcccctggtaccgcctgagcgtgccgatgagcgtgcagttgtcggcggcccacgccgacctgcgcgacctgcgcgttttcgacggcgagggagcggccctgccctacgccctggtggccggcagcgagcgacaagccagcacgccgcaccaggccgaggtacgcctgttccccttgcgcggctcatcggccagcgatgcggcgcaaccgaatctgcgggtgcagcgcaataccagcggcaccatcgtcgaagtgctgccggccagcacggagccggcaggcgagaccctgcgcggctggctggtcgacgcgagtgcggtgaagtttcccctggagcgcctgcaactggactggaacagcccggaggagggcttccagcgcttctccgtggaagccagcgacgatctcgagcgctggcaagcctggggcgacgggcagatcgcccggctgaccttcaatggcgagcgcatcgacgtcagcgaggtccggctgcccgctcggcaggcccgctacctgcgtcttttgtggcccgccgacgcgaccgcggtggagctcaggagcgcgcgcgtgcacggcagcacccggaccaccgagccggccccgatgctctggtccgagccgctgcccgggcgccaggagaaggacggcgagtaccgctggcaattgccgctggcgctgccggtgcagcgggtgcgggtgtctctggagcaggcgcaggcccataccatcgcgccggtggagctgtccggccgggggcacgcggagaaggcatcgtcacgccgggagattgcctggaactctcttgcacgtggcgttctgtaccgtctgccgatcgatggtcggagcgtgcaggaaaacgagctggagctgccgggctggccggtgcgcgaactgcgtctgcgcgtggatccgcgcggcaccggccttggtgcggcggcaccgggcctgagcgtcggcctgccggccagtgaactggtattcctggtgcgcggcagtcctccgtaccgcctggcgtacggcaaggccgccgcgcagtcggccgcgctgccgctcggcgtgctgattcccggctacaccgagagcaagcgtggcaccctgggtagcgccagcctggccgccgcgctggaggtcgctgcgccggtagccgtaccggaggcgggaaccgactggaagaagatcggcctgtgggcggtacttctgctcggggtcggtctgctggtaataatggcaatgagcctgctgcgctcgccaccgaaccgctcatga

SEQ ID NO: 344561 - DNA, 591 bp, Pseudomonas aeruginosa
atgagcgaattccgcatcctgcgcgccgtcgactacccgagaatgccgtggaagaacggcgccggttccaccgaggagatcgcccgcgacggcggtgacggcctggacggcttcggctggcgcctgtcgatcgccgatgtcggcgaatccggtggtttctcccgtttcgccggctaccagcggatcatcagcgtgctgcagggcggcggcatgcgcctgcgggtggatggggcggacaccccggcgctgcgcgagcgccagcccttcgctttctccggcgacagcgaggtgcattgcaccctgctcgatggggctatccgcgacttcaacctgatctactccccgcagcgctaccgggcgcgcctgcaatggctgcgggtggaggaggctctggactggcacggctcggcgagcaccgtgttgctgttcgcccagcagggcgaggtcgcggtttccctgcaaggccagtcctgtggccggctgggcgtccacgactgcctgcaggccgaagggctcgagggcttgcagcactggcgcctggcggcgcacgaggcggcctgggtctgtgcggtggagctcgaagcgcggtaa

SEQ ID NO: 344562 - DNA, 1023 bp, Pseudomonas aeruginosa
gtgcacgcgctgctgctggccaggctctggctgtacctgctgggtgtcgcctatccggcgctcggcctgagcatgctgcgttcgttcacgaacaccggccggccgccgagccggcgcagtggcgatttcctcctgcccggctatggtcgtctatggcggcgccacggttggcggccggtggatgcgccggcgcatcccgagcactggcggcaggtggagcaggcgatgatcgataccccggtggtggcggcgctggacatgtatgtcgagccggactgcgtcaggcaggccggtcgcggtttcatcgacgaagtctgccggcgcctgggcgtacgccgttgcgcgccggccgccgccgagctggcggtgcagtggcggcagccgaacctgctgttcgcgcaggcctgcggctatccgctggtgacccagttgcagggccaggtggcggtgctcgcggtgcccagctacgacctggcggactgcgcgccgggtgaacattgcagcctgttcgtcgccgccgagggcgaggcgcggcggcgtctcgacgagttccgcgacacccgcctggcgctgaacgggcacgattccaacagtggcatgaacctgctgcgccacgcgctggcgccgctgggacgcgatgccgcgttcttcgccgaggtgcggatcagtggcggtcacgtgcgcagcctggccatggtcgcggcgggggaggccgagctgacctcggtggacgcgctgaccttcgcctacctgcaacgtcacgccccggaacgcctggccgggctgcgcgtgctcggacgcagcgcgccgagcccggccctgccgctgatcacttcgctacgctggagcgcgacgcaacgccgcgagctgttcgaggcgctgaacctgaccctggtcgactgcccggaactggcccggaccctggcgctgaaatccttcctcccggctggcgaggaacattaccggatcctcctcgactacgagcggcaggcagagggctggggctacccacatttgcgctga

SEQ ID NO: 344563 - DNA, 1092 bp, Pseudomonas aeruginosa
atgaaccgttcccctgcgttgcgccctgtcgccagcgttcgttcgcattccatcggcggttgccgcgtcctgctcggcgccgtcctgctgtcgctcgctgccgtggcgccgctacgcgccgccgacgggctggtggtggtcggctacggcggcgccggacagaaggcccaggacgtggcgttcttccagccgttcagccagcagaccgggattcccctggtgcaaagcgagtacaacggcgaaatggcccggatcaaggtgatggccgacaccggccacgccgactgggacctggtccaggtcgaggggccggacctggcgcgcggttgcgacgacggcctgttcgagcgcctggactgggcggccatcagcggcgaggagcgcttgatcgccaatgccgcccaggattgcggctcggccgccctggtctggggcgtggcgatcggctacgacgccgaccggctgaaacagccgccggcctcctgggccgacttctgggacgtgcagcgtttccccggcaagcgtggcctgcgcaagcgggcgatctacaacctggaattcgccctgctcgccgacggcgtaccgcgcgagcaggtctacccgacgctggcgacccgcgccggggtcgagcgtgccttcgccaagctgggccagctcaagccctacatccagtggtgggaggcgggagcgcagccgacacagtggctggccgcaggcgacgtggtgatgacctccacctacaccgggcgcatcgccgacgcccaccgcgcggggcgtaacctggcgctggtgtggccgggcagcctgtacggcatggattactgggcggtggtcaagggctcgaaacgggtcgccgaggcgcgccgcttcatcgccttcgccaattccccggaggcccaggtgcgttacgtcgagaacattccctacgggccgaccaatcgccaggccgcccagcgcctgcctgcgcgcctggcgagctgggtgccgaccgcgccggcgaacctggagcagggtctggcgatggacgacgaattctgggtcgagcacggcgaagagctggaggagcgtttcaacgcctgggccagccagtga

SEQ ID NO: 344564 - DNA, 1728 bp, Pseudomonas aeruginosa
gtggaaaaccgcggcgccgggatcgaggtgcaattgggcgccaaggtggacacacaatcggcccagggcaggaccggcacctggaaagtcgccgccaacgccctggacgtcgccagcacctcggcgcccaaggtatctggcgtgctgagcgataccctggcgaacaacctgcagaccaccaacatcgagctgaccagcacccagggagatatcaaggtcgacgcaccgctctcctggaacagcggcaacaagctgggcctgagcgccgagcgcggcaacgtcgaggtgaacggcaacctgcgcgccagcggcgacaaggccgaactggcgctgaacgcgcgcgaccaggtacgcctgaacgccgacctgtccctcaccgggcgcaacgccaggctggagctgaacagcggcaaaggccacaagctcgccgacggcgtgcgcgtgaccctttccggcgccggcgccggctaccgcgccaacggcgaggattaccgggtgatccagaacctcgcgcagctgcgcgagatcgacgagaagatgggcggtcgctacgtgctcggcaatcgaatcgatggtggcaacacccgcttcgaaaccctcggcaaccgtcccaacgaggtcttcggcggcgacttcgacggcctgggcaacagcatcgccaacctggtcctctacagcaccaccaacacggtaggtttgttcaacatgaacttcggccgtatcgccaatctctccctcgaaggaatgacggtcagcgccacccatccctccaacatagcggcgggcactctcgccgcggtcaacctggggaccatcgacaatgtgaaggtccgtaacagcaagatcagcagcggcaagcagcacaacagcgtcggcggcctggtcgcgcggaacctcggcagcattcacaacagttccttccagggtcgtatcaccggcaaccacaacaccgatgtgatgggcggactggtcggatacaacggcagcaatgccctgatcgccaacagttcggccgatgccgtgctggatgggcagatgctgaaagccagcgccggcgcgctggcaggcatcaatgccggcggaaccctgcgcgacagcagggcgcgtggcagcataaacctatccggcgatcgccttaacatcggcgggctgatcggacataaccagggaggcacgctgcacaatctcgactccgctgtagatgtcactgccagggggagcgaaagcatggtgggagggctggtcggctacaaccagggcggccagttgagcgctctttcggttaccggtaacgtcactggcggtagtgcgagcaagatcggcgggctgatcggcgaaagccaggacgctttgatcgtcggtgcccaggcgcagggcaaggtaacggggggcgagcagagcacggtgggcgggctgatcggtcgccacgccagcggcagagtggaacacgcctctgccagtggcgatgtcacaacgggtcttgacggtgtagcggccggcctgatcggctggaacatcggtgacgtcagcgacacctccgccaccgggaatgtctccagcgaccatggcactgtcatcgcaggcctggtgggctggaacctgggctcggttagccattcgttcaccagcggcagggtcgatacaagcgccaccgtctccggaaaactgatcggcctgaaccggggcctgcagttcgacaaccatgtcggagaacaagccccctggtaa

SEQ ID NO: 344565 - DNA, 1092 bp, Pseudomonas aeruginosa
atgcctcgctacctggggctgatgtccggcaccagcatggacgggatggacatcgtcctgatcgagcaaggtgatcgcaccaccttgctcgcttcccactacctgcccatgcccgccgacctgcgcgaggacatcctcgcgctctgcgcaccgggtcctgacgagatcgcccgggccgccgatgtcgagcggcgctgggtcggcctggcggcacatggtgtcggcgaactgctgcgacagcagcgactggctcctggcgaggtccgcgccatcggcagccacgggcagaccattcgccatgaacccgcccggcacttcaccgtgcagatcggcaatcccgccctgctggcggaactgaccggcatcgatgtcatcgccgacttccgccgccgcgacgtcgccgccggcggccagggcgcgccgctggtgccagccttccaccaggcgctgttcggggaatcaggcaaggccagggcgatcctgaacatcggcggcttcagtaacgtttcgctgctcgctcccggaaaaccggtgcgcggtttcgactgcggaccgggcaatgtcctcatggacgcctggatccacttccggcgctgcgagcatttcgaccgcgacggtgcctgggccgccagcgggcgggtgaacgacgatctgctggcaaccctgctggcggacgagttcttcgccacccgggggcccaagagcaccgggcgggaacgtttcaatctggcctggctgcaggaacgtctggccgatcatcccatccttcccgccgaggacgtccaggcgaccttgctggaactaagcgcccgcagcatcagcgagtcgctgctggacgcccagccggagtgcgaggaagtgctggtatgcggcggtggcgccttcaatgcggcgctgatggcacgtctcgccgcgctgatgcccgcggcacggatcgccagtaccgacgcatacggcattccccccgcctggatggagggcatggcattcgcctggctcgcccatcgcttcctcgagcgcctgcccggcaattgcccggacgtcacaggcgctgcggggccgagggtcctcggcgcgctctatcccgcctga

SEQ ID NO: 344566 - DNA, 363 bp, Pseudomonas aeruginosa
gtgagccggcttggcctgcgcctgctggcgctgtctctggtgctgctggtgggcgcgttgctcggtggcggcgtgaccgcccgccattaccgcccgcaactggacgatgcgcagcgccaactggctgccacgcgtaccgccagtgaccagttgcagatgctgctggacgagcagcagcgtaccctgtcggcgctgcggacgagcgccgaggtgcgtgcgaaggaggccacgcaggccctcgacgacgcccgggcgcaggccgcggagcaatatgccgcggcggtccgcctgctgcaggcgcgcgacgcgggggaagactgccaggcggcgcgtgcggcgatcgaccgggagctggggctatga

SEQ ID NO: 344567 - DNA, 996 bp, Pseudomonas aeruginosa
gtgcaaccgagttttcgtatcgtcgccgacggcaccgatatcaccgcgcggctgaatgaccgcctgctcaggctgaccttgctggacaagcctggcatggagtcagacaccctgaccctgaggatcgacgaccgcgacggcctggtggcgttgcctcggcgcggcgcggtgctggaggtctacctggggtacgccggcgaagcgctgatgcgcatgggccgctacaccgtggataccctgcggtggtccggtccgccggataccctgaacatcaccgccaaggccggcgacatgcgcggcagcggcaagagcacgcgcagcggcggctgggagaacaccagcctggcgcaggtctgtcgcgatgtcggcgcgcgcaatggctggcgggtggagtgcccgttgcaggtggcgatctcccgggtcgaccagatcaacgagtccgactaccacttcgtcacccgcctggcgcggcaatacgactgcaccgccaagctggccgagggcatgctgctggtgctgccgcgagagagcggacagagcgccacggggcggctgatcgagccgctggtgctgggccggagcgatgtcggcagcttcgacgtcacctatgacgaccgcagcctgatgaagacggtgaagactcgctaccaggtgcccggcagcggcgaggtgcagagcgtcgaactgaagaaccccaaggcaccggccacggccaggggagaacacgtcgagcgtcatctctacgccagccgcggcgaggccgagcaggcggccagggcgcgcctggcgggcttcaaccgctccagtgccggcgtgcgtctggaactgccggggcgcgccgatctgtacgccgagcggcgcatcgtgctgcagggcttcaaggccgggatcgacggcgagttcctcgtcgactcggtggagcacacctacgacgccggcggctggaccattaccgtgcaatgcaacggcgggcgcggcggcaagggtgacggctga

SEQ ID NO: 344568 - DNA, 207 bp, Pseudomonas aeruginosa
atggcgacgatctgccgaaccgctgacggcgacctgctggacagcctctgctaccacgtatacgggcacctgccgggttgcgtcgaggcgaccctcgaggccaaccccggcctggccgacgaggtccagccgctgcgcgccggcctgctgatccgcttccccgacatgccgctggtcaactccgcgcaggtacgcctgtgggactga

SEQ ID NO: 344569 - DNA, 126 bp, Pseudomonas aeruginosa
atgacgccttcgcgtatgcgccagctggcgaggcggctggccactgagctgggcttccaggccagcgagctggagcgcatgaccctaggcgacctgctctggtggctcgccgagggcgaggactga

SEQ ID NO: 344570 - DNA, 441 bp, Pseudomonas aeruginosa
atgatttttttccatgccgccaccggtggcttctattcgaaggacgtccacggtgatcgcatgcctgtggatggccggatgcatcccctcgaggaaactgaatacctggcgttgctggcagcccagggcgagggcaagcagattgtcgccgacgacgccggccggccgctctgcatcgacccaccggccccggccgaagaggtcctggctcagcgcgagcgcatctggcgcgatcgccagctggcgctaaccgacggccctatcgcccgccaccgggatgaactcgacctgggcaaggctacgaccctggatcaggaacgactgcgtgaactcacgttgtaccgcgccagccttcgcgactggccggcatccgcggcgttccccgcgttgcgtgcaagacccgagccgccgcaatggctcgaaccgctcatcaccccctga

SEQ ID NO: 344571 - DNA, 558 bp, Pseudomonas aeruginosa
atgagctatgtcagcgcggaacacgatcgcatgctcgcggcgatgatactgccctgcgtggtggtcgccgtggacctggcggcggcccgcgtgcgggtgcgttgcggcgactggaccagcggctggctgcgctggcacgcccaggccgccggccaggcgcgccactggcgagcgccgagcctcggcgagcagggcgtgctgctcagcccgtcgggggcagtggcgatggggaccttcattcccggcctgtacggcgatgccggcgcggcgccggacagcagcgccagtcgcgagacctggcggttcgacgatggcgcctcgctgagctacgactggtccgcacaccgctaccgcatcgaggtgcccagcggcacggtcgaggtgaaggccggtgccagccgggtgctggtcagcgatgccgaggttcgcgtcgaggcggcgaagatcagcctccagggagcggtggagatcgccgggccgctgacggtcagcggcgacatcctcggtggcggctcgatcgtcgacacctccggcaacagcaaccaccacacccactga

SEQ ID NO: 344572 - DNA, 516 bp, Pseudomonas aeruginosa
atgcctgaacaggctgtcacgctcgaggctttgtacgcggccatcgagcaggtcttgcgtgagcgtctgccggaggcgcagttgatcggcttctggccgggcgtgcccgagcgcaccccggcggtggccctggaagtggccgaactgttgcccgagcgtgaccccggcaccggcgagagcgcgctctcgtgccgcctgcaggctcgggtactggtgccgctggacgccgaccggcaagccgtggcgctcgccggcgagatcgtccgggtactgcggggccagacctggggactggcgctggagccggcgcgcttggtgcgcgctaccgtcgatagcagccgcgaggaactgaaggacctgcgcgcctggttggtggagtggacccaggcgctgcgtctcggcgagccggagtgggcctgggaagatcagccgcctggcagcctgctgctgggcctggatccgtggaccggtcccggccacgaagcggattacttcgcgccggaggacttgccatga

SEQ ID NO: 344573 - DNA, 201 bp, Pseudomonas aeruginosa
atggctgatctcgccgaccgcgccaatgaactggtcctggctcgtctcgacggcctcctggcggcgcgtcctgcgctggtaatccgcgagtccgccgaggagtgccaggactgtggcgagcccataccccaggcgcgccgccaggcggtgccgggctgcaaccgttgcatcgattgccaggcacgccacgagcgccgctga

SEQ ID NO: 344574 - DNA, 507 bp, Pseudomonas aeruginosa
atgcgcctgttcgccaccatcctgctctgccttgccctcggcgcctgcgccgaccatcctcccggcgtccggctgacgcatccggccagtgccgaactgcccggcctgcaaggcttccagttgatgccgccggagcgggcggtcgacgccctgccctaccgcagccgctatccgctgatcaacgcagagctgcgccagggactggcggcccacggctaccacgagagcgccaccccgcagttccgcgtctactactggctggcgctgcgcgacgcagcgctggaattccgccccgaccttccgcctacgtccagcatggggccctacctggcgatccaccgcctgcgcgacgaaaccggcaccctgcgcgtacgcctggtcgacctggaagagcgcattctctgggagggcaccgccagcaccggtctcagcccggcgagggccaatccggaacagctcgaacgagcggtcggcgccctgctccagcagcttccgcgcgcccgctag

SEQ ID NO: 344575 - DNA, 615 bp, Pseudomonas aeruginosa
atgaccgaccgcctcccctgccgcgcctgcggccacctcatcctcccggtcacggcggcgaggaacgacggactgtgcatgccctgccagggcggctatcggcagaacatcgaggacggcaagcgcttccacgagcagcgccgacgttacctggagagcccccgggcgctgtactggagcgcgctggtgaagcgcgtccacgacgacggcgcgggattcgccgggctttcgccggccgaacagacctacttcgcggtaagcgtactcagcggcgaagtgcacaacggcggcttcgaccagtacttcggcaattcctccggcgaccagtacccggcggcgtgcgccggcctgtgggagttacaggcggaggaggcgctggccctgctggagcgggccgccacgctgctgttcggcaacgggccggtgccaggctcccaggccgaacgccagctgcgcatgccgacctgggccgaggatcccgatcgcgactgcgaagccgccctggatgcgctggacacgcgcttctacgccctggccgacgcgcttgacgaacgcctgctggcccatgcccgccgtcatgcgttgttcgcccaggacgaaaccgatgaagcctga

SEQ ID NO: 344576 - DNA, 471 bp, Pseudomonas aeruginosa
atgattcctttcggcctcagccccgaacaattccgcgagcgctaccgccgcgacctgcaacgcgccgcgccgggcgtgatccagcgcctgcgcgaactgctccaccaaacgctcgaggaaggggtgcgcgacggcgaggtccagctgttcctcggcgaggacggccgcgacacaccggacgcttggttgtacctgcgcggcgccagcaaccgggtggatgccagcgacccgcgtctgttttccggcaaggcgctggacctggcgctcgacctgggaccgcttgccgatttcgacgaggcctatttcgccgccggcttcggcggcgtcgacctgctcgccgatacgctgaaagcctggttcgccgagtgctggtggaaggccggcggctgggcctggccgatcccgctgtggctgcacgtacacgatggcttcggcgacggccgtggcattcccctcaccgaacgctgctga

SEQ ID NO: 344577 - DNA, 516 bp, Pseudomonas aeruginosa
atgtccgacctgtccccgcgccccgccttctggccgtacctgccgggctacgccctgctgctgctctcggtgctgctctgcgccagcggcagctaccgtttcgtcacgccgctgccgctggccgacggtgccgacctggtctacctcagccagggcctggcccttctgccactgggcaccgggctggtgggcctgctcgccggctttctcctgcacgtgcgcgggcgctggctcggcgccctgctgagcctgctgccgacggcgctgatctgcgcctggaacctgtacaactacgcggcgcacggcgacgaggccctgtcgccgagcttcgcccgatacgcccaggcattgctcggcacgctgttgctcggcggcgtgctgggcctgatcgacctgctccaccgcagaccctcggcgttgctgcgccggggcctgctggtgctcggctggctggcgctggcgggctggctggcgctgctgttctacctgcagcgcctgtacggtctcactttttga

SEQ ID NO: 344578 - DNA, 237 bp, Pseudomonas aeruginosa
ttgaacgattacctgatcaccctcagccaggccggtcggttgctggcccgcatggaagtcagcgccgcgcgcttcgccgaggtgcgtgaactgatgcgccggcgttttcccagcgaggatggcttcgaactgcgcttcgagacgcgccgggaaagccgccgggtactggagcaggggccgcggggcgtgcgcctgctggcggtggaatatgcgaccgaggaactcatcgatggctga

SEQ ID NO: 344579 - DNA, 978 bp, Pseudomonas aeruginosa
atgtcgattaaggtgctcaagcccggactggccacctcggtacaggacgcgggtcgggaaggctactaccacctgggcatcccgccctccggtgcgctcgaccagtacgccctgcgcgtggcgaaccggctggtgggtaattccgccgacgcggcggtgctggagttcgccctgatgggcccgcaactggagttccagcgcgacgccctggtggcggtcagcggcgcgcgcatgcagccgcgtctggatggccaggacatgccgctggacacctcgttccgcgtgcgtgccgggcaggtcctggagttcggctatccgacggcgggcgcgcgcggctatctggcggtggcgggtggcatcgacgtgccgctggtacttggcagtcgctccacctatggcttgggcgccatcggtggctacctggggcggcggttgcaaaccgacgacctgctgccgctgggcgagccttcggcacaggcgcgcgaggggctggcactgccgccctcgctggggctggcgctggagaaagaggtgatcctgcgggtggttcccggcctctattaccatcgactgaccgccgaggctgccgagcgcttcttcgccgatacctggacggtgggctcggaggccgaccgtaccggctatcgctacaagggcggccagccgctggcgttcgagccccgcgagcagccgttcggcgccggttcggacccctcgaacatcgtcgacgcctgctatccgatcggctcgatccaggtcccgggcgggctggagcccatcgtcctgcatcgcgacgcggtgtccggcggtggctacgcgatgatcggcacggtgatcagcgccgacctcgacctgatcggccagttgcaaccgaacaaccgggcgcgtttcgttgccgttaccctggaacaggcaatgcaagcgcgggcgcaatatcggcagcggctgaggcggctggaactgatggggcaaggctag

SEQ ID NO: 344580 - DNA, 522 bp, Pseudomonas aeruginosa
atggctaccgaaccggcgtccttgccggccccgatgggcgagctgttgcgtgaattgaaagatgaattgcagacgctggaggcgcgcatcgctcgactggagcgacagattcaggctcacgtacgtggcgatgcccgcatccagcgcctgctggcggtggaaggcatcggcccgatcagcgccagcgccgtggcggcatccgccggtgatgcacggcaattccgcacgggccgccagtttgcggcctggctgggcctggtgccacggcagcattccacgggcgggcagcagcgcttgggcaacatcagcaagcgcggcgatacctacttgcggaccttgctcatccatggcgcccgcgcagtcgtgcgctgttgcgccaacaagaccgatgcccgcagccgctggctgcaaggtctgctgcaacggcgtcctgccaatgtcgtcgccgttgccctggccaacaagaatgcccggatcctttgggccttactcagccgggagacatgctaccggcccggttga

SEQ ID NO: 344581 - DNA, 558 bp, Pseudomonas aeruginosa
atgaaccttagtcgcattggtctggatctggcaaaacaagtattccaagtgcacggcgtagatcgtcacgagcaggtggtatgtcgtcgccaactcaagcgggcacaggtgcgggatttcttccgccaactgccgccgtgcctggtggcgatggagacctgcggcagtgcgcactactgggcgcgcgagttgcgggagctgggccacacggtacgcctgatcgcaccgcagttcgtcaaaccctacgtcaagggggacaagcacgatgcacacgacgccgaggcgatctgcgaagccgccagtcgtccgagcatgcgctatgtcccggtaaagagcgcagagcagcaggccgtgcagtcgatgcatcgggtgcgcagccgtctggtgcgggcccgcacggcgttgtgcaatgaggtgcgtggcttgctgggtgagttcgggctgatcgcgacgcgacgcgacgtgggcgagcggcgacgatggccttgctcgaaacggtcatggctaccgaaccggcgtccttgccggccccgatgggcgagctgttgcgtgaattga

SEQ ID NO: 344582 - DNA, 645 bp, Pseudomonas aeruginosa
atgcagctctacagtttcttcaacagctccacctcttaccgggtacgcatcgccctggccctcaagggcctggattaccaggtgctgccggtcaacctgcggcagggcgagcaactgcgcccggccgagcgcgagcgcaacccgatgggcgcggtgccgaccctcgtcgatgacgatgacctgctactcagccagtcgctggcgatcatcgactacctcgacgcgctgcgccccgaaccgcgcctgatcccgctcgatccgcggcaacgcgcgcaggcgctggagctggccctgctggtggcctgcgacatccatccgctgaacaacgtgcgcgtgctcaagtacctgacccaggtcctgggcatcgacaccgaggcccgccagcgctggtacgcgcactgggtcgccgagggcctggccgcggcggagaccctgctgaaccgtcacgctcgcggcgcgttcttcaccggcgaggcgccggggatcgtcgagtgctgcctggtgccgcaactggtcaacgcccggcgcatgggttgcgacctgtcaccctatcccggcctgctggagctgcagcgacgctgcctggcgctcgacgccttccagcgcgccagccccgaacggcagcccgactacctgccggactga

SEQ ID NO: 344583 - DNA, 2400 bp, Pseudomonas aeruginosa
atggacgaacggcatacgcagggactcgccgcgctcggcggcgacgcattgttcgagctgcctgcggcgcaacgctgcatccgcctggggcgggcgctggccgaggaggtggcgcggctcgccggccgtgccgccccggtcggcgccagcctcgaggaggccgggttggcctcgttggagaccctggtgctggcgggcaaggtcgaacgacgcctgggcgtcaggctgccagcctccgcctggcaggggcaccaggcaacccccgaacgcctggcgcagcgtatcgtacagaacctgcggccggaggatccggccacggcggggtcaaggctgggcgccgtcgccctgggcggctggagggtcgccgcgccgctgttctgcctgggtggcgccggcggtgcggtgggttatctcgccgccctcgatgccgccctggccgccagccgtccgctggtggcgctgcgctcgcccgggctcgagggcgaggagccgccgctgggctcggtggaggagcaggccgcgcgttacatccaggtgatcaaggcgatccagcccgaggggccctacctgctcgccgggcattcctatggcggcatcgtcgcctacgaaatggcgcaacagctcggcgtccgcggcgagccggtcggcgcgctgctgctgatcgacaccctgcgggtggaaaacagcggtgattccgagccgcccgccgccgagacgctggcctacgagctgggcctggtgcagcgtcgtctcggcggcgctcaccaatcccggccgttgaccgacaatccgcagctggtggcggtctaccgcagcaactatgccgcgatggagcgctacgagccgcgccactatccggggccggtgaccctgttcaaggcccgcgaggcgctgccggcggcgaccctgcatccgcagcgccgcacccgcctgtatttcgacgacccgaccctgggctggggcgcgctgtgtccggcgctgcgggtggtcgaactggagggcgatcatttctccctggtgttgccgccccgtgcgcagcggctggcggcggcgatcgaggaggtcctgggcgaggaggctaccttcgagctgggcgtggagcggttgcgcgccgccggtggcctgtcgtcgcgccgggcgttggaggagacgccggagggcggcctcgagctccatccctaccacccggacttccttgccaatccctatcccttcctgcatcagctgcgggcccgcgcgccgctctaccgcgaccgcgaggggaactggtggctgactcgctatgccgatgtctcggcctgcctgcgcgatccgcgtttctccgccgacccggcgcgccagagcggtgcgggcgggccgggcgcgagctggttcgaccaccagcgcctgcaaccgctggcgcgcttctacgacaacttcatgctgttcaacgatgcgccgcggcatacccggctgaaacggctcttcgccccggccttcaccccggaggccgtgcgccgctggggggcgcgcatcgacgtgctggtggaggagctgctcgacgccatgctggagcgtcccgcgccggagctcatccaggatttcgccgagccgctgaccatccgggtggcggccgagttgttcgactttccccgcgaagacgtcggccagttgctggcctggggccgcgacctcgccgccggcctggacctggccgccgtgcagggcgacgcggcgcggatcaaccgcagcgcggcggctttcagcgactacctgcgggaacaggcgcatggctggctccaggggacggcgcggcgctccggcacggcgccgatcctcgacggcgcggccatgctcgacgccggactggccctcgacgacctggtggcggcctatgccatggtgttcatggcatccttcgagaccaccatcagcatggtcggcaacagtaccctggcgctgttcgaccatccgggccagctcgagcgcctgcgccgcgagccggaactgctgggcaacgcggtagaggagctgctgcgctacgacggcgcggtgcgcagcggcctgcgttgcaccctggaggaggtggagatcggcgggcagcgggttccggccggggagcggatcatcctgtattttctcgcggccaatcgcgatccggcgatgttcgcggcgcccgaccggctgctcctggaccgggccaacgcccgccagcacctggccttcgcccatgggccgcattactgcctgggcgccgcgctggcacgtctcgaactgcagggcgcgctgcgcgcgctggcgcgccggcggctggctccgctgccgcaggcggaaggcctgagctggcggcgcagcgcggcgtttcgcaccctggaacgcttgcccgtggtcgcggctgggcctcagaacacctgggaatag

SEQ ID NO: 344584 - DNA, 1245 bp, Pseudomonas aeruginosa
  misc_feature (926)..(926): n is a, c, g, or t
atggaacagtcatcccacttcttctggcgctaccccctcgcactcgcggccgtactggtcctgagcgcctgcggcaaggccccggaaaccactcaaggcatggcggcgcccaaggtcagcgtcgccgaagtcatcgaacaaccgctgaacgagtgggacgaattcaccggccgcctggaggccccggagtcggtggagctgcgcccgcgggtgtcgggctacatcgaccgcgtggccttccatgaaggcgccctggtgaagaaaggcgacctgctgttccagatcgacccgcgcccgttcgaagccgaggtcaagcgcctcgaagcccagctgcaacaggcccgcgcggcccaggcgcggagcgtcaacgaagcccagcgcggcgaacgcctgcgcgccagcaacgcgatctccgcggaactcgccgacgcccgcaccaccgccgcccaggaagccagggcggcggtcgccgcgacccaggcgcaactcgacgcggcgcgcctgaacctgagcttcacccgggtcaccgcgccaatcgacgggcgcgtcagccgggccgaagtcaccgccggcaacctggtcaactccggggaaaccctgctcaccaccctggtcagcaccgacaaggtgtacgcctacttcgacgccgacgaacgcgtgttcctcaagtacgtcgagctggcccgccaggccgggcgcgacacgcgcagcgagagcccggtctacctcggcctgagcagcgagaacggcaacccgcacctgggccggctggacttcctcgacaaccaggtcaacccgcgcaccggcaccatccgcggccgcgccgtgttcgacaacgccaagggcgagttcaccccggggctctacgtgcgcctgaagctggtcggcagcaagacctacgccgccaccctgatcaaggacgaagnggtcggcaccgacctgggcaagaagttcgtgctggtcctggacggcgacaacaagaccgtctaccgcaccgtcgagatggggccgaagctggagggcctgcgcatcgtccgcagcggcctgagcaagggcgaccggatcgtcgtcaacggcctgcagcgggtccgtccgggcatgcaggtggacccgcagaaggtcgagatggccagcgccgacaccctggccaccctcgcgcgcctgcggcagtcggtcggcgacagcgaaccgccgaaggtggcggcgaccaaggacaacgccactcgcaacgagccgcgcggctga

SEQ ID NO: 344585 - DNA, 1323 bp, Pseudomonas aeruginosa
atgcacaccttgcaacagctgcgcagcggcgaactggccggcgccacccgcctggacctgtcctgcggtcttcgcgagttcccgcgggagatcttcgacctcgccgatacactggaggtgctcaatctcagcggcaacgccctcagccggctgccggacgatctcggccggctgcgccggctgaaggtgctgttctgttccgccaacgacttcgatgaattgccggcggtggtaggcgagtgcccggcgctggacatggtcggcttcaagtccaaccgcatcgagcgggtgcccgccgccgcgctgccagcggcgctgcgctggctgatcctcaccgacaatcgcatcgccgcgctgcccgaggaacttggccaacggccgctgcagaagctgatgctggccggcaaccggctgcaggcgctgcccgagagcatggccggttgcgagcgcctggagttgctgcggatcgccgccaatcgcttccagcgcctaccggcctggctgaccggactgccgcgcctggcctggctggcctatgccggcaatccgctgtgccgcttgccggcgctggccgatggcgacatcgccgcgctggactggagccaactgacgccgggcgagctgattggcgaaggcgcttccggcgcgattcatcgcggcgactggtggcaggccgacggctccaggcgggcggtggcactgaaactgttcaagggcggggtgaccagcgacggtacgccggccagcgaaatggccgcctgcctggcggcggggcgccatccgcaactgatcgaggtgctcgggcggatcgccggccacccgcagcggcgcgagggattggtgctggaattgctcggcgacggctaccgcaacctggcggggccgccgagcctggcgtcctgcacccgcgacgtatacccgccggagcgtcgtttcgacctggcgacggtcctgcgcctggcgggctcgatcgccgcggtgatgacgcacctgcatgggcgtggcatcggccatggcgatctctatgcgcacaacatcctctgccgcgagaacggcgcttgcctgctcggcgacttcggctccgcctctttcctgccgcgcgaggatgccgcgttcgccggcgccttgcggcgtctggaggtgcgcgcgttcggctgcctgttggaggaactgctggagcgctgcgagccggcgccgcacgcgacgacgccaggcgcggcgctgctcgatttgcagcggcgttgcgtggcgtcgcgggtggccgagcgtccggacttcgccgagatcgatgcgctcctcagggcgctggccaggcggatatag

SEQ ID NO: 344586 - DNA, 1122 bp, Pseudomonas aeruginosa
atgcccgctttgagtcgccgttcgttcgtcaccctgaccgccctggcctccagcagcgcattgctgagtccggcggcgttcgccggcaccggcaggaaaactgccgcggaaccgcaggaaatatttctggatttcaacgaaagtccctacggcccctccgccagggccagggccgccatgcaggaggctgccccgctctgcggtcgctacgactatgacacccaggacgccctggtcggcctgttcgccaagcagaacgacgttcccgcggaatgcgtgcacgcctactgcggctcgcgccagccgctgcagtacgccatcgcggcgttcaccggcaaggcgcgcagcctggtcatggccgatccttcctatgactcggtggccagcgccgcacaggcccaggaagcgcaggtgcatgcggtggccctggacggcgaggcgagccacgatatcgaacgcatgctcgccgcggcgcagcaggatgccggactgatctacatctgcaatccgaacaacccgaccggcaccctcaccccgcacgagcggatcgtccaggccatcgagcgcaagccggcgcacagcgtggtactggtcgacgaggcctacatccatttttccgatgcgccgagcgtcatcggcctggccgcccggcgcaaggacctgctggtcctgcgcaccttctccaagctctacggcatggccggtgcccggctaggcctggcgatcggacatcccgaactgctggcccggctggagcgcttcggcggccacaacgtggtgccctcgcccaccgcccacgccggcctggaaagcctgcgcgagggcgaactggtgccacggcgcaagcggcagaacgcggagatccgcgagcgcaccatcgcctggctgcgccagcaggggttccgctgcaccgcctcgcagtccaattgcttcatggtggatatgcgccgccccgccgagatggtcatcgccgagctggaaaagcagcgggtgtatgtaggacgtccgtgggccgcctggcccaactgggtgcgcgtgacggtcggtagcgaggaagagatgcgggcgttccagaacgccttcgccagcgtcagccggcgccaccaggtggccgcgcgctag

SEQ ID NO: 344587 - DNA, 453 bp, Pseudomonas aeruginosa
atgcctgagcaatccctggccttggtggcggcgctgctgcgccgtggccgcgaactcgaccgcctgtccgccgcgctgaccctgctggccatcggcctgggcctgtaccagtcgctgcaggggagcggctggcgctacttcgctccgctcatgctggtcgtcgccatgctcggcctgtggcagaaatactgggcgctgcgggtagccctggatgccgaattgttcgagcgcttcagccgcgccggcgccgcgctggaggcgcagacccgcgagctggaccaggccctggtcggcctcggcctggcccgcgtggacgccgccgggcgtagctggaagcagcgcagcgagggtgcgttgcgcctgctgcgctggcaggccgtggcctgtgccgtccagttcctgctggccctggcgtgcctgttgtcgatccctctactcaacgctcaaacctga

SEQ ID NO: 344588 - DNA, 333 bp, Pseudomonas aeruginosa
atgagtagttggtacgagttgaaggcaaacaccagcggaaccttccgcttccgtctgaagtccggggacggttcgactctgctggaaagcgggctatacgacgaccgcgagacggtcgagagggcgatcggggagttccgtcgtcactgcggccaggaggagcgttaccagaagctcatccactcgggtgggaagaactacttcgtcctgcgcggtgcggagaaggaggtgctggtcaccagccacttgtacgactccgaggcggcccggcgcgaagcgatcagcctgatcgccgaggtcggccagaccactctggtcaaggacgccgcctga

SEQ ID NO: 344589 - DNA, 156 bp, Pseudomonas aeruginosa
atgcggctcgccgcttgcgtttacctttacgttaacgtaaacatgcacttcgacttcaccgataccggcggaccggtgtccgtcgtcgcgtccttgcggcgagggacgacggttcagcgacattcccagaacaaccacaacaagggaaagccatga

SEQ ID NO: 344590 - DNA, 1488 bp, Pseudomonas aeruginosa
atgctacagacgttgaaacagaactggttctccaatctccgcggcgacgtgctcgccggcctggtcgtcgccctggcgctgatccccgaggcgatcgccttttccatcatcgccggggtcgatccgaagatcggcctgtatgcctcgttcagcatggcggtggtgatcgccttcgccggcggacgacccggcatgatctccgccgccaccggcgccatggccttgctgatggtcaacctggtgaaggatcacggcctgcagtatctgctggcggcgaccctgctctgcggcgtgctgcagatcctcgccggctacctgcgcctgggttccctgatgcgcttcgtctcgcgttcggtggtgaccggcttcgtcaatgccctggcgatcctgatcttcctggcccagttgccggaactcacgcacgtcggctggccggtctacgcgatgaccgccaccggcctggcgatcatctacggctttccgcacctgccacggatcggccggctgctgccctctccgctggtatgcatcctggcgctcaccgccctctccatctatctgggactggacatccgcaccgtcggcgacatgggtgaattgcccgccagcctgccggtcttcctctggccggaggttccgctgaacctcgagaccctgctgatcatcctgccctactccgccgccctggcggtggtcggcctgctggagtcgctgatgaccgccaccatcgtcgacgagatgaccgataccgacagcgacaagaaccgtgaatgcaagggccagggcctggcgaacatcgccaccggcctgctcggcgggatggccggttgcgcgatgatcgggcagtcggtcatcaacgtgaaatccggtggtcgcaaccgcctgtcgacactggtggccggcgtcgcgctgctgctgatggtggtgttcctcagcgactgggtcggacaaatacccatggcggccctggtggcggtgatgatcatggtctcgatcggtaccttccgctgggactcgatccgcaacctgcggcgctacccgctgtcgaccaacctggtcatgctggtgacggtcggggtggtcctcgccacccacaacctggcgttcggcgtgatcgccggcgtgctgctggcctcgctgttcttcgccaacaggatcggccattacctggacatcgacagccagctgtccgccgatggttcgcaccgtcattaccaggtcaccggccaactgttcttcgcttcgtcgacccggttcgtcgccgccttcgacctgaaagaacaggtggaccaggtgatcatcgacctgcgtcacgcccatctctgggacatcaccgccgtcgcggcgctggacaaggtggtgctgggcctgcgccagcgcggcgtgacggtcgatgtgctcggcctgaacgccgccagcgcgacgctggtcgatcgcttcggcgcgcacgacaagtcgggcgccgtcgacctcctctccgaccactga

SEQ ID NO: 344591 - DNA, 423 bp, Pseudomonas aeruginosa
atggaagaccatcgacagcctcgcgccgcggcgcaggccgagacacccctgtttcccgagcagacccgggagagcctgcaggccctggttggcaagctgcagccactgatcgaagggcggcggctggacaacctggtcgacctgctctcgctgctttcggatctcatcgacctgctcgacccggccatggtggacaggctggcgtcgctcttcgaacaggccaccagtgtcggctggtccgtcggcaacgcggtgcgcgtggccaaagccgaggtgttgcgggagcggccgccgaacctgaaggatctgttgcggctgttgcgcgatgccgatacccgtcgcggcctggcgctgctgctgggtagcctgcgcagcctggggcggcagctcgccgcggagcgggaggtcgcccatggtgcgtga

SEQ ID NO: 344592 - DNA, 126 bp, Pseudomonas aeruginosa
atgagcgaagggaataggcaaggctggctccgccgcggcaagacgctggcgcggaaaaaggtcctacagttcaagcggttgccgatgaagagtcaccacctgccagaattggcaggggcagagtga

SEQ ID NO: 344593 - DNA, 210 bp, Pseudomonas aeruginosa
atgatcgacacgctctccttcgcttcgcgcctgtgcaagttcgtcattctcctggtcgcgttgctggtcggcggcgccagttgctacctgtggctggcaggtcgtccttatcgggacgccatatcggcgttcgttcccctggtgctgccgatgctcgcgctggtgctggcgttcgatctcttccgtgcgctcgccctgggccgtcgctag

SEQ ID NO: 344594 - DNA, 1764 bp, Pseudomonas aeruginosa
atgacgactcctccctatcccgccgacgagcccgccagacaggcctacgtcgaccagctcggcctgctggaggaaggtgtcgacgaagtgttcgaagcgatcctcggcgccgccacctgctatttccagacgcccatcgcgctcatttccattctcgatcaccagcgccagtggtttcgcgcgagcatcggcctcggtatccgccagacgccacgacgggattcgttctgcgcctacgcgatcctcggcaagggagtgttcgaggtggccgacgcccgcctcgatccgcgcttccgcgacaacccctacgtgctgggcgagccgggcatccgcttctacgccggatcgccgctgaccaccaccgacggactcaacctcggcagcctctgcgtcatcgacagggaaccccgcggaccgctgtccgcgcgggacatcgccatgctcgagcacttcgccgggctggtcatggcacgcatccatacgctgcgctcgaccaactacatcgacgaaccgaccggcctctacaatcggctgcgcctgcaggaagacgtttccctgcgcctgcagcgcgacggcgcgctgaccgtcatcgccgccgacctcctgcctctcgccctgctcaatacgattatccgtacgctgggctatccgttttccaacgacctcatgctcgcggcgcgcgatcgcatccgcagcgagctgccggactgcaccctctacaagatcagcccgacccgcttcggcttgctgctgccgcggcagcagcaggaacaaaccgagccggtctgtatccgcctgctggaggccttcgagaaacccgtggtctgccacggcattccgatcaaggccaatcccggcctcggcgtgctgccactcaccgccgaccatccccacggcgagcaggactggctgcgcctggtggtcagcgcggccgacgacgcccgtgaccgcggcgtcggctgggcgcgctacaacccgccgctggaccaggcccagcagcgcgccttcaccctgctggcctcgctgtcccaggctatcggtacggaggaagggttccacctggcataccagccgaagatcgacctggcgacgggccaatgtaccggcgtcgaggcattgctgcgctggcgccacccgcaactcgggccggtcagccccgccgagttcattcccctggcggaaaagaccgcgctgatgcgcccgttgagcgactgggtgctgcgccatgcgctggagcaactggctctctggcacgggcggaacatcccgctcacgctggcgatcaacgtctcggcggcggaaatggaagacagcggtttcctggaggagaccgtcaggctcgccaggcatcacgggctcgacctttcggccatcgagctggagttcaccgaaagcgtgctcattcgcgacgcctcggcggtgagggcagtcttgctgcgcgcccgcgaactgggcatgggcatcgcggtggacgatttcggcaccggctacagcaactggacctacctgcgcgacctgccggtcaccgccatcaagctcgaccagtcgttcacccgcgacctgggcgactcgccgaaggcgcagagtgtcacccaggcggtgatcggcctggccagccagttgggctatcgggtgatcgccgagggcatcgagacccctgaaacccttcatctgctgcaagcctggggttgtcgcgagggacagggctatctcatcgcccggccgatgctggcggaccagctggaagactggctgcagcgttag

SEQ ID NO: 344595 - DNA, 408 bp, Pseudomonas aeruginosa
atggagcacccctacgaacccccgcgagcgacgcttaccgagggcaggccggcggcgcgtggtttcctggccggcggacagccgctgtggaaggctttctggctgttcttcgccgtgggtttcgtgctggtcggcctcgtcgccaggcaggcgatggtggccatcgtcgatccgctgatgcaggagagcgacggcgaacacgccgtgtccctgaccttgtggggaatcatcggcatcgagctggcgaagctggcctacctgctcctgagcctcgtcgtggtctggcgctgcggacgcaattcgccgtgggccatcgcccggcatgcaggggttgccgtggtgctggcgctgatggtcctgggcctgtactcgatctatctggtgctggctctcctggccacgccttga

SEQ ID NO: 344596 - DNA, 297 bp, Pseudomonas aeruginosa
atggcggccgaggccgctggcaatctccaggacctggccggttcgacgatcattgccgccggcaagctcgaagccgtgaaatgtcccggcgcgggactgtacgaatgcgccgactggcccagcgggctctaccgcttcgaggagcaggacgtctgcctgaccatcgtcgaaggctgcgactacagctgcgatggaatcctgagcgagaagagcggtacgcagtcggtactggtttccgggtcctatcgggagcggatccgcaaggtggaaggcgccaaggtctcctgtccgcgctag

SEQ ID NO: 344597 - DNA, 246 bp, Pseudomonas aeruginosa
atgaatgatgtccttcagttcgcgatttgggccgtggtcatcaccgcagtaggctacctcgtccgaccaagaggcatccgcaaatggctgggggtcgttgcgtttgttgcagcctgggtgctgatattttgcttttcttccaccaacctagtgggcttcgatcttggcattctaggaatctgccttgttgtcctcggggtcgaccttttcgttcgtagagaccgtttctcgaaatctgacgagtaa

SEQ ID NO: 344598 - DNA, 348 bp, Pseudomonas aeruginosa
atggaaacaaaaaaacgtcggagccacatctggctcttccacatcgtaattttctgtcaggcatgcgtcgccgccgaggtttcggacggattggaagaacttgcccgaggcaccgtcattctcactttaatgggcacctcagcaaccggccacacgagcgattacatcagttccaacagctatgcctatgcccgcgaggacgcggcagcatttatagcctcagaaggagccatctacggcgtgcaactggagcgcgcctggaggaaatatcaggccgatactcctgaacccaggctggaactgagttcctttgctgccgggctattggcacggagtgagatgcagtga

SEQ ID NO: 344599 - DNA, 498 bp, Pseudomonas aeruginosa
atggggaccatcaaggaatggatcgtcggcgcagtgttggctctgctcgccacggcgctgctggccagcatgggctacctcgccgggcgcgcgtccatgctgcgcgagtacggcgaactggcaggccaggtgcgtcagcagcgggaacaggcggacgccaagctggccgagctgatcgcgcagcgtgacatgaaacaggcagccctggacaaggccgccgccgaccaagagaggaaagatgctgatgctcaagctgaaatcgttcgccttgctggcgagctgcgcgaccgccctgtgcgcgtgcggatcgcccgctccgcaggtgggaactgtgatggtggtgccgcgggtagtggagccggcaccgccgaaactgatacaggaaaccccgcctcggcctacgggctactaccggaagaaaattctcgacgctttaacgactccctgagcgaagtcgaaaccctgagcgcgcctacagctcgtgtcgcgcccggttga

SEQ ID NO: 344600 - DNA, 525 bp, Pseudomonas aeruginosa
gtgatctccgcccgtgccgtctcgatcatgctggcctgcctgctgctggccggcttcggcgactggatgaagtcggaggacttcagcgcgaaaccctacgtgccgaccaagggcgacgtgccgaccatcggttacggctccacccgctacgagaacggccaatcggtgaagctgaccgatccgcctatcacccgtcagcgcggcgaacaactggcgcgcaacctgatagctaaggacgaacagcagttccgcgactcgctgcccggcgtgaaactgttccaggaggagtacgacttgtacctgggtttcatgggccagttcggcatcaccaactggcgcggtagctcgatgcgccgcgacctcctggccggcaactaccgacaggcctgtgacgacttgttgaagtggcacaaccagggtgggcgcgattgctcgcagccgaagaactgggggccgaagggctgcaaaggcgtctggagccgacagcaggagcagcatgcgcagtgcatagccgcgcaggagtga

SEQ ID NO: 344601 - DNA, 378 bp, Pseudomonas aeruginosa
gtgccggccgcggctggccaggcgcgcaacccgcaggcgatcaccgacaacgcgtacgccgcgcgcaacggcaatggagacgaagtatccggtgacggctggcgcttccgcgggcgcggcctgctgcagatcacaggccgggcgaactaccgcgccgccggcgccgggctggaccagccgctggagcaggaaccagagctgctcgagcggccggagttcgcggcgctatccgcagcctggtggtggtcgaagcatggcctcaacgaactggccgaccgcggcgagttcgcagccatcacccgccggatcaacggcgggttcaacggccaggcggagcgcgtggaactgtgggagcgggcgaagagggtgctgtcgtga

SEQ ID NO: 344602 - DNA, 132 bp, Pseudomonas aeruginosa
atgcagatgcacagcgtcgacgtggtactggtcatggcctggtgctccagcaccacggcacggccgacgctgttcgccgcgccgccggtcagcttcgcgacagagtgtgtgccgagcaccggcccaagatga

SEQ ID NO: 344603 - DNA, 363 bp, Pseudomonas aeruginosa
atggactacggcctggcgatcactgaatacgcccgcctggagagggcgcgcacagccgatgcaaaggtagcggagacgctcacgtttcgctatgtggctcaacgctatttcatcgacgtcgtgccaacgaaaagccctacaacgcagaaggacaacgcccgcgagctcaagcaactgctggcgttcttcgatgacccacctgcagccatcggggatatcgagccgaagcacatcaagcagtacctgaccttccggcggtcggcgccggttcgcgcaaatcgggaaatctcgcttttctcggccatctggaactacgcgcgcgagatgggctacaccaaactggccacccgtgctcaggcgtga

SEQ ID NO: 344604 - DNA, 1338 bp, Pseudomonas aeruginosa
atggagacgttacccatcaggaaccggcgtctgctggtggtcgaggagctccaggtggaacgcgaccgcttgtgcgcggcgctcgccggcgactacgaggtggatgccgtggccagcggcgaggacgcgccggcccggatacgcgcggcgctggacgtcgaccagccttatgcggtggctttcctgggcatgtcgctggtgtccggccgctgctcgctgcccgggctgctctggcagctcgatccgcgcctgcaactggtgatctgttcccgccccgccgaattccctctgctggccgcgctggcggcggaggagcgcctgctgctgctcggctcgccggcgcaaggcgcggaagtgcgccagatggccggcaacctctgcgccaagtggagcctggcggcctacctgcagtcgcaggtgagccggatggaacgggatatccagcggatcaccgacgagatcgggcgggccagggacgcgctgcggaaggagatcggcgaacgccaggaactggagagccagctggtccagaccgaaaagctggcctcgatcggccatctggccgccggcgtcgcccatgagatcaacaatcccatcagctatatctcctccaactacaccaccctggaggaccatgtcaggcgcttgctggaggtcctccaggcctacgaagaggcccgcccggcgattcgcgaccaggcactggcggatcgcctggagcaacttggcgagcgtgtcgagctggcgttcgtcaaggaggacgtcgccgtgctgctgcgcgagtcccgcgaggggataggacgggtgcgcaagatcgtccaggacctgaagaacttctcgcgggtcgacagcgaggacgactggcaatgggcgaacctgcaccagggaatcgagtcgaccctcaatatcgtcgccagcgaactgaaataccgggcggacgtgatccgcgaatacggggagctgcccgaagtgcggtgcttgccgtcgcagatcaaccaggtggtgatgaacctggtgatgaacgccgcccaggcgatggggccggagcgggggcgcatcgtgattcgcaccggatgtgacaaggaaaacgcctggatcgaggtggaggactcggggcagggcatcgccgccgatgtccttccacgtatcttcgaccccttcttcaccaccaagccggttggcaagggcaccggcctgggcctctcgctatcctatggcatcgtccagaagcacgctggcaccatcgaggtgcgcagccagccgggcatcggtagcgccttccgcatcgtcctgcccctggaagcgcccgggcacaccggcggaacccgcggaaattaa

SEQ ID NO: 344605 - DNA, 900 bp, Pseudomonas aeruginosa
atgaacgatccgatccgtcgcggtacgctggaaatgacttcggccatgctgatctgcggcaccatcggctggctggtactgctatccggtgagccggtgctcgacgtggtgttctggcgctgcgtgttcggcttcgccgccttgctggcggcctgctccgcgctcggcttcctgcgtcgcgggagcctggggcgcaaggcattcctgctggcgctgctcagcggagtgttcatcgtcggcaactgggttctgctgttcgcttcctattcgcgggcctcgatcgccatcggtaccgcggtctacaacgtccagccgttcatgctggtcgcccttggcgcggcgttcctcggcgagaggatcacggcgcgcacgctgggctggctggggttgtctttcaccggcatgctggcgatcgccagtgcccacgatgacagcggcggcgcgcgcggcgactacctgctcggtattctcctggcgctggccgccgcgctgctgtatgccttcgccgcgctgatcgtgaaacgcctgcgagacacgccgccgcacctgatcgcgctgatccaggtgggcgccggcgcgctgatcctcgcgccgctggccgatctggccgatccgccccgcggcgcagcgccctgggccagcctggcgacgctgggcatcgtgcataccggactgatgtacgtgctgctctacggcgccatccagaagctgccgacggcgctgaccggtgcgctgtccttcatctatccggtcgccgcgatcctggtggactgggtggtcttcgaacatcgcctgggcctggcgcagtggctcggcgtggtcgccatcctgctcgccgcggcgggcatgcagcagggctggggggtgcgcctgacgcggccggcgatgcgccgggaatga

SEQ ID NO: 344606 - DNA, 561 bp, Pseudomonas aeruginosa
atgcccatacccggctcaggttgcgcctcggaactgcaactcgtcccgttccagccggaacactttcccacgctgcggcgctggttcgccacggaaaaggaattggtgcaatgggccgggcctgccctgcagcatccgctgaccttcgggcagttgcagggcgacctcgcggaaagccgccgacaaccgccgctgcgcctgctctggagcgcctgccgggatggcgaggtcatcggccattgccaattgctgttcgaccgccgcaacggcgtcgcccgcctggctcgcatagccctggcgccaaccgcgcgcggccagggcctggggctgcggatgctggatgcactcctcgccgaggccttcgccgataccgacatcgaacgcgtggaattgaacgtgtacgactggaactccgccgcccgtcatctctatcgacgcgcgggattccgcgaagaaggcttgcgccgttccgccacccgggtcggccgggaacgctggaacgtcgttctcatgggactcttgcggcaggagtgggaagcgggaagcgccggcaacgactga

SEQ ID NO: 344607 - DNA, 591 bp, Pseudomonas aeruginosa
atgaaaaacattctcctgctcaatggcggcaaacgcttcgcccattccgacggccgcctcaaccagaccctgcacgaggttgccctggccaacctggatcgtcgcggtttcgacgtctgcgagaccttcatcgatggcggctacgacatccaggaagaactgggcaagttcctccgcgcggacgtggtgatctaccagatgcccggctggtggatgggcgcgccgtggacagtgaaacgctatatcgacgaagtgttcacggcaggacacggtagtctctatgccaacgatggtcgtacgcgttccgaccattcccagaaatacggcagtggtgggctggtcaggggcaagcgctacatgctctcgctgacctggaacgccccgcagcaggcattcgacgaaccggatgatttcttcgaaggaaagggcgtcgatgcggtgtacttcccctttcacaaggccaaccagttcctcgggatgtccggcttgccgaccttcctggcggtggacgtgatgaagcgtccggatgtgccggcgacggtggccgcctatgaagcgcatctggacagggtattcggcaacgccgcttga

SEQ ID NO: 344608 - DNA, 1107 bp, Pseudomonas aeruginosa
atgacagcggaagccgagacgtgcctcggggaaagccccctaggcacgggcactcgctcgatcaccctgcgcggaggctcactggtagctgaaagtgaaggtagccgtaccgttcgcggtccctgccgtcactttctgcccggtcttcttgtagcccgctttcagggggatggttacttcgacattcccatattccccgactttccactggttgacgttatttgccgcggtggagtccggcccgaactttatcgccgtattgtcatcacgcctgatctgaatgcctactccagttgcagtggaaccggaggagagcgacagtacgtcggatgtgttggttggattcacggcgtccgtgaaggtcacgaacattttcgttctcgtccctgtctcgccacccgcgcacagcagcttcagctcgaaggaacggaacgaggactgggcctcgagaatcacctcgctcatatcgagctgaccgaagttgacagaaaccctcggggtctgcaatttgcaagtgggtacccgtggcctgatcggtatcgacccgttcaccattattctccgggcaatcaagttctcattgagcgccaccgtatatccaagttctccgataatttgcccggcagcagtaatgttcccggtcttgaccagctcaatcgtgaagttcgtagccgcattcaggttataggtcaggctggttggctcatcatggtactgcggccaccatgcgtcaggattgataccgccccggatacgaaaaccgactcccgccaccggcgttggataggtatcgtactttcccggccccgcagcggtggttcccacataaatcaccatgccaaccggagtggtacaggatatcttcccgcccgtccccgtcgaggtgccggcggacgagaagataaccgtcccctcggcaatattggggtcgaacttcgcaggagtgaacttcggcaaggtcacgataagagagggaacaatgacgccgtcggttcttatcaccttgcaagtggcgaaaaccgggcaggacaagagagagcagcaggatgcagaagctcgttcgaagcgagaacatatccatgtacttacaggaagggaattagttag

SEQ ID NO: 344609 - DNA, 1029 bp, Pseudomonas aeruginosa
atgttgctgaaagtgggtgagctggccaggcgcactggtttgaccgtccggacgctgcaccactatcacgatatcggcctgctggtcccggtcgcgcgtacggatgccggctatcgcctctacggcagggaggatgtcgcccgtctgcaccgtatccaggccttgcgacggttcggcttgtcgctgggcgagatcggcgagttgcttgcccgtccagcgctgtcgctgggctcggtgatcgaacggcaggtcaggatcctggagcaggagatcgcccaccgcacgcaactgcgtgatcgcctgttgcaactgggtgcgcaactggcgaggggagaggagccggaactggccgattggctgacgactatggaactgatgaatatgtacgaccgttatttcacccggcaggaactgcagcagttgcgtttccatcaggccgatgcggcgcggcaggccgagtggcgcgcgctggtggacgaggtgcgccaggcgatggcatgtgggcttgctgccacctcggaagaagcgcaggcgctgtcgcgccgctggatgagcatgctggaggaggataccgctggcgatccgcgcctgctcgccaagctcgacgccatgcacgctgccgagcccgggctgcgcgagcggaccggcatcacggcggaaatccgcgactatgtgctggcggcgttcaaccaggcccggctggccatctaccggcgttggctggatgcggaggagttcgctttcctttgcgagcgctatcccaggcgcatgcacgagtggccgccgctggcggcggcgctgcgcgagaagctggaagccggtgtggaccccgccagcgccgaggtccgggaccttgcccggcactggctggagctgttccgctcctttgccggcgacgatccgcgaacccagcagaagattcgcgcggcgctcgcctgcgaaccggagttgcgcctgggttcgtgggtgaccgacgaactgctggaatacctgcgccaggccatcgcgacgttgcccggacacgcctga

SEQ ID NO: 344610 - DNA, 1041 bp, Pseudomonas aeruginosa
atgaaaacgctcgcccagcgtctgacccccttcgcgttcctggcttccgcaggcttcctggcggcctgtgcgcctctcggcggaaccggactcggcagcccccagcagaaccccaccaaccagctcctggacatgctcgacgaggctacccgcgagggcatgtccgtggtgctggtgccggcgctcatgcccaacaagagcgtcaccgacctttccagctactcgcaccgggtcatcttcaagaacaaggacgtgcccgggatcgcctacatgcaggccttcgccaacaatgacctggagaagatcaaggacgccgtctacctgtgggatttcctcgaggtcaacatcgtcccgccggggacctacctgctgtctggcgggatcgactacaagatcgacagcaccctggcccaggtcgaggctcccaaggggcaaccgaaagccagcccgcagggcctggtgaacctgtccgccgtgctgtatcgcaccttcgtcaaggagaattactggcgcgatgcggcctatgccgacaatacctacacgcagaacgtctgcaacgccgtgcacgtcgcctccggccagtgcgtaggctggagcgcgcagcaatacagccagcgggaaaaagtctcggacggcggctggaccgaaggcacgaagatcaaggatgtcccgtccatcaaactgcaggcgcagatacccgacgcccacgccccactgtccttcaccatacagcccgggcagatcctgctcagcgatcgcttccacctgaagaccccggcggtgagctacgacaggaaaagttgcagggcggtagacacgcagaatatccagtgtgccctgaaggacatccaggtctacatgagaccggcaccgatggaactgacgaaaaaattcatcgctcgcgagcagccgacgctgaccgagacaggccgccaggtgctcgcccgcatccaaccgatgaagacccggatccttggcgaggaaggcatgcaggacctgacctggggtcttccggtctccctgaagcggacaggcaggtaa

SEQ ID NO: 344611 - DNA, 444 bp, Pseudomonas aeruginosa
atgcgctcgcttacacgaatgctatgcgccggcctgctgctcgggagcatggcgagccaggcaatcgccgcagggatcgacgatatcttccgctcgcaggataccgacaaggacggcgcgctttcgctcgaggagacgcgcgccgccgctccggaagcttttcgccgtcttgatcgtgacggcaatggcatcgtcgacgcggatgaaatcgcggcgaacatggttgccgaggccgggccggggatggtcattccgccggtgacactgaccgcggtgtcgaagagcactgtcgagctttgggatggcaaccgcgatggcaaggtcaccgggcaggaatattcggattcggccgtcaccctgctgatgctggccgatgcggatggcgaccgccgggtgacccgcgaagagttgcagcgttttcgtggtgagcccgccgctcgctga

SEQ ID NO: 344612 - DNA, 618 bp, Pseudomonas aeruginosa
atgaatcgacgagtagccaagcaggaacgcagcgagcagacccggacggacattctgcagacggcgctggatctcttctcgacgcgggggttcgccgcggtgagcctgcgcgacatcgccgagcgggtaggggtcaaccacgcgatgatccgctatcacttcggcagcaaggaggagctctggcgggacagcgcggcctatctgttcgagcgcctggccgaggagattccggctccggacctggcgagcgaggcggatccggtggcggcgctcaagcgctacatcaaggactacgtccactactgcgcccggcacccggaacacgcgcgcctgatggtgcaggagtccatcgtggcgtcggaccggctgcaatgggtgtccgagaactacatccgccccaatcatgcccggaccctgaagctgatcgagggcgccagcctgcctgccgggctaaccgggatggacccggtcatgctcctgtacatggtggtggcgatcgcccagatgccctacctggtcaccgccgaactgcagttctcccacgagcgcgatgtactgacgaacgaagcgatcgaggcgcacgccgacgcggtggtgaaattcatcttccgtgattga

SEQ ID NO: 344613 - DNA, 1332 bp, Pseudomonas aeruginosa
atgacgccatcccccgcccccttcaatcccggtttcatctggggggtagccgcctcggccgcccagaccgagagccgcaacgggcgcggccgcagcaactgggacctgttctgcgacgagcgcggcggcgtgctggacggctcgaccaatgcgctctgcacgggtttcgaagagcgctacccgcaagacctcgccctgcttgccgacgccggcgtccaggctttccgcttttccatcgcctggccccgggtgcagccgaacggtcctggaccggccagcgccgcggggctggaggtctacgaacggatggtcgatgcgatgctcgaatgcggcctgaccccctggccgaccctgttccactgggacgtgccgacctgggccggcgacttccgtgatcgcgacatctgccagcgcttcgccgactacgccgaggtcgtcgccggcaggctgggcgatcgcatcgaccagtggatcgtcctcaacgaaccgaacagcgtcgcgctacgcggctatgccgcgcaggtccatgccccggcactcgactccgcgagtgccgccttcgccgccatccatcaccagaacctggcccagggcctggcgttccaggccctgcgggcaagcctgccgggacggccgcgcatcggtaccacggtgaacctgcagccggtgcgcgccgagcatgggcagcgctacgacacccaggtccacctggtggacgcactgtggaaccgcgccttcgtcgatcccctctacggcaagggctatccggcgcccgtcgaccagctggtggcaccgctggtgcgcgaaggcgacatgcaactgatcgcggtgaaaccggacttcctcggcctcaactactacagccgcatctacgttcgcccggacagcggcggctccctcggcgtcgcccagggcgaagcgccagcgcagttgccgcgcaccgactatttccatgtcgagcccgatggccttaccgaaatgctcctcaggctgcaccgcgactacgacgcccccgagctgtacatcaccgagaccggtttcgccctgccggaccccgcgcctcgcgacggcgtggtggaggatcaccagcggatcggatacctggccagctacctgaaagcggcccaggccgcccaggcggaaggagctcggttgaaaggcctgttctactggtcggcgaccgacaactgggagtgggcccagggcttcgccaagcgcttcgggctcatccatgtcgatcgcaacgacctgtcgcggaccccgaaacgcagcctgcattacttcgccgagtgcattcgcgccaacgccgccctcgacgcaccgaagcactga

SEQ ID NO: 344614 - DNA, 1950 bp, Pseudomonas aeruginosa
atgggtaccttctctctcaagccgccagtgcgtaccgccctggctttcgccggactgctgccgctgtgcctggcggaacaggcccaggcagtggagttcagctttctcgacaacgaagtctccggatcgctggacaccaccatctcctacggcgcgctgtggcgcgtccagggccgcgacaagaacaacgacgacatcaacggcaacgacggcaaccgcaacttcgatcccggcctggtctccgaggtctacaagatcacctccgacctcggcgcctcctggcgcaactatggcctgttcctgcgtggttcgaccttctacgacacgcagatcatggacaagcgcaacgactactacgacaacgactcgccgcgcctgcccagccagtcgtatccccgcgacgaccatttcaccgatgcgacgcgggatgtcgccgggcaccgcgcggaaattctcgacgcctacgtctatggcaactgggatgtcgccggtagaccactcacagcccgcctcggccgccaggtcttcaactggggcgaaggcctgttctatcgcggcggcgtcaacaccaccaatccggtcgacgcctcggccttccacctgccgggttccgaggtgaaggaggtgctgatcccgatcgaggcgatcagcttcaatgcgggcctgaccgacaacctgtcgatggatgccttctaccagtggaactggaaggaaacccggatcgacccggtaggcaccttctactcgggcaccgacctgttcgccgatggcggcaacacggcctacgcaagggtcgcttcgctggccaacccccagttccaggacctgtatcgccaactggcgggcaaccatgtcgccggcctgcagggcaatccctacctggacggcaacggcgtgctcaaggtcgccagcgtcggcccggatatcaacgcgcgcaacgacgggcagttcggcgtggccttccgctacttcgcggaatcgctcaactccaccgagttcggcttctatttcgtcaactatcacgccaaggaaccctcggtgaccgcccacctggacgacgcctatgccggggtgaacctcgaccggctggcctcgctcgggggcttcggtagctatgccgagctcgccgccgcagctcgcggtggcaatgcggccgcatcccaggcattgcgactgatcaacggcgcgacggtcgccgatgtgaccaaccaattggttgcccagcgcgagtatcccgaggatatccgcatgttcggcgtgagcttcaacaccacgctgggcaatgccacggtattcggagaactggcctacaggccgaacctgccgatcggcatcgccgcaaccgacgatctgctcggcgatctgatgagccaggctccccggctgaatgccggccagatcgtgaatgtcggcggccagccgatcagcctgggaagctccacggtccacaactatgaacgcgtggagtccttcaacacctccatcggcgccctctacaacttcggcccggcgctgtccttcgacagcctggcgggggtggccgaactggctggtgatcacctgcgcggcagcagtctcaagtacaccgccttcgacggcagcgtgcgccactacgccagcggggccaacaagggcgccggcttcggccgcgacggccaggtcgaccgcaacgcctacggctacaccctgcaactgtcgggtacctggaacgacgtggtagccggcatcaacctctcgccatacctggtctacaaggaggacttcaagggcaactcctcctcggccggcaacttcatcgaaggccgcaaggcccacaccctcggcctcagggccagctaccgcgcctctctcgaggcggaactgcaatacaccgagttctacggcgccgggcagcgcaacaacatgcgcgaccgcgacaacctcggcctcaacctcaagtactccttctga

SEQ ID NO: 344615 - DNA, 1362 bp, Pseudomonas aeruginosa
atgcgcaacctgtaccccctgctcggcgccgtgctggcgcttgccaccagcgccgccctggccgcggtccccgccggggaagcggcgcggctgaagaacgacctgacgcccctgggcgcggagagagccggcaatgccgccggcaccatcccggcctgggagggcggcctgacccagccaccggcgggctatgttcccggacgccaccgccccgacccgttcgccgcggacaagccgctgttcaccatcacccaggccaacctggcgcagtaccaggccaacctgacgcctggcgagatcgccctgttcaaggcctacccggacagcttccagatgccggtctatcccacccggcgcaccggcgcagcgccgcagtgggtctacgacaacgtctttcgcaacgccaccagcgccaggctggcggagggcggcaacggcttcaccgaggcgttcggcggggtgccctttccgatcccggccaacgggctggaagcgctgtggaaccatatcgcccgctaccgcggcagctacttcgtgcgtaactcctcggaagccgccgtgcagcgggacggtagcttcacaccggtcaccacccagtacgacatgctattcaagtactaccagcagggcggcaacttcgccggcctgaacaacaccctgttctactaccagacgctgaccaaggcgccagcgcgcatggccggcgcggcgaacctggtgcgcgaaaccctcgaccaggcgaaggaaccccgccaggcctggacctacaacccgggacagcgccgcgtccgccgcgccccgctgttcgcctacgacacccccggcagcagcaccgacgggctgcgcaccatggacgatacggacatgttcaacggtgcgccggaccgcttcgactggacgctggtaggcaagcgggaaatctacatcccctacaacaactatcggctcggcagtccccaggtgaaatacaaggatctgatcgagcccggacatctcgatccgcaatacacccgctacgagctgcaccgggtctgggtggtggaaggcaggctcaagcccggcgctcgccatatctacagcaagcgcaccctgtacctcgacgaggacagctggagcgtggcggtggtggaccagtacgacagccggggcgacctgtggcgggtgtcgatggcctacctggcgggcctctacgagctgccggccaccggggcgatactggatgtcttccatgacctgcagtcgcgccgctacatggtgcagtggctggataacgagcagcccggcaccaccgactacagccagccggccccgaacgaagactacttcagcccggcgagcctgcgggcgcgtggcgttcgctga

SEQ ID NO: 344616 - DNA, 1917 bp, Pseudomonas aeruginosa
atgccgcagatcgaccgccgtcgacttctccagtggggctccatgttcctggcgtcttccctgaccggtgtttccctggcctcgacgagtcgcaggcaatcccggcccaacatcctgtggctggtcagcgaggacaactgtcctttcatcggcgcctacggcgatccactggccaggacgcctaccctggacaggctcgcccgcgagggcatcctctaccggaacgtatattccaacgcgccggtctgcgcgccctcgcgcttcggcatccttaccggggtgtacgccgagtcctgcgcccccgccaaccacatgcgcgcccgggccaggctgccggatgtcctgaagacctatccgcagtatcttcgcgaggccggctactactgcagcaacaacgccaagacggactacaactgcgatgtcgatccgtccgccatctgggatgaatgcagcggcagcgcgcactggcgctcgcgcccacgggacacgccgttcatggcggtgttcaaccacgagacgacgcacgagtcgcgaattttcttcgacaggggcggcgcggtgcggccgcaggacatccgggtaccggcctacctgccggacactccagccatccgccaggacttcgcctcctactacaacctcatggagcgcctggacggccagatcgccgaacgcctggccgagctggaggaggatggcctggccgaggacaccatcgttttctattactcggacaacggcggcgtgcttccgcgcagcaagcgctattgctacgaagaggggctgcgctgcgcgttgatcgtgcgggtcccgaagaaatgggcgcacctggtggacatgccggcgggtagccaggtcgacacgccggtgaccttcatcgacctggctcccagcgtgctggccctggccgggttgcccgctccagcgcagatgcagggctcggcgctgttcgccgtcgccgagccgaggacgcagcgccatgccttcggcatgcgcaaccgcatggacgagcgctacgacttcgtacgaacggtcagcgatacccgctatcgctacatccgcaactacctgccgcaccgcatctgtggccagtaccaggcattcggctggatggccgggggctaccgggactggttgcgcctgttccaggagggccggctctcgccgcagcaggcggcattcttcggcgaacggccccacgaggaactctacgacctccggcaggatccggacgaggtggccaacctggcggattcgcccgcgcatcgcgaaaagctcgaggaactgcggggtgtcctcgaccggcacatgctgcagatcaacgacaatggtttcatccccgagggttcgccgctggagggctatctcgagagccggaagccgggcgcctacccactgcaacggatcatgcgcctggccgtgatcgccgcgcgtcgcgatccggcctcgctggacgtgctgatcgccagtctcgacgacgagaacgaagtcatccgcttctgggccgcgagcgggctgctgatgttgcgcgagcgggcagcgccggcgcgcgaaagactgttgaagacgctccacgaagacacctcgcagacgcgcatcgtcgccgccgaggccctggttcacctgcatgaggaaggaccggcgatcgcgttgcttgccggctacctctaccccgggcgggacaagccgctgcgcctgcaggcgatcaacgcgctgacctattgcggcgcgccggcgcgagcggtgctgccggcgctcaagacctgcgccgaggacgacgaccaggacgtgcgcagttcctccgagtacctggtgcgggtgctggaagggcgtttcgatccggagaaaccggtgttcgacctgtggttcttcctgcgcaagcgtgtcgtggaggcgatcaggtcacggcttggctga

SEQ ID NO: 344617 - DNA, 1647 bp, Pseudomonas aeruginosa
atggggaaaacgccactcgccatggcggttctgctcgccggcgcgatcatgtcggcgtccgtccaggcgggggcccggcagccgaacgtactggtcatcgtcgccgacgacctggccttttccgaccttggcgcgttcggcggcgagatcgacacgccgaacctggacgccctggccagggagggcgtccgcttcaccggcttccacaccgcccccacctgctcgccctcgcgcgccatgttgctgaccggcaccgacagccaccgcgccggcttcggcaccatggccgaacgggtggcgcccaaccagaaaggcaggccaggctacgaaggctatctgcggccggacgtggtgaccctggcggagcgcttcgccgccgccggctaccgcaccatgatggccggcaagtggcacatgggcctcgccccgcaacaggatccgcacgcccgcggcttccagcacagcttcgcgctgctgcagggctcccacaaccactacggcctggacttcgccgcggacctgaacaaggcgccggagcagaacaccggcggtgcggtctataccgaggatggcgtacggctcgcgcaactgccgcggggtttctattcctccgacttcttcaccagcaagctgctggagtttctcggccggcgtgacgaaggggccaagccattcttcgcctacctggccttctccgctccccattggccattgcaggcgccgagggaagtcatcgagaaatacaagggacgctacgaccagggctacgaccggctccgcgagagccgtctcgcccggcaggcgggactcggcctgctggctccgagcacgcaggtccggccaatggtcatgacccggcgctgggacgagctggatccggaacagcaacgactcgccgcccgcgacatggaagtctatgccgcgatggtggaccgcctggaccagaacgtcggccgtgtcgtcagcgcactcaagcgcagcggcgagctggacgacacactcatcctgttcctttccgacaacggtcccgaaggccgcgataccgccaccaccaaggaaatgccggccagtgccgacaaccgcctggagaatcgcggcaacgccacgtcctacttcggctacggccccggctgggcccaggctggcagcgcgccgtcctggctgatcaagtactatgccaccgagggcggcacccgcaatgccgcgtttctccggtaccccggcctgggcaggtccggcgccgtctcgacggccttcctctcgataatggacgtcaccccgactctccttgaattcgctggcattccgctgaccgacggtagtttccagggccgcgcgatcgagccgctacgcgggcggagctgggtgccctacctgaagggtcggcgcgagtacgtctacggaccggacgacgcgatcggcaccgaagtcttcggctcgcgctccctccgccagggcgactggaagatcaccgataccggcaatggcgcctggcgcctgttcgatgtggcccgggacccgggtgaaacccatgatctctccgccgagatgccggaccggctgaagcagctggaagccgcctggggaagctatgccagggacgtgggtgtcgtcgcgccgcccatggcggtccttccgcaaccctga

SEQ ID NO: 344618 - DNA, 954 bp, Pseudomonas aeruginosa
atgtcaggcgagaccgtccggaccccggacatgcggtatctgccgggcggggtgttccgcatgggctcggaacgcttctatcccgaggaacgccccgtacgccaggtcagggtcgacccgttctggatcgacgttacaccggtcaccaatcgccagttcgccgccttcgtcgaagccaccggctaccggaccttcgccgagaaggctccggagccggcggactatcccggcatgccggcggaaatggccagggcgggctcgctggtcttcacgccggtcagcggagcggtcgatctcgccgatccctctcgctggtggtcgttccgcttcggcgcctggtggcgcgagccgctgggtcccggcagtagcatcgccggcctcgaggagcacccggtggtgcacgtcgcctacgaggacgccgccgcctacgccgcctgggtcggcaaggcgctgccgagcgaggccgagtgggaatatgcggcgcggggagggcgggacggcgaggagttcgcctggggcgatacgctcgaaccgggtggccagatactcgccaactactggcaggggcgctttccgctggaaaacctgctgctcgatggctgggagcggacgtctccggtgggcgcgtttcccgccaatggccatggcttgttcgacatgatcggcaatgtctgggaatggaccgccgactggttccgacagccggccgcaaccgatcgacaggcttcgagctgttgcgccagccgcaatccacgcggtggccgcgaagaagacagctacgacccggcgctgccggccctgcgcatcggccgcaaggtgctgaaagggggctcgcacctgtgtgcggagaactattgccagcgctatcgaccggcggcgcggattccccaatccatcgataccaccaccggccatgtgggattccgttgcgtgcgacgggagccgccggcatag

SEQ ID NO: 344619 - DNA, 1440 bp, Pseudomonas aeruginosa
atggaccgggcgccttcgatggcacagcagcgcattccgatgatgcgcaagatcgctctgggtgcaggcgacttcggggtgaacatctattggcagatcgcttcgctcttcctgctgttcttctataccgacgtccttggcctatccgcctacgcggcgggcctcatctacatgagcgcgctcatctgggacgccgtcgtcgaccccttgatcggcgccctggccgaccggacgcggacccgcctgggccgcttccgcccctacctgctgctgggagcgctgcccctggccgtggcgttcgtcctgatgttcctgctgccccgcggagaaggcccgcaattgctggtgttgacggcagcgacccaccttgccttccggaccctcttcgccctggtctcggtcccctatgcgtcgctctacgcgcgggtgacccgcagcagcgaagaacgtgcgaccatggccggcatccgcatggtattcgccattctcgccgcgatggcggtgtcggcgctgaccctgccagccgtccgctatttcggtggcggcgcctactcctggggcctggtgaccgcgctcttcgcctgcgccgcctgcgtcatgctgtggatcgccgcgctggcggcagggtccggcgatgcctgcgaggaagacaccccggcggacacctggcccggcatgcgctacgcactcgccgcgctgctgctcaaccggcctcttctgctgatgctcggcatcgccctgatgaactcgttcgccggcaccttcttctcgaagaaccttctctactacttcaagtacgtgcgcaacgacgccgacttcggcggcacggcgctcgccttgatggctgtcgtcgcggcgctcgccgccccgctctgggcacaggtggcgcgccgctgcagcaagcgtttcgccttgctgctcggtacggcgttctatggcctgggcttcgcgctctggttcctgtgcagcgctgccggctacgtcgggctcatgatcgtgctgactttcatcgccatcggcgtcagcgccaacgccgtgtgcttctgggcgatgattccagataccgtggagtatggtcagtggcgctcgggcatccgcaccgagtcgctgatcgtcggcacggtgatcttcgcccagaaggccgcgctcggcctcgccgctggcgccctgggcatggtcctgggagaaatcggcttcgtggccaacagcgtgcagtcgccggataccttgcaactgctcgtggccacgatgtcgctggtgccgctgctgggcaccacgggcgtgttcctgctcacctggtactaccccatcggtcctgccgaacatcggcagattctcgaagccctgtccgaccccgcgcgacgcgaaagcgccacgggacacgagacaccgccgctatccctctccttcctgccgaagaagagcggtgaggcgtcctga

SEQ ID NO: 344620 - DNA, 942 bp, Pseudomonas aeruginosa
atgtgcggactgatcggcctggactggggttcctccagcctgcgcgcctaccgtttcgatgcgcacggcatcgtccgggagacacgccaccgcccctggggcgtcgcccagctcccagctggcggtttcgagaccgccctggccgacatcagcagcggctggccgagtctgccccggttggcctgcggcatggtcggcagccgtcagggctggcaggaaatgccctacctggagcttccgaccgacgcgcctcgattcgctcgcgccatcggtcgcctggccatgctcgatggaagcgccctgcaccttgcagcggggctccgcaacccgggtaccgccgacgtgatgcgtggggaggaaacccaggttttcggtgcgctcggcctgtaccccgagctggccgcggagtccgagtggatcctgccggggacccactgcaagtgggtccgtgtgaaggacggccggatcgtcgagttccataccttcatgaccggcgagctccatgcgctcctgctccgccattctctgctcgccaccggacggacggccacgtcgcatgtcgccggggcgttcgagcgcggcgtcacgagcgcgcgcgacagcggggctgagggcgtgttcgcccgcctgttttcaacccgcgcgctgcgcctggcagggcaactcgccgacgcggaagtcgcctcctatctgtcgggcctgctgatcggcgaggagttccgcgccggtctcgccgccggccgcctgcgcgccaccgcgccatgcctcatcggcgaagccgcgctgtgccagcgttatcgccaggccgcccggctgttcgatctccatctgccggagccactgctggaagccagcgcacacggactctggctgcttgcccatcatgcgggcctcctgtccgccggggcgcccctgacgccaaaggaaccatcctcatgctga

SEQ ID NO: 344621 - DNA, 645 bp, Pseudomonas aeruginosa
atgctgaacagttggctcgaaccactcccactcgttgccatattgcgtggcatcgagccggacgaagccgtcgacatcggccacaccctggccgatgccggtttccacatgctcgaagtccccctcaattctccctcccccctcgagagtatccagcgcctccgggaagtgctgggagagcattacctgattggcgccggcaccgtgacgagcgaagaccaggtggaggcagtcgcctccgtggggggagacctgatcgtcatgccgcacgccgacgcccgccttatccgcgccgccaaagccagcgggctgcgctgcattcccggagtcgccacacccagcgaagcgctgcttgcgctccaggccggagccgacgcgctgaagctgtttccggccggcgccatcacgcccgacgggctcaaggcctggcgagcggtgctgcccggcgatctgccggtccttccggtaggcggcatcactccggacagcatggctacctggctggacgccggggcccagggcttcggcatcggcacggcactctacgcgccgggcctggaagtcgccgcggtcgccagccgcgccctcgcgttcgcccaggcctggacgaacgcctcgaccagcagaagggagcaacgcccatga

SEQ ID NO: 344622 - DNA, 1149 bp, Pseudomonas aeruginosa
atgaagatcacccgactcaccacgttcctggttccgccacgctggtgcttcctgcgcatcgataccgacgccggactgtgcggctggggcgagcctgtcgtcgaaggccgggcgcacacggtggccgccgccgtcgaggagttgtccgattacctggtcggcaaggacccgcgccacatcgaggacctgtggaacgtcatgtaccgcggctgcttctaccgtggcggtccgatcctgatgagcgccatcgccggcatcgaccaggccctgtgggacatcaagggcaagcacctcggcgtgcccgtccatgagctgctcggcggaccggtgcggcagcgcatccgcgtctactcctggatcggcggagaccgtccggcggacaccgcccgggcggccagggcggcggtggagcgcggcttcacggcggtgaagatgaacggcaccgaggagctgcactacatcgacaaccacgccaaggtcgacaaggtcctggagaacgtccaggcggtaagggacgcggtcggcccgcacatcggcctcggggtggacttccacggccgggtgcacaagcccatggcgaaggtgctgatgcgtgagctggctccttacaggctgatgttcatcgaagagccggtactctcggagcacctcgaggcgatcccggagctggccgccatctcccccgcccccatcgccctgggcgaacgcctgtattcgcgccatgacttcaagcaggtcctcggcaggggcggagtcgacatcatccagcccgatccctcccactccggcggcatcaccgagacccgcaagatcgccgccatggccgaagcctatgacgtcgccgtggcgctgcactgccccctgggaccgatcgccctggccgccaacctgcaactcgacgcggtgtgccacaacgccttcatccaggagcagagcctgggcatccactacaacaccgccaacgacctgctcgactatctgctggatcgcagcgccttcgcctaccgggagggctacctgagcatacccggcggccccgggctgggcatcgagatcgacgaagcctacgtcagcgagcgcgcagccatcggccatcgctggcgcaacccgctatggcgccacgatgacgggagcgtcgccgaatggtaa

SEQ ID NO: 344623 - DNA, 798 bp, Pseudomonas aeruginosa
atggtaagcctggacagccacattccgccggcatcggcggggttcgcccgctatcccagcctggtcgaccgcaacgtgttgatcaccggcggcgccagcggcatcggcgccgccttcgtcgagcagtttgcccgccagggcgcccgcgtcgccttcctcgacgtggatgacgcgggcgccgccgccctcctggcgaggctggacgacgcacgtcgcgttccgtactacctgcattgcgacctgaccgacctgggcgccctggagacagccatcgcggccgtgcgctcgcggctcggcgcgatcggcgtactggtcaacaacgcggccaacgacacccgccatggcctcgacggtatccaggaagaagacttcgagcgcagcctggcggtcaacctgcgccatcaggtcttcgccacgcgggccgtcgtaccggacatgcgtgaccagggaggaggctcggtcatctgcctgggctccaccggctggatgaagaagaacccgggctaccctctctacgcggcagccaaggcggcgattcgcggtttcgtcaacggcatggcgcgggaactcgggcaacagggcattcgcatcaactgcctggttcccggctgggtgatcaccgacaagcaggcgcagctatggctggacgacgctgggcgggaggaaatcaggcgctaccagtgcatgcccgggctcctgcagcccgaggccctggcacgcgccgccctgttcctcgcggcagacgacagcagcatgtgcaccggacaggacttcatcgtcgatggcggctgggtatga

SEQ ID NO: 344624 - DNA, 891 bp, Pseudomonas aeruginosa
atgaaaagcgctgaaatggacgtcgtcctggccgccggcaatctgctcggcgaagggattctctggtgcgaacgcagcaaggcgctgttctggaccgacatccagcgcgccacgctgtatcgcctggatcccgaggacggcaccttgcgacagtggcccatgccggaaagactggccagcttcgccctctgtgaagccgagggctggctgctgctggccctcgcttcacggctggccttcttccgcctcgccgatggcgagctacgctggctgcacgatatcgaaccgggcctgcccacccgttgcaacgatggcgcctgtgatcgtcagggacgtttcgtgttcgccaccctgcatgagagccgcgaggggccgccgcaacccatgggtggcctctggcgcctgggactcgatctggagctggaacgcctgcccctgccagcggtcgccatcggcaacagcatcgccttcagcccggacggtggcgtgctgtattactgcgattcccctacgaggcgcatccaatgctgcccatacggcgacgctctgggcgcaccccggctgttcgtcgaactcgacgatgggcgaggcgtgccggatggctcatgcgtcgacagccagggacatctgtggaacgcccagtggggcctcggacaggtggttcgctatgcgcccgatggagaggtacggcagatcgtcaccctccccactccgcaacctacccgcccggcattcggtggccccggcctggaccggctgtacgtcaccagcgcacgggaaggactcgtcgacgccggagcggatgcagcgcgcctggctggcgcgctgttccagtatcgtccgaacgtccgggggctacccgagccgcgcttcgccgcgagcccggattga

SEQ ID NO: 344625 - DNA, 537 bp, Pseudomonas aeruginosa
atgggttttgaacaacttgccgagctgagggaccgtctgcgggcgcaggcggaacaggcgaaaccggccaaatcggctcaatccaaagccaaggcttctccagggcgtgcggcgaagaagcgcgaacccgtggatcccgaggtcgaggccatctggcggttgcaacggcattttccgctggcgtttccgaagaatcctgccccaaaggtgccgctcaagcagggcatcctcgaggatgctcagcagcatctggagagcctcggtatcaccgccgagcaactcaagcaggccatcgccacctggtgccagggcaaccgctactggtcctgcatggtggaagatgcgccgcgcctggacctgcagggccaggtagcgggcaaggtcactgccgagcaggcggtctacgcgaagcgccaggcctcgcgccgccagcgtgaccagatgcgcgagaagcgcgccaagcgggcgcggaattccgccgaggagtccgcccccgtatccgagggcggtgagacgccggcgcctgaggcggtctga

SEQ ID NO: 344626 - DNA, 720 bp, Pseudomonas aeruginosa
atgatgacctgcgatcccgtcaccggcgcctgcctcctgcccgagccagagtctgcgcaaagcgttgcgcaatctggggcgcacgccgctccaaccgttcactacatcggtgatccgatgtgctcctggtgctggggcatcgagccggtggtcggcgagctggcggccttctgcgccgccgagggcatcggcttcgcgctcacggtgggtggcctgcgcgccggtggcggcgatccctggaacgcggatttcatcgagttcctgcgcgccgaatggcgacgtatcggcgaagtcaccggccagccgttcggcttcaccctgctcgatgcgccgtatttcgactatgacaccgagcccgcgtgccgggcggtggtctgcgcacagatactcggagcggacagcgcggacccgagcgcccggcgtttcttctccgcggtacagcgcaggttctatgtcgagagcagggaccccaaggaaacctcgttctatgccgacctttgcgaggaggcaggcctggacttcggggccttccgttcgctgttcctgtccgccgaggcccggcaggcgacgcaagccgctttcctacgttgcaggcagtggggcgtgcgtgcgttcccgacgctcgctgtcgagcgccgcggggaactgctattgctcgccgccggcttcaccacccgtgagcaggtgctgtcgcggctgcggcggggcctggctggctga

SEQ ID NO: 344627 - DNA, 447 bp, Pseudomonas aeruginosa
atgtccaaggccctgctctgcgcattgttcctggtagctcccatctgcgcctgggcgcaggatcttccgcgttctccggaagaagtgccgcaagccctggagcgctacttcaacgccggtgacctcgatggcctggcatcgctgtacggggagaacagtgcgttcgtgagcgcccccggtacccaggtcctgggtgccgcccggatccggagcgccttgcagcggttcatggcgacgggcgcaccgattcgattcagcgttcgccaggtctaccgggccggcgacatggcgctgatcctgggggactggcggatcgagggcgaaggaagggatggcagtccggtggacatacgtggcaccgctaccgacgtggtgatccggcgagccgacggcagttggatatacgcgatcgacaacccgttcggcgttgccccggcggcgcggtga

SEQ ID NO: 344628 - DNA, 945 bp, Pseudomonas aeruginosa
atggacaagctcacagcgatggccaccttcggcgcggtggtagaggccggcagcttcacccgcgccgccgaacgactgtcgatccccaaggcgcgcgtctcgcagcgcatctccgacctggaacgccacctcggcgcacggctgctgcaacggaccacccgcagcctcaacctgaccgaggacgggcgcgcctactacagcaagtgcgcttccatcctccagcaggtggatgagctggaagcgaccctcaggggtggcctgatcgaaccccgcggcagcctgcggatcgaggccctggcctcggtcgcccgctgggtgctcgctccccgcctgcacgagttccagcgccgctacccgcaactgacgctcacgctgtgcgccagcgaccgcgtcagccacctgctcgaagagggtatcgactgcgcgatccgtggcggtacgctgccggactccagcctggtcgcacgccacgcctgcgacgtgcggctgggcctgtatgccgcgccgggctacctcgaggacgcgggcaacgcacggcatccccgggagttgcgcgaacatcgccggctctcctggttcaccggccagcgtaaccctttcgcctggaaactggagtcgaccgacggctccttcgatctcggcgcaagccaaggcctgcgcttcgacgatcccgacgtcgccatcgcctcctgtctcgccggcagcggcatctgtccggcggcccccttcgcggtggaaagctgggtgcgcgctggcgcgctggtgccggtcctgccgcaatggagcttcgcgccacgccccatccacctcgtctaccctggcgaccgccacctttccgcgcgggtacgctgcttcgtcgactgggccctggagctgatgcgccaatcgccgagcctgtccatgagcccgcaggaattggccggaaacacggcgggacgcgaatga

SEQ ID NO: 344629 - DNA, 1554 bp, Pseudomonas aeruginosa
atgatgaaagcgcagagatgggcgacctccagatggtcgggctatctggtgttcctcgtcgttttgctcgcaaccacattgtctgccctgaaagcaagccaccctgttgcagaacgccttctcacccgctcgatcggcaaccagggcgcggaggtgatcgcacaggtcgatcaggtcatggcctcggtgatacgcacgctcaccgccatcgaccgctccgggcatgccgcgtgcagcgcggcggacctgtcgctgctgcgttcggaactgatgcgttcgaagttcaccaaggacctggggcgcctggaaggcaacgacctcgcctgtacgacgatgctgggcgtcctgcctgaaccttttgtcccgaagcagcgatccatacccctcgacggcggcctgcaacttttctggaaagcgggactgctgctggaccccagcaccctgggtgtggtggtccgggcgaagcgatccagcctgctgatcgacctcgatgccttcggcgtgccaacctcgcccggcctcaactatgtcatctcgctccgcgacgaaccgacaccgctggtcataggcctggacaggcacggcctgcccggctacatcgagaccgcgcgggtggcgggtttcgaacagggaaaaaggttctgctccgcacgcgtcccgctgtgcgccaccgtggtccaggctcgccccgcagaagaacacgccaaccgccaggcagcctggctgctgggcagtgccggcatactgctgggcagcgccctgggcggcctggccctgctcctgcaccgccgccggaccgcactctcggcccagatccggcgggcgctggcgaacggcggattcaccgtgcgctatcaaccgatcatgcgcctgggcgaaccgccggagatcgtgtcggccgaagcgctgatccgctggcccgacggcccggccccgccggacgtgttcatcgccgaagccgagcgctgcggcgtgatcggcgccatcacggcattcgtcctggacaccgtactggaggacatgcgcggcctgttcgagaagctgccggacttccgcgtggccatcaacatcagcaccccggaactgctggacggcagtctggcggccaccctgcagcggctctggccggaaggccttggccggcaccatgtcggcttcgaactgaccgaacgctccacagcggaactgcaggacatcctcccgcaactcgaacgcctgcgcggacaggggcatcccatctacatcgacgacttcggcaccggctactccagcctggcgcagttgcagcacctgccggtggactacatcaaggtcgatcgctccctgctacccggctcggcccggcagcgcgcctcgctcattccggagatcctcgccatcgcccgccggctcgaggtcggcctggtcttcgaagggctggaaacgcgggagcaggcgcaactgctggagggcgtcggacagacgatcttcgcccagggctggtatttcggccatccggaaacacccgataaactgcaggaacgcctgaaaccggggacacggcgctgcgagtga

SEQ ID NO: 344630 - DNA, 1029 bp, Pseudomonas aeruginosa
atgagccagtccgagaacatccagtacgacttcgagtggcgaccactcagcaactacctcgccgtgcaacgcatcgtcccgccggacctccaccagcccctcggaaccgtctcccgactgcccagcgaggcgctctacgaatggatagtcctgaatgcccgttcgcccctggaaggactcagcctgggagagcactaccggctttccgactacggcgtcgcgggcctggccctgcaaagcgccggcaccgtggcagaagccctgcaactggtcaggaccaacatgctgctgttcaaccgggacgtcagcggcatcgaggtgaaacgctccagttgcgataccgtcgacgtggacatccatctgcagaccagaccggactggccggcaccggcacgcatctatcatgcgaatgtcctggcgtcggcggcctacgcgctgttccgcgacctgctgctgggcgacctggaactggtccgtctgcgcttgccggagcgacccggcgaggcaacgccatacgaggaatattttcgggtaccggtgtatttcgctggcgcgggcatcaccttcactcttccggcggatctgctcgaaacccgcatcgccaccgccaacgccgcggtcttccaggcctccctggcgctcagcagcgaaaccttcaacatccgggtcgcccgggaaatgggcggttatcggcagcgcatcgtgtcgctgctggagtcgctgcaggaccgctatccgaacattgcctgggtcgcccgacaattgagggtcaccgaaagaacgctgcgccggcggctcgccgaagagggcacgacctacagggcggtgctcgacctggtacgccgggacagggcccggcaactgctccggaacgaatgcctgcgcatcgaggatatcgccgagagactcggctacatggacacctccagctttcgccatgccttccgtcgctggacgggacaatgtgccaacgattatcgccaggatcacacccagccccgggcagtgcgccgcaagggcgagcgctga

SEQ ID NO: 344631 - DNA, 810 bp, Pseudomonas aeruginosa
gtggatatcgcactgcgcggcagcacctggcacgactcactgggagcgttgatcgaacggctggacagggcggatttctggcgcagcctggcggggacgcttggcgagttcgcgccggtcgacaactgggcggcgctgatattcagcaattccactccgctgattctttccttcatggaggaggaaagagaggaagtcgaacccgatccgctgatcagcagatatataaccgggctctatcgtcaggatcctttctacctgatatccagaacctgccggcatggtgggctgtaccatcttccggatatcgtctcggaacagtttgaagcgaccgaatattacaatgcgtacttttctcattatgtcgtgacggatgaagttcaatataacgtcccgctcgaccacgaaaggaccttgtgcctttcgctgggcagtgagagtcgcttcggcgccgaacagatcgccctgttcgaattgcttcgtccctgggtgatcgcgttgatgaagaagcgtgtccatttcgagggcgcgctccgggaggaggcgggcgtggaggcgaaggtggaggacatggacatgcaagcctggaaaggattgatctcaccgctcaccgcgcgggagtcggatgtcatccgcctgatgctcgatggccattcgaacaaggagatagcggatcgactggctttgtctatcgccaccatcaaggtccatcgccggcatatctacgcaaagttgaatgtgaagtcccactccgaggtcttcgccctgatgatcaaccctccggcgccacgggccgtggccgcgagatag

SEQ ID NO: 344632 - DNA, 1908 bp, Pseudomonas aeruginosa
atggtcaaggcgaggatctacgcgggcatcgcgatcatcgtggtgttcggcgtggtatcgatgctctacgtctaccgcggcctggaggaggtcgtcgggcacctgaccaggctcgagcgcatcggcgcgccgttcagcatcgccgccctcgagatggagaagaacgtcggcgagtacgcgttcggggtattgcagtacctggcccggcccgatccggagatccgcgcggagaccgtgaacgacagcgacgactttgcccgctatcacgccagctacatgcggttgagcaggagcggacgggaaatcgaactggggcgccacctcgccagcgacttcggcaagctcaccaggatcggcgccacgctgatggataggagggaccgcctcgaccgcgtcttcgcgcgcgtggccggccagttgcagcggatcgaggcggtcgccggccagccccaggcctcgacgctgccggggcgggagccggaccggaggcgggcgctggccgcgctggcgaacctggaggcgcaggcggcgagcacggcgtcccggctttccgccttcgcgcacgggccgacgccgctggcgacgcgccaggtgctggagagcctcgacgcgctcgagcgggccgtctcgggttatcgccgcttgccgttggggatggcggcgcggcggcgcggggacgaggtcgaggcgctgcgcgttctggtcaggagtggcgtcgaggaatggctcgccggcgaggacgccctgcatacccttgccagggaattcgccaggctgcaggaacacatcgacgatgtctgcgacgaggaggtcgagccgctggcggcgaaggggttgacggctccgcaggaagaggcggaccgaatcgcgctgcgggtgctggacatgctgcgctacgcgattcccctctacctgctggtcgcgctggccgtcggcgcctcgctggtgctggcgatcgtccggccgttgcgaacgctggcgtcgggaacccgggcgatcggtgcgggcgacctcgactaccgcatcgccgagcggggcagggatgagttcgatgacctcgcccggcagttcaaccggatggtggcgcggctgcaggaaagcacggtgtccaggggactgctggaggacagcgagcggaggttgcggctgacggtcgccgagctgcgcgaggagatcgcggaacgcgaacgctccgagcgtgaacgggaaaagctgcaggcggagctacgccgaagcgaggcgatggcggccatgggcagcctggtggcaggcgtcgcccacgaggtgcgcaatccgttgttcggcatctcctctaccctggatgcgctggaggcgagcgccaacggcggcaggggcggcgagcgccaccgggaagtgctgcgccgcgaggtgggacggctgaacaagttgatgacggacctgctcgaatacggccgcccaccgggcgaggcgttcgccagcggccgcctcggccaggtcatcgccgaggcggcgcgcatctgcagcccggccgccgaagcggcgggcgtggacatcgtccagcgggtggacggttgcgacggcgcactgccgatgaatcatggccgtttgctgcaagtcttcgtcaacctgatcgagaatgcggtgcagcacgcgccggccggcagccaggtgacggtggccgccaggatgctcgcggacaacggccagcgcttggccgagtgccgggtggaggattccggcgccggctttgcgccgcaagacctgccgttcatcttcgatcctttcttcacccggcgacgcaaaggcaccgggcttggcctggccatcgtccagcgcatcgtcgaagagcacaagggctcgatcgaggctggcaacgccgcgcaaggtggcgcggtcatgcgcctgcgcctgctcatcccggactga

SEQ ID NO: 344633 - DNA, 1359 bp, Pseudomonas aeruginosa
ttggcgagaacccgaatactgatcgtcgacgacgaggacagcatccgtttcggcatgcgcgagttcctcgagtcgcgaggctacggcgtggtcgatgccgacagctgccagcgggcccgcgagctgttccaggcgtcgccgccggatgtcgcggtcatcgactatcgcctgcatgacggcagcgcgctggacctgttgcgcgacttccggcgagtcgagccggaggtgccggtgatcgttctgacagcctacggctcgatcgacctcgccgtgcaggcgatcaaggagggcgcggagcagttcctcaccaagccgatcgagatgccggcgctgcacgccatcctcacgcgcctgctggacaaccgccggctgcagcgccagcagcgggtcgccgcgacccgcgagaagcgcgagcggatcgacccgctgttcggcgagagtcccgccatccgcaagctggccgagcaggtcgagaagctgatgggcagcgacagcccgatcctcatcctcggagagaccggcaccggcaagagcctgctggccaagtggctgcatcggcacggtccgcgcgccgacgagcctttcgtcgacctgaattgcgcgggcctgtcgccggacttcctggaaaccgagctgttcggccacgagaagggcgccttcaccggagcgagcgccagcaagcagggcatcctcgagatcgccgatggcggcacggtcttcctcgacgagatcggtgatgtcgatccgcgcgtgcagcccaagctgctcaaggtgctggaggaaaggcgctttcgccgcctgggcgcggtacgcgagcgtgaagtcgacatccggctgatcgccgccacccaccaggacctcgccgacaaggtcaaggcacggaccttccgcagcgacctgtacttccggatcagcagcatcccgctgaccatgcccgcgctgcgcgagcgccaggaggatatccccatgctcgcgcggatgctgctcgagcgcctggccggcgatgccggccgcagcgcgcggctcagcgaggacgccgaacaggcgctgcgtggctacgcctggccgggcaatatccgcgagctgcgcaatgtgctcgaacgcgcggcgttgctgtgcgctggcgataccatcagccgccgcgacctgcgcttcgagccggtcgccctccaggatgcgccggccagcgataccagcctgacgctgcaacaggtcgagcggcagcacatcaagcgggtactgcgcgaagtgggcggcaaggtcgagcaggcctcgctgcgcctcggcattccgcgcagcacgctctaccagaagatcaagatgcacgggatcgtcgcagcgcagaacgaacccggctga

SEQ ID NO: 344634 - DNA, 1134 bp, Pseudomonas aeruginosa
atgaagaagaccctgttgctcgctctgcccatggcatgcctggcggcggtgacggacgcgggcgcgttcgagatcaagctcggcggccgcctgcatctcgactacgcggcgcaccgggccgacgtcaagccactggacaatggcttcctcgtgcgccgtgcgaagctgggtgtcgacggcaggctcgttgacgactggtcgttcgagctttcctacgattttgccgatccctatcaggtcaccgatgacggttccgccaaggtgggcaggttcaaggatggcttcgacgacgtcgcgctgcgctacgagggttggaagcctgccgatatagacatcggccagttcaaggtgccgttcgggctggaggaactgaccagctcgaacaacatcggcttcatcgaacgggcattgccgaccgccgccttcgctccggcgcggcggcttggcgcgggactcggcaggaaccgcgagcgctacaccctgtcggccatgggcttcggctcctccatcgatggcggcgaccagggccgcggtgccgcggcgcgggcgaccttcaccccggtcgacggtggcgcgggcggaaccctgctgcacctgggcctcgccgcggtggtcgaacgcccgaagggcgacgtcaagttcaatgcgcggccggaatccagggtcgcggacgtgaagctgctgaacaccggcacgctgcgcgatgtcgagcgtatcgagcgcggcgggctcgaggccgcctggcgctccggcccgctctcgctgcaggcggaatggatgcgcgccgcgctggagcgcagccacggcagccccgatgcgcacctgcggggctggtacgtgatgggcagctggttgctcaccggtgagtctcgccagtacaggaacggtcggttcaggggcgttccgctgcagcggccgggtggcgcctgggagctggtcgcgcgctacagccatctcgacctcgacgatggcaggctgcgggggggcgaggagagcaacctggcgctgggcgtcaactactacgccaccaagcacctgcgtatcatgctcgactacatcgacgtgcgcagtgagcgccggggcaggagggacgacccggagatcctcgcgctgcgcacgcagctggcgttttag

SEQ ID NO: 344635 - DNA, 957 bp, Pseudomonas aeruginosa
atgcatcgcaaactactgccgaccgccatcctggccagtctcgcgctattgacggcctgcgaccgggacgccgatgtcgccaggacatcatccgcaccggcgccatccagcgtgcgctccgatccgacgcgcttcgccttcccctccaccgcgagggtggacggcgtcctcctgagcgagctttccggcctggcctgggacgcggagaagaaacgcctgtacgccgtatccgacaccggccacctgttccacttccgcctgcgcctcgacggtgacacgctcgccgagctcgagccgatcgccgccagcgccctgctggatgcgcaaggcgctggcggcaacgccggggaattcaatgcggaaggcctggcgctgctcgatgcggcgaacggccgggcggctggcgaactcgtcgtcgcgctggaaggcaaaccgtccaggctcgcccgcttcagcgttgatggccgtctgctgggtgagttggaagtaccgtcgccggccgccgacctgaacctctatcgcaagaagggccgcggcctggaggcggtggcgatgcatcccgcgcacggcctcctgaccgcccccgagtcgccgctgctgggacagccggacgagcgccatgtggtgtacgccagggggcggcactggtccttcgtgcggcagtcgcccggcagccggctcaaggcgatcgacgtgctgccggatggcagcctggtcgtcctcgagcgcaacaaggcgggctcgaaggacgcgctgtcggccagcgtgcgccgcatcgatctcgccgcctgtggcgcggacggcctgtgcgccgccgaggtcctggccatccttcccgtcgggccggacaacttcgagggcatgaccctgctcgactcccgccacatcctgctggtcagcgacaacgccggcctggtcaaccggggcacgctctttgtgctggtggcccggccatga

SEQ ID NO: 344636 - DNA, 849 bp, Pseudomonas aeruginosa
atgaacctgcataccgagccgctcgccttcgccccgcgccgcgcggtgtcccgagccgacgaggcttgcccggcccgtccggaccagctgttccgcgccatcggcctcgaacggctcaatgccaccgcctcgatgctggtgcgccgcgacaacaagtacgtggttcgcgaggaatgcctggcgccggcctggacggaactggccgaacgcttcgacatgctcgagatcgacgggacgcgcgacttcacctacgacacctgctatttcgacgatcccgcccacaccagctacttcgaccaccaccgtggccgccgccagcgctgcaagattcgcatgcgtcgctacgtcgacgcccgcctgtgcttcgccgagatcaagctcaagggcaagcgcgggcagaccgagaaacgccgcgtggcctgcccgctggagcaatacgggaggctggacgaaggcagcgaggcgcagatccgcgcggcctaccgcgaactctacggtcgcgcgttcgagcaggtgctggagcccgtcgtgtggatgcgctaccgcaggacgacgctggtcgccagggagggcggcgagcgcatgaccatcgaccgtggcctggtgttcatggatgcctccggcacctgccggatagacgatgacctggtcatcgtcgagaccaagtcgggcaacgccaacggcatcgccgacaagatcctccgcgccctgcaccagcatcccaccaatggcgcgtccaagtactgcgtcagcctggccgcgctggggagggtcggcaagtacaacaagctgctgcccgcgctgcgcaagctcgacgcgcttcccgtccgcgccgcgtggccggcgtga

SEQ ID NO: 344637 - DNA, 585 bp, Pseudomonas aeruginosa
ttgctatcagctttccttcacacccccctgttcgaactactggcccgcttctgtatcgacatcgtcgcggcactcttgttgatcttcggcatgtattaccggcgccaccaggacaaggaactggtcaccgccgcggcgctgttcaacatcttcgtgttcgccgtgctgaccatcctctccagcgtcgaattcagcgtcgccgccggcttcggcctgttcgccatcctcgcgctgttcaccctgcgctccgagccgatcagcaagatcgagatcacctatttcttcggcagcgtcgccatcgcggtcatctgctcggtacagggcaccacgttgccgctgatcgcggcgacggtgctgctggtgctgctgggcgcctacgtattcgaccatccacggatcctgcgctcggtggagaacatcaagatcaccttcgaccagatcaacgtgcatgcgctctccgaccccgcggcgatgaacgccgacatcgccgagcggctcggcgtggaagtggtgtcctacgaggtccgctccatcgattacctcaatgacacggccagcatgcgggtcttctaccgcaaacgttga

SEQ ID NO: 344638 - DNA, 309 bp, Pseudomonas aeruginosa
atgaaagggtgtatgggtagggggctctggcgctgggcgctgatgctgccggtgctggtgttcctgctgggcgagtctggcgggccgcgggaccagcggcgcgccccggcggtgcccgcgcaggcgcgctacgagcaggccctggaaggcgcgctgcgcggcgagcgtggcgccgcgcggcaggccgaggcgccagcggccgacgtcaccgaggcggggcccccggcgcgcctgcgcaacggcctgcgttcgctggcgcgcctggcgttctggggcacctacggccccccggcgctgttcaggccgtga

SEQ ID NO: 344639 - DNA, 1170 bp, Pseudomonas aeruginosa
ttgttccaggcgctgcttccagcccagccgcgcttcgcgattgagcatgcggcgcaccgtggcttcgagttcttcggcgggaatcgcgtcgagtcgttcctggcgctggcgcagcagggccaggaattccaggtcggtggcttcgagctggccggcgcggccacggaagcgctggtaggcgaccagttgcggcagcgcctcgcgcaggcggccgagggccggcaggttgctctggttgccggcgatggcgcggtgcagctgttccagcagttcgtcgccgagccagtcggcgagcaccttcagtttgtccaggctgagctggcgtgcggcctggcggatcagcgcggcgtcgaggtcgccgagcagcgcttcgaagcgctgtttctcgccggtgaggatcaccgcgtcgagctgctcggcgcgcggcgcctgggccaggccgtgagccagggcctggatttcgcgcagctgctggctggcatggccggccaggctggccagttgcgggccggcatcggtggcgactgtcgccagccccaggctctggtgcagcgccgccagttgccggcgcagcggccgccactggcgctccaggccgcaggcgccgaggagggcggccaggcggctgtcgtcgtcggcctcgccgtgctcgcgcaggaagcgccgcaggcggccgcgccgcagcaggcgcagcgggttgagccgggccagccaggtgcgtgcctcgagcacctggcgggcgtgggcctggaagcgttcgaggttgttctcttcgagcatggcgagggccggcgacagcagcggcgcatgccgttcgaggtcgagctggcgcagttgccgttcgatctgctcggcctccgccaacaggccgtcgccacggctcggctgtcctggcgcggcgtcgcggaacagcggcagccagtgggccaggcgctggcgttgctcctcgcgcaaattcagcagggtaccgacctggcttgccagccaggcgcggtagggcgtcgggtcgtcgacctcgaagctcgccgggtgttcgtcgagggctttctgccgggcgttctccgcttcgccgaaggcgcgcaggctgtcggcgaaggcttgcagggtggcctggtcggtggcgaaggcgcgcagttgcgccagcgggctgccttcgtagcgggccggtag

SEQ ID NO: 344640 - DNA, 1755 bp, Pseudomonas aeruginosa
atgccgcctcgccccgatgattttccgctgaaccacgctcccctaccgcccgccgcccaccggccaccccgcaaccaggccctgcccggccaccgcgccggccttgccggcctggcgctgctgctctccagtttcggcgccacggccgcgcctccctcggtaccggatgccggccaagccttgcgcgatgcgcaaagcaatcgcctcagcctgcccgacccggtgaagctggatccggaaaaacccaagccgcaagacaaggtcgcggccgacgcggtgccggagggcccacgcgtgctggtcaaggagttccgggtgggtggcaatcgggtattcgactccacgcgactgctggccctgctcgccgacctccagggaagggagctgagcctggcgcagttgcatgccgccgccgagcggatcggcgagttctatcagcagcagggctatgtgctggcccgtgcctacctgcccgcccaggagatcgacaacggcgcggttcgcatcgaggtcgtcgagggacgctacggccaggtcgacttgcggaatacctcgcgcaccctcgaccgggtattgcgacaacccctctccgccctggaaagcggcaacgcggtgaagggtgacgaactcgagcgcagcctgctgctgctcagcgatattccgggcgtggaggccaagggcaccctgctgccgggccaggcgcccggcaccaccgacctgcgcatcgacgcccagccggcgccactgctcagcggccgcctggaggcggataactacggcgacttctacatgggcgagtatcgcctgggcggcgtcctcgacatcaacagtccgctgcgcctgggcgaccagttgaacctgcgcctgctcggcagcgaccgccaccagcgctactaccgggccgcctaccagttgccggtggggccgtggggctcgcgggtcggcctggcacgttcggaaacctcctatcggctggcccgcgacttcactgaactggaggctcacgggcgcgccaccatcgacagcctgttcctcgcccagccgctggtacgcggccggaccttcaacctctctacgcagctgcaattcgagaacaagcggctgcgcgacgacatcgatctcttcgattacagcaagcacaagaaaatccgcctctggacggcgggcctcagcggcaacagccaggaccggttgctcggcggcggccagaacggcttctccgtggcctacggccatggccggctggacatgaacagcatggagcgccgcgccgacaggcgaacagccggtgccgtgggccgtttcgacaagctcagcgtcaacgccgtacgcctgcaacgcgtgaccgaccgcctgcaattgttcacccagctcaacgcccagtgggccagcggcaacctcgacagcgcggagaaattcgacatcggcggcccctacggcgtacgcgccttccccgcgggcaccggccgaggcgtcggcgacgaaggctggcaggccagcgcggagctgcgctacagcctggcgcccggctggcaactgagcaccttcgtcgaccagggcgcggtgaagttccagaagagcccctggaccccggaaagcaaccacaaccgcatgggtggcgccggcaccggcgccacctggtacggggcggaccaccaggtcagcctgaccgccgcctggccgctcggccaggagcgcgacatcgtccccaaacgcaccccgcgcctgtggctgcaggcgacccgctatttctga

SEQ ID NO: 344641 - DNA, 426 bp, Pseudomonas aeruginosa
atgcagcttcgcagcgtcatcgccgccgatcatccggctctgttcgccctctggtcgcgaacgccgggcattcgcatccgcgccgaggacgagtatccgttcttcgtcgcctatctcgaacgcaaccccgggctgagcctgctggtcgaatccgcgggcgtggtgatcgcctgcctgatggccggccacgatggccgccgtggctacctgcagcacctggcggtcgatcctgcctatcgtcgccaggggctggcgcggcgcctgctcgacgaggcgctggcgcgcctggccagggaagggatcggcaaatcccatgtcttcgtcctcgacgccgccgaacaggccctggcgttctggcaggcccaggcgggctggcagcggcgcgaagacatccaggtattttccactcgggaggaacgcgcgtga

SEQ ID NO: 344642 - DNA, 471 bp, Pseudomonas aeruginosa
gtgaaacgattgcactggattctgctggccatgctgctgccgggcctggccctggcgctggagaagggcgagaccctggagccctggacgctccaggaccagttcgggcaggcccgctcgctcgatgactccacgcgggtcctgctggtcgcccgcgacatggacggcgcgaagctggtcaaggcggctctggccgaacgtcccagaggctacctggaggcgcgccaggtgctgttcctggcggacatcagccggatgccgggcctgatctcgcggctcttcgcggtaccggcgatgcgcgactacagctatccggtcgtgctggaccgcgaggccgcggtggcgccgcgctatggcgcgggcgcgggcaaggtcctgtggatccgcctggagcagcggcgagtggaggaggtccgcgagctggactcgccggtggccctgcgcatcgccctggaacaggcgcagccgtga

SEQ ID NO: 344643 - DNA, 210 bp, Pseudomonas aeruginosa
atgggagtccacgaatgggcccggcagggcctgctgcgtttgctggcggaaaatggcgaggcggaccggacgatgcgcctgcgcgcgctgttgagcgtgatcgtcgaactgaacaaggcgcagcgcgcccctgaagacctggccggcgaactgcagttcctggcggagaacctcgacgatcagcgcgactatgccttcatgcgcccttga

SEQ ID NO: 344644 - DNA, 471 bp, Pseudomonas aeruginosa
atgaaagcgcaaaaaggctttaccctgatcgaactgatgatcgtggtggcgatcatcggcattctggctgccgtcgctatcccggcttatcaggactacatcactcgcggtcaggtcaccgaggccgtatccctgggcggtggtctgaagtccccgctggccgagtatggcgccgacaagaacgcttggccgactgctttggttgctccgaccgtgaccccttccgcgaaccaacttaatgcaactctgatcggtaaatacagcaccgttaccccctccattggtggtagctacccgtcgggtgtcattaccgtaaccatgacgactggcaaggcagctaacagcgttctgactctgaccaccacaaatggtggttcgagctgggcctgtggcaacgccaaggtagatgacgctcaaggttccggtaccaccatcgatgctaaatatctgccgaacgcctgcaagccctaa

SEQ ID NO: 344645 - DNA, 1920 bp, Pseudomonas aeruginosa
ttgtatactgatccgtttttaaagagaaagagactcgttgtcctgtcgttgatgacttttgtctctctatgtctctggggactttatgggcgtgccctgggctttgattatgtctgggatgatagtctgctttttcttgataagacggatttgttgaacttgccactcagttggaagttactggccgagccggttctgcctggtacctcatacctgcggcctttggtgtttttgacattttatgttgaatttcatgctttcgggcagagtgcacttgtatcgcatgccgtaaatttaattatatttaattttaacgctattctggttttttgggtttgcaggcgcatcgcttttcttcttgaacgttctttgccagagctgttgggcttcctggcagccatgctctatgtaattcatcctgcactggtcgaatcgtcggtctgggtttcaggcagatttgatttgatggtcacgacttttttattgctgggtgtgggcatatttctggcggaaataaaatctggcctatttagggttttgcttttgtccgcttgcatgatggctgcgctactgagtaaagagttgggggtggtgtttcctgcgttgattttatgtgtgtggatggcgcttaactgttcggcggagccgatagggcgggggcttttttttgctgcctgctcaaaaaatttcaaggtactgttcgggctggttttgacagttcttttttattttgtcgtgagggagttttcggctggggggttttatcattcgcctctaaccacggagtatgcaaaagacgcgattttgtaccagcgacttccgctagaagcattgaagttctatttgctgcaaagcttcctgccgttttattctataagtccccttcatcctgtttctgagtatcaggaaggaggggtgctgctttcagctttagggcaactgtgtacgctgctacttttattgggagtagggtacatggctgcttataggcgttcggtggctgcttggcttgccattgcttatttggtttgcctgcttccggttgtccatataattccgatgacgataggtggaaatcttgggcatgaaagatttttaactgcacctttagcttttcttgcgatgtccgtggtgttggtgcgttatgacttgtttttctcttgcttgagactggcgcggcctgcttatttgcgagtacttacttttgcaacatttgtctggctcgttgctgcagggtttacagttaacgggatcctgccaatgtggtcctcggaggtttcactgtggacgtgggcctataaagatcatccagattttcaatatgccagatataactacttgtatggtgcgtctcgtttttatcgatatgatctcgtggataaagaagtggaaaggctgcagcgtgagagaggagggctggaggtttctgagcagttactgtatgcaaatcggctgataagaactggcgatgccgaaggtatgaaatatctcgaaggcgtgatttatgcttttccaaagtttcatgaggagaaggatggtcggagcgcgatgaagaattttaccttgcttacctctatgcagatggggggggcttatgccgattatgctaatgcgctcatgatatttaaaggggatgctgaaaaagccttgaaatatagtgttattgctgaatggtatttagggaagggagagctgattcctttgatgtatcagcgtagcgctattttttatgctttaggtgagtattcgcgcgctgaacgtatttataatgagcaggagcgctatcggtattatatgaagagtgggatgagatataatttttcttctttgttgaaagggttctgtaaagctagttcatataaaaaagaatcttgtggtgaaatgattcgtagagggattattttaaatggtggtgtgtga

SEQ ID NO: 344646 - DNA, 735 bp, Pseudomonas aeruginosa
atggctatggtgaggattgctgctagagaacgctttaaggttgccgggattcatcttttttttgctgccattttatcgttgctcgcgctgtctttggttctttttttatggtacccctctccgtttttccacgtgtcgggagtacagaaagtcctgggtttgatttttttttgtaatctggttttggggcctgttcttacgtttcttgtttataagaaaaacaaacttaagttcctttttgatatttctgtaattttgttggttcaggtttcttcttttgcctatggtctgcatgtgctatctgtcggacgacctgcctggttagtttttgttgttgatgattttgaagttgttaggcccgttgatctggatgtgcggaatggttatgtagatatcggagttctcaatgggcctaggtggatcgctgctacttattctgatgatccggtgatcaggaaggcgcaaagagaggacgagattttcctgggcattagcttggcgcggaggccagaggcatatactccgctggagagcagaaaggatgagataaagtataggctgaagcccatttcggaacttctaaagtataacagcgaaaaaaaggtggaggcggctattggtggctggccggatctgttcggatggctccccttgaaagggaccgctgcagacctggtcgttttgttcgatcaaaatataaagattattgctgttgtcgacttgaggccatggtga

SEQ ID NO: 344647 - DNA, 393 bp, Pseudomonas aeruginosa
atgacaggccacggtatttccctggtgactctcggcgccgccgatctcgcacgctccagccgctgctaccaggcgctgggctggcaagcgtcggcggacggcaacgaacaggtggtgttcctcaaggggcgcaacctggccctcggcctccacggccgccaggcgctcgccgaggacgcccgggtggaggaccgcccgaccggcttcgcgccatcaccctggcctgcgactgcgccccgcgggaagaagtccgaccggctgttgttcgccgccgccctggcgggtggcgagcaagcgaccaaggtgccgcaggaggtgttctggggcggttattcggaatatgtcgccgatccggacgggcatctctgggaagtcgcccacaagccgttctga

SEQ ID NO: 344648 - DNA, 816 bp, Pseudomonas aeruginosa
atgcgccacctgctgcatcgacatgaggcgctggacgccgaaggcttcgccgcgcaactggccggcagcccgcgagaggccgcccaggccatcctcggcgcggcgcgcgaaggcctgccggaagcccaggcgctgctcgggcagatcctcctcgatggccagggcatcgaacgcgatgcggcgctggcgcggacctggttcggcatcgccgccgagggtggccacgcgatggcgcgcaacatgctcgctcgctgcctggaacacggctggggcggcgcggcggatctcgcggcggcggcgcaacactaccggatcgccgccgggcaaggcctcgactgggcccgctacaacctggccaacctctacgccaccggccgtggcgtggaacaggaccaggcgtgcgcctatgcgctgtaccggcaggccgccgagcagggacacgcgaagtcgatgaacctggtcggccgctatcacgaagaaggcctggtggtcgcccgcgaccaggcacaggcggcacactggtaccggcgctccgccgagggcggcgacttccgcggccagttcagccacgccgcgatgctggccgccaacggccgccatgccgaggccgagacctggctacggcgcgccctggagggcggcaacctgaacttcctgcgcagcgctcgccacagcctagagcaatcgtcccatcccgcgttccgcggcctggcgctggcctattgccgacgcgcggcggaactgggcgacgccagcgacagggaggccctggagcgcgccatcgggcatgccgagacagcgccgctaccggcctga

SEQ ID NO: 344649 - DNA, 678 bp, Pseudomonas aeruginosa
gtgatccgtatcgagcccgccggcgcggaagccttgctgctggtccttgccgaggagcccggggcggacctgccgttacgcctggtcgagctggcgaggcgcctgcgcgaggagttcggcgcgggcgtccgcgacctggtgccgggctggaccgggttgctgctgcattacgatgcctaccgggtcgacccgcaggtcctggaggcgcgcctgcgtccgctgctggcggagtggcgtgcctggcgacccgccgaagaggccggtcgcctgcacgagattcccgtctggtatgcgggcgaggatctgccgctggtggcttctgcctgcggcatggaccgcgaggaagtgatcgcgctgcacagcgcggtcgaataccgggtcggcgcgatcggtttcgcgccggggttcgcctatctcggcggcctcgatccgcgtctgctcctgccgcgcagggccacgccacgggcacgcgtgccggctggcagcctggccatcgccgaggcgcagacggcgatctatccgcaggcgtcgccgggtggctggcacctgctggggcgcagtccgtggcgcccgttcgatgcggccgccaccccgccttgtccgttgtcgccgggcgaccgggtgcgtttcgtcgtcatcgatcacgaggccttcctgtccctgggggggcatgaatga

SEQ ID NO: 344650 - DNA, 1452 bp, Pseudomonas aeruginosa
atgagaaaccaacgtgtgaccagcgctacgctgggactggccttgctggctgcgagcgcgccgggctgggcgaccgacgagcaggaaaacccgccggccccggacaacccgagctacgccgccgaagtgcagagcattcccagcgtggcgaagccgatcaagggccaggccggcgccaccgggctggtcgaaggccagagcctgaccctgaccacccgcaacttctactcgcgggaaaacatgaaggacagcttcaccttccgcattcccaaggccggcggcggctcccagcgcatccaccagcgcaacgcctgggtccagggcaccgttctcaagtacagctcgggctacacccagggcaccgtcggcttcggtttcgacgtcgcggcattcaacgagatcgccctggagcgcggcaagggccgcatcggcggcggcggcaaccggaccctggcgaacagcgacggagaggcgctcggcgagtggtccaagctgggcgtcgccaacatccgcctgcgcgcctccaacaccgaattcaaggccggtcgcttcctggtcaacactccggtgttcagctacatcgacaatcgcgccctgccctccagcttcaccggcttcgccgtgaccagcgaggagctggacaacctcagcctgcaggccggcagcttccgcaaggtcagcccgcggaccggttccggcgacgaggacatgaccaccgagtacggcacccgccaggtcaagggcgaccgcctgaactacctcggcggcaactacaagccgctcgacggactggagatatcgctctacggctcgcacttccaggacgtctggaaccagtactacctcggggtcacccacgacatcggcgacctggagaacggcatcgccctgcgcaccgccttcaacggctaccacaccggcgacaccggcgcgcgcgaagccggctacatcgacaacgacacctggagcctggccttcaccctcggccatcgcgcccacgccctgaccctggcctaccagcaggtcgacggcaacgaatacttcgactacgtgcacgagacctcggcgatcttcctcgccaactcgatgctcgccgactacaacagccccaacgagaaatccgcgcagatccgctacgagaccgactggagctactacggcgtacccggcctgagcaccggggtgtggtacgtgaagggctgggacatcgacggcacccactacgacggcgaccgcaacggcgcctacggcaactatgccgaggtgcgcgcccaggacggcgagaaacaccacgagctgggcctgatggcggcctacaaggtgcagaacggcccgatcaaggacagcaccttcaagctcacctacatgatgcacaaggccagccagaaccagatcgacggcagcgtcaacgaactgcgcctggtcagcaccttccccttcaacctgctgtaa

SEQ ID NO: 344651 - DNA, 606 bp, Pseudomonas aeruginosa
atgtcctcgctgtacctagcctccgcctcgccccgccgccgcgaactgctggcccagatcggcgtgccgctctccgtgctgtccatcgccatcgacgaaaccccgttgccggacgaggcgccggccgcctatgtcgaacgcctggcgcgtggcaaggccgccgccggcctggctatgctggcagagctgggtggggagggttgcgtgctgggcgcggatacctcggtggtgatcgatggcaggatcctcggcaagccggccgacgagtccgacgggctggcgatgctcgccgcgctttccggacgtgaacaccaggtcctcaccgcggtggcgctggccgccgccactggcatcgaggcgcgggtggtggagtgccgggtgcgctttcgccagatcggtcgcgacgaggccctgcgttactggctcagcggcgagccggcggacaaggcgggtggctatgcgatccagggccttggcgcgatattcgtcagccgtatcgaaggcagttacagtgcggtggtcgggctgcctttgtgtgaaactgcggaactgttgggggaattcggcatcccttgctggcagcccgtgggcgggaatccgccgtaa

SEQ ID NO: 344652 - DNA, 687 bp, Pseudomonas aeruginosa
atgcgcccccgcctgctgttctgttgcctgttcctcgcctgcgccgcccaagccggggaatgctcgtcgcatagccccgtcgacagttggtgcgaactgcccctggcggcgctccacccgacccagcagaacgtcggcctgctgcaggtagaggatgaacaggccaagctcgccgggaagaagcccaaggccctcgaacgctacctgcgcaagaaggaaatcccggtggtgatcggtcccgatggacgcttctacctcaccgatcgccaccacctgagcagcgcgctctggcgcctggagccaacccgggaagtgccggtgaaggtgatcggccagctaccccgggtcggcgacttctgggagaagatgcaggaaaaccactgggtctggctgcacgatgcgcgcggcgcgccgatcccgcccgccgccctgcccaacgacctcgccgggctcggcaacgacccctaccgcgccctcgccggctacgccgaggacgagaacgccttcgacaaggatcggtggagctatttcatcgagttccactgggcacgctatttcggcgaacgcatgcactggcggccgatcagccgtgcctcgctgcccggcgacctggaggaagccctgcgcctggcctgcgaaccggcggcgaaggaactgccgggctaccgccaggactgcccgcgctga

SEQ ID NO: 344653 - DNA, 1116 bp, Pseudomonas aeruginosa
atgcccgctttgccgttgttccgcggcgccctcgccgcgctgctcctgacgtgttcccttgccgctctcggtgaagactggcccgacgccgactggccgcgcgcgccgcagcccaccgggccggcgctggaggcgttcgagcgctatgcctttccccgtcgtgacgatgtccgtcgcaagggcgttcgcaccgatgcggtggtggtggtccgcgacggccgcctggtctacgagcgctatgccgggccgagccgcgccgagacgccgcacctgacctggtcggtgagcaagagcctgctcgccacgctgctcggcatcgcccagggcgagcggcgcttccagctcgacgatccggtcgccggctactacccgccgctcgcccgccaccccgaggtgacgctgcgtcacctgctgaactggtcctccgggctggactggcaggaggactacgagttcgcgccgctgaaatcctcagtggtggcgatgctctatacccgcggccgcgacgacatggccgggttcgtcgccagcacaccggtggcacgccagccgggccggcgcttccgctactccagcggcgacagcaacgtgctggcggcggccctgcacggcatgctcggcgcggaatacgccgactatccctggcgcgcgctgttcgagccgctggggattcgttcggcggtctgggagcgggatgccgccggcacattcgtcggttcgtcctatgcctacctgagcgcccgcgacctggcccgcgtcggcctgctgatgcagcgccacgggcgctggcgcgagcgccagctgctgccgctgtcctggatcgaattcaacctgacgcctttcgcccgctaccggccgagcccggaagaggccggcgaggcggtgcccggcgggcactggtggctgaaccgcgcggtgaaaggcgcgccgccgccctggccggacatcccggagaccgctttcgccgcgctcggtcactggggccaggcgctctacgtcctgcccgagcagaagctggtgatcgtgcgctacgccgacgaccgcgacggacgctacgacgacaaccgcttcctcggcctggccagggcggcgttcgccggggacacaccgccatga

SEQ ID NO: 344654 - DNA, 513 bp, Pseudomonas aeruginosa
atgaaacagctcgctctctacatcggtgaaggcttcgaaggccccggtgtcaacgccgcgcacatcaacatcctcctcggcccacgcaacggcccggccggccaggccttcgcctgcagcctggcgtcgcccagccagggccactgcccgttcatggtggtcgcccagccgaacatcccggtcaagccgatgaccctgtacgtgaacaaggccgggatcaacggcgacctacacgcgaacgccacctggggcgcgtcccaggccggcatcgccagggccgtcaccgaggctctgctggacggcaccctgccggccgaggccgaggacgagtgggcgatcatcactgccaactgggtaaacccggcctgcgacgacctcgatgccgtctacctgaacaactacaacgcctgccgcaccgccatccgcgcggctctgagctgcaagcccggacgcgcacagctggccgacgtggcagggcagattgccaatcccttctacacccccaacgcctga

SEQ ID NO: 344655 - DNA, 1035 bp, Pseudomonas aeruginosa
atgcaatacatccgtctcggcaattccgggctaaaggtctccaagctgtgcctgggcacgatgaacatgggcactccggactggaaaccctggatcttcgacgagcagcgcagcgagccgatcgtgaaacacgcgctggatgccggggtgaacttcatcgacctggccgacttctactccgccggcgtcggcgaggaagtgctcgggcgcatcctcaaccgcctggtgcgtcgcgaggacatagtagtgaccaccaaggtcggttacggcacccgccctggcattaacgccagcggccattcgcgcaagcacatcatggatagcatcgatgcctccctgactcgcctgggcatggactacgtggacctctacatgctgcatttctatgacctgaactctccggtcgaagaggtgatggccacgctcaacgacatcgtgaaggccggcaaggcgcgttacatcggcgtgtccaccatgctcaccggccaactggcgaagatcctcatggcctgcgaacgcaacggctgggtcaagccgatcaacatgcaactgcagctcaactgtgcttatcgcgaggaagagcgcgagatgatcccattctgtcgtgaccaaggcctgggcgtctcggtgttcagcccgctggcccgcggtctgctgaccggcgacgtgcagtccacacgcaaccagaccgatttcttcacccagcagatgtacgccgacgaagcttccttggagatcgcccgttcggtgcagcgagtggcccggcgtcgtggcgtatccaatgcgcagatagcccaggcctgggtgctgaaccaccccggcgtggactgcatgctggtcggcgccgacagcaacgcgcagttcgacagcgccctggccgcgctggagacgcgtctggacgaggaggagttgtacgagctggagcgtaactataccccctgcgatgtcatcaacgactacaccgccggcaagcgcatcctgcgcgtggcacgaccgatgcgcgaagctttcgccctcacggaggcagtggcatga

SEQ ID NO: 344656 - DNA, 1440 bp, Pseudomonas aeruginosa
atgagcgcgctgctgagagccgggcactatatcgacggccagtggcatgacggtggcccgacctacccggtgcgcaacccggccaccggcgaactcatcgccgaagtgccgcgcggcggcgccgagcaaaccaacgccgccattgccgccgccgagcgctccctgccggcgtggcgcgggctgctcgccaaggagcgcggggcacgcttgcgccgctgggccgagctgatgctggccaatcaggacgagctggcgcgcctgctcagccgcgagcagggcaagccgctggccgaggcgaaaggcgaggtggcctacgcggcgagtttcctcgaatggttcgccgaggaagccaagcgcgtgtacggcgacgttatcccttcgcacaagtccgacgcgcgcatcgtggtcaccaaacagccgatcggcgtggtggccgccatcacgccctggaactttcccctggcgatggtcactcgcaaggtcggcccggcgctagcggcggggtgcacgctgatccttaaaccttcggaagaaacgccgctctcggccttcgccctagccgtgctggccgagcaggcgggagtccccgccggggtgttcaacatcgtctccggcgatgccccggccatcggcggagcgctgcaggcatccggcgtggtgcgcaagctgtcgttcaccggctcgacccgcaccggcaagctgctgatgcgccaggccgccgagacgctgaagaaggtctctctggagctgggcggcaacgcgcccttcatagtcttcgccgacgcagacctggacgctgcggtgcgcggcgccatggcctcgaagttccgcaacaccgggcagacatgcgtgtgcgtcaaccgcttctacgtgcaggatgaggtgtacgaggccttcaccgccaagctgaccgcggcggtgcttgcgctgcgcgtgggtagcgccctggagggtgagaccgagcagggcccgctgatcaacgaggcggctctgggtaaggtggagcaacatgtcggcgatgccctggagaaaggcgcccggctgctctgcggcggccgccgccacgccctcggtggaaccttctatgagcccacggtgctggccgaggtgagcgccgacatgctgatcgccggtgaggagaccttcggtccggtggccgcctgcttccgcttccgcgacgaggccgaagcgctgtgcctggccaactccacgccctacggcctttccgcttatctctacagccgcgacatcggtcgagtatggcgggtggccgagagcctggaggtcggcatggtcggcatcaacgaagggatcatttccaccgaggtagcgcccttcggcggtatcaaggagtccggcctgggccgcgagggctcgaagtacggcctcgacgaatacctggagatcaagtacctgctgttcggcggcctggccgactga

SEQ ID NO: 344657 - DNA, 1362 bp, Pseudomonas aeruginosa
atgtcgggtaacacagtcaaaatcgatgatctgcccattggcggattccatatcaggattgccggcctcaccttcggcgcccacttcaccgacggctacatcctcggactgatcggcatcgctttcaccctgatcaccccgcaattggatctcgaccctttctggcaggggctgatcggcagctcggcactgctcggactgttcttcggcagcctgttcttcggctggatttccgaccacctggggcggcagaagatcttcctcatcagcttcgtgctgatcactctggcctcgctactgcagttcttcgccgagaccgcgctgcaactgttcctctgccgggtgctgatcggcatcggcctgggtggcgacttcagcgtcggccacgcgatgctcgccgagttttcgccgaaaaagcaccgcggcgtgctgctgggctccttcagcgtgatctggaccttcggctacgtcgccgccactttcgtcggtaccgccatgctcggcctgggtgacgacgcctggcgctggatgctggcgtcctcggcgatccccgccgcgctgatcctgatcgcccgcatcggcacccccgagtcgccacgctggttggtgcacaagggccgcgtggaagaagcccgggccatcgtgcgcaagcatctgggcgggcacgtggtgctcgacgacgagatcgcgacgcccgcgcacagcggctacaaggcgctgttcagcacgcagtatcgcacgcgcaccgcgttcaactgcctgttcttcatctgtctcgtcatgccgtatttcgctatctataccttcctgccggcgatcctccagaagatggggctggcagagggcttcggcaccgagatgctgctcaacgcactgctggtggtgggtgctctgctgggtatctggtgcacgctgaagttcacccgccgtggcttcctcatcggctccttcctgatcctttccgtcgcgctcttcctgctggtgctgctgcccggcagcctggcctggctgatggtggtgaccttcggcctgttcaccctggtgctgtcggcggtgagcaacctggttggcgtctacccggcggaaagcttccccaccgaggtgcgtgccggtggcatcggcctggctaccgctaccagccgcctgggctcggcgctgagtaccttcctgctgccggtgagcgtggctggcattggcctcaacccgaccatggcgatcctcgccggcatcctcctgttcggtgcgctgatctctctggcctgggcgccggagaccaagtacctgacgctgaccgatgccggacgtggcgatggcggagcggaagaagcacggccggcggcgaagatggcagcagcgctataa

SEQ ID NO: 344658 - DNA, 300 bp, Pseudomonas aeruginosa
gtgagcggtcccctggacaagctttcctggggcgatctgcgcatcgtcacggcgatcggcgaaggcggcagcctggtcgcctccgcagctacgctggggctgaaccactcgaccgtctcccggcgcctggcagccctggagctgggcctcggtgtggccctcttcgagtgccactaccgccgccagcccgacttcatcgagggccgcgaaccgcactccgcctcgctcgccctgccaggcgctagcaccgggccgcaatcctggccaacgccgccaagggtttcggcgtgccgacagtga

SEQ ID NO: 344659 - DNA, 876 bp, Pseudomonas aeruginosa
atgcgcagcctgccgccgttgaacatgctccgggtcttcgaggaagtcacccgccaccgcagcttcaaccgcgccgccgaggcgctcaacgtcacccagggcgcagtcagccggcagatcaagcaactggagggctatctgggcgtcagccttttcgtacgaacaccccgcggcctgaccctcaccgagaccggcagcgccctggcgtcgcatctgggcaacgctctcgaccagatcgaaggcgtcctgcaagcggttcgcgtgcccaacctgcgccagcgtctgcgcatcctcgccccgcccacctggggcacgcgctggctgtcgccgcgcctgcgcagcttcctgcagcgctacccgaacatcagcctaagcgtgaccaacgcacaggaccacgacaaccccggcgagctggactgctgcatccgcttcggcctggaggctgccgcccactgccacagccagttattgatgatggaacggcacctcgccgtggccagcccggaactcttcgatgggcagggcccaccggagctggatgcgcacccgttgctgcatatccttcaccagggcaagcgcctgaaggtctgggagaactggctggaggccgtcggccgcaacgacgtcgacgccagcagcggcatcgagttcagcacactcgaccaagtcatccacaccgccctggctggcggtggccttgcggtgatcgaccggcagatgatcgagcgcgagctggctgccggcagcctgctgccgatcaccccggtggaagtgctcggcccctacggttactggctggacgtccccactgacaggcacggcctgtccaaggtgcagcgcttccaggactggctggggttgatgagcactccatga

SEQ ID NO: 344660 - DNA, 1182 bp, Pseudomonas aeruginosa
gtggccagaattcccctgccgcgctcctatgcgcacctgctgtttcccgtcctgctgacttgcagcgccgccgccctggcagtgccggtgacggacgaactcgatgtcggcggcgccattcgcgcgcgtttcgaccatgacccggaccgcgacatcgacaaggctggcttcgacaccctgatgctgcgcgccacctacacctccgacagctggataggcgcggcgcgctaccgcttctacggcaagcagtacccctaccagtacaccgaccacatcggcgatatcgccttcgccgaatacgcctggatcggctatcgcttcgatgcggaccggcagatacaggtcggtctcaacccgattcccttcggcctgcagccgttcttcggcagcaccttctacgagaccctcggcaacgtggtgggtctggaagacgtggccgctgtgggcgccaagtacatccagcagcagggcgactggaacctgcaggcgggcctgtacggccgaccggcctggccggggcgcggcaccagcaacggcagcacctactcgacggtggtgacttccgccgacgactacgtacccggggggacccgcaaccaggagcggcagatcgtggtggcccgcctggcgcgttcgctgccgctgggcgggtggaagtccgaggtcggggtttccgcactgacctcgcgcctggagaacaaggacacccacgataccggccggcgcaacgcctatgccctgcattacctggggcagaatggtccctggggcgtgcaactcctggccgggcgccagcagatgtcgccacgcaacccgggcagcgacgaggtgatcagcttcggtggctacgacggcaccttcaacgtcgccagccgcggcaacctctacgtcggtgacctcagctacagcatccccggcaccttcgtggatggctgggtgagcggggtaaggatctatggcaactacagccgcttcgacaagtcggccagcggcttcgacgcctccgagcgcttcattctcggcacctccttctcggtgcggtcgttctacatcgcgctggaatggctcaatggccgcaacgacccctatatcggcggtagcaactatacccagagcctggcccaaggcggcaccgaccactgggagaaccagctctacgccaacatcggctactacttctga

SEQ ID NO: 344661 - DNA, 939 bp, Pseudomonas aeruginosa
atgaagcgcaagattccggcgctcaatgcactcaaggcgttcgaggtggccggcagcaccggtagcttcacccgtgccgccgaactgctcaacgtcacccagagcgcggtcagccgccaggtgcgccagttggaggaacagctcggcgaaccgctgctgcagcgccgccaccaccacctgcaactgaccgatgcaggacgcatgttgctgcgcgcgctgcagcagtcgttcgaccgcatcgagctgacggtgcgtggcatccaacagcgccagcacctcaaccgcctgcgcctgaacgcgccgccgaccttcgccagccgttggttgctgccgcgcctggggcgcctgcgcgaggcacatccggggctggaggtcaccctcaccacccatctgcaggacagcctggccgagaccggcaccctggactgcgccatccgcttcggcaacggcgaatgggagggcctggacagctcgctgctgatgcacgagaagcacattgccgtgtgcgcgccgggcctgctggtgcagcgcgaggaacagggcctggacctgaacggcatgaccctgctgcatgtgctggctcgcgacgaccagcgctacctgacctggagccattggctggcggcggcgaagatccaaggcgtcgacttgcagggcggctacgagttcgacctgctggacatggccatccgcgccgccatcgacggcctgggcgtgaccatggctgatcgccagatggtggcccgcgaactggtggccgggcaactggtgcaactgctcgacgtgcaggtggacggccaccagtcctactggtgggtgagtcgcccggagctggaattgccggagcacgtggagcgcttccgcgattggctgctggaagaagtgcagctggccgagcgcagcctggacagtgccgcgcacatcgtcagtccatgctga

SEQ ID NO: 344662 - DNA, 1425 bp, Pseudomonas aeruginosa
atgcgtattgaccagaacttcatcgacggccgtttccacgattccagcgtggacgagcgtatcgccgtattcgacccggccaccgaagcctgcatcgccgaagtgccggcggccagcgaggacgaggtactgagcgcggtcgaagccgcgcaacgggcccagcgcgagtgggccagactgccggccatcgagcgcggcgagtacctgcggcgtttcgccgaggccatcgagcgcaacgctgccagtatcggtgcagcgctggcccgcgagtccggcaagagcgtgcaggacgccaccaacgaggccatctacgccgcgcaggtcacccgctaccacgccgaatgggcacggcgcatcgaaggcgaggtgattcccagcgactcgcgcgacgagaccatcctgctgcaacgcgagccgatcggcgtggtggcttgcctgatccccttcaactacccggtctacaccctgctgcgcaaggtcgccccggcgctgatcaccggtaacgcggtggtggtgcggccaagcaacaatacgccgacctccgccttcgaaatcgcccgcgccgctgcggaggccgagctgccggccggcgtgttcaacgtgctgaccatggtccacgaggtcgccgccagcctctgccggcacccggcggtgggcatgatcactctgaccggtagcgtcggtgccgggcgtaccgtgctcgaccactgcaaggccaacatcgccaagccgtccttggaactgggcggaaagaccccggcgatcatcgaggccgacgccgacctggagcaggccgccagtgccatcgccgcgtccaagaccactcattgcggtcagctgtgcaccgccatcgagcgcgtctacgtacaggccagcgtgcacgagcgcttccttgccctgctgcgcgggaagctagcctccgtacgcagcggcgaccgcgccgaggacgccacgcgcatggggccgctggtcaacgcccgctcgcgccaggagatccacgccaaggttcagcgcgctgttgccgaaggcgccgtgctggaatgcggtggcgtgctgccggaagggccggggcatttctatcccgccactctgttgagcgagtgccgccaggacatggagattgtccaggaggaaatcttcggcccggtactgccggtgctgcgctacgagaccctcgacgaagcccttgcgatggccaacgaccaccagttcggcctgtgctcggtgctctacagcgagagctaccgcacggcgatgacggtggccaacgccatcgaggccggcgagctctatgtcaaccgcactcccgccgacccctatcagggctaccacgccggctggaaacgctccggcctcggtggcgacgatggcaagcacggaatgctggagttcacccagacccgcctggtggtcctgaagtactga

SEQ ID NO: 344663 - DNA, 1263 bp, Pseudomonas aeruginosa
atggccgttccgcccagcgccaatctgtcccgctacctgcagttggctctgctggtgatcgccgccggagccatctacccgatgctctacctgcgccaggtgtaccagagcaccatgctcgatgccttggctatcggcaacagcgagctgggctacctctactcactcctcggcttcgccttcctggtcagctatctgcccagcggctggctggccgaccgcttctcgccacgctatctgatcagcttctcgctgctgggcaccggcgtgctgggcctgtggtacgcacgattgcctggcttccaggcattactggcgattttctgcggcttcggcatcaccaccgggctgacgttctgggcctcgttgatcaagcgagtgaagatgcttgccggcgacgacgagcagggccgcttcttcggcgtgctcgacggtggccgcggtctgatcgaggcgctgctggccaccgtggcgatcgcgctgttcgcctatgtcactgcaagtggggaacgcaacgccgagggcttgcaactggtcatccacttctacgccgcctgctgcatcgccctcggtgcggtgctgatgctgctgcgtgaccctcagggcgctcgcgacgaaggcgctgccgcgggcaagggcaagctgctcgaagacctgcgcgtcctggcgcgcatccccgagctttggttggtgaccgccatcgtgttctgtggctatcacttcttctgggccacttacagcttctcggcctacctgcaggaaggaggcttcggtctcagtgccaccatggccgggctgatcaccaccatcaagctgtggatgcgcccggtcggcggcattggcggcggttggctgggcgaccgcttctccagggccggagtgctgacctgggccatgctgctctcggccctgggcatgctcggcctggtactgctgccgagcatgcatcagttgggcgtgctggtgttcctggtgatcttcattggcctgatgacctacgccatccgtggcctgtattgggcgatcctcgacgactgccgcatcccccagcgtgttaccggcctggccatcggcatcatctccctggtcggctattcgccggatgtgttcctaccgctgctcaacggctggatcagcgaccgcttccctggcttcttcggctaccagatctacttctcctatgtcgtggcggttggcctgctgggcgtggtcgccaccctgatcctgaagaaacgcatcgacaagagagggcgccaagcatga

SEQ ID NO: 344664 - DNA, 1218 bp, Pseudomonas aeruginosa
atgaaagtcgtctcccttcagacccatgtggtcgccgtcccgccgccgcacatcggcggcatgtactggctgttcgtgatcctcaagactgactgcggcatcgagggcgtcggcgagatctacgcctccaccttccaccccagggcgatggtcccggtgatccaggacgtgttccagcgctacctgctggaccaggatccgcaccacatcgagcgcttcttccgccgtgcctactccagcggcttcacccagcgcccggacctgaccatgatgggcgtggtcagcggcctggagatggcctgctgggacatcgtcggcaaggcggcgaacaggccggtgtacgaactgctcggcggcaaggtccatgagcgcctgcgctcctacacctacctgtacccgaagaacgctcggggggagtacgactactccgatccggacctggccgccgaatgcgcggtgcacaacatgaacctcggcttcagtgcgctgaaattcgacccggccgggccctacacagcgttttccgggcaccagctgtcgctggaggtgctggagcgctgcgagaccttctgccgccagatccgcgaagcggtgggcaaccagtgcgacctgctgttcggcacccacgggcagatggtgccgtcctcggccatccgcctcgccaggcgcctggagaagtacgacccgctgtggttcgaggagccgatcccgccgggccaggaagaggccatgggccaggtcgcggccaagaccagcatccccatcgccaccggcgagcggctgaccaccaagtacgagttcttccgcctgctgcaggccggtggcgcatccatcctgcagatgaacgtggggcgctgcggcggcctgctggagggcaagaagatcgccagcctggccgaagccttctacgcgcagatcgccccgcacctgtacaacggcccgatcggcgccgcggccagcttccagctggcggcctgcacgccgaacttcctgatccaggaaagcatcggcacctgggatggcttccacgccgagatcctgaagaagccgctgcactgggaagacggctacatcatcccctccagcgaacccggccttggcgtggagctggacatggacgtggtgcgccgccactcgccctacaccgacgagcgcctgcacttgcagatgggcccggacccggtggatgtcaaggacactgccccggccaagggctga

SEQ ID NO: 344665 - DNA, 1644 bp, Pseudomonas aeruginosa
atgaactacgactacatcatcgtcggcgccggctccgccggctgcattctggccagccgcctgagcgaatccggcgagcacagcgtcctgctgctggaggccggcggcaaggacgcatcgccctggttcaaggtcccggtgggcttcgccaagctctactacaacccgaccttcaactggatgtactacagccagccgcagcagcagctcgccggacgcaagctgtacgcgccgcgaggcaaggtgcagggcggctccggctcgatcaatgcgatgatctacgtacgcggccaggcccacgacttcgacgactgggcagcgaacggcaacgacggctggtcgttcaaggaggtgctgccgtacttccgcaagctcgaatcccatcccctgggtgacagcgagtaccacggcgccagcggaccgatccgcatcagtccgatgaaaggtcatgcccacccgatctgcgacgccttcctcaagggttgcgaggagctgggctacccgcgcagcgaggacttcaacggcgagcgctgcgaaggcgccggcatctacgacgtcaatacccgcgacggccagcgctgctccagcagcttcgcctacctgcacccggcgctgggccggccgaacctgcacgtcgagcattacgccctgaccgagcgtgtgctgttcaacgagaaacgccgcgccatcggcgtgagcgtcagccagcatggcgtgaagcgcgaattccatgcccgccgcgaagtgatactggcggccggcgcggtggattcgccgaagctcctgcaactgtccggggtggccgaccgcgagctgttgcgcgaacatcgcattcccgaggtgctgcacctgccggcggtgggcaggaacctgcaggaccacctgtgcgtcagctactactacaaggccaacgtgcgcaccctcaacgacgagttcggctccttgctgggccaggtgaagctgggcctgaagtacctgctcacccgcaagggcccactgtcgatgagcgtcaaccagagcggcggcttcttccgcagcgatgccggccagcgccacccgaacttgcagctgtacttcaacccgctgtcctaccagattcccaaggacagcaaggcccgcctcaagccggagccttactcgggcttcctgctgtgcttcaacccgtgtcgcccgaccagccgcggcgaagtgcgcatagcctcgaagaacccgaccgacgcggcgctgatcgatcccaactacctgagcaccgcgaaggacatcgacgaggcgatccagggcagccggctgatccgccggatcatgagcgcgccggcgctcaaggcggtgaccgtggaagaagtgctgcccggaccggcagcggactcggacgaggccatgctgcggtactttcgcgagaactgcggctcgatctaccacctgtgcggcagctgcgccatgggtgccgatccgcaggccagcgtggtcgacaggcgcctgcgggtgcacggcatcgacggcctgcgtgtggtggatgcgtcgatcttccccaatgtcacctcgggcaacaccaacgccgcggtgatgatggtggcggagaagggcgccgaattgatcctggaagacgcccgccaggtcgagcacggatgctgccggtccttgtag

SEQ ID NO: 344666 - DNA, 1119 bp, Pseudomonas aeruginosa
atgaaaagaaccagccgcgggtttctcttgctcatcgggctcgcattgaatggcgggccgacgtttgccacggaccacctggaccggcggatcggcgagaccatcctctacgagcggatctcgccccgcccgggcaagtccttcgtgatccgggtgaacaccttcctgccctcgggaccggggccgttccccctggtcatcctcaaccatggcatcgaccccgacggtagccgggaccgcgtacgcttccaggtgcccgcgcgcgagttcgtccagcgcggctacgccgtgatggtgccgcagcgacgttccttcggcggttccgaggggccgcgcgactggccggactgccagcccggcgcctatacccgcgaggcgcagcgcgaaatccacgctaccctgcggctggccctggcgcgcgacgacatcgacacgcggcggatcctcctggtgggtcattcggtgggtggcctggtgggactgaagacagccgagcaggacttgcctggcgtcgtcggcgtcgtaaacatggcgggcggcttccgctgggaaaattgcgactggcagacgccgctgctggaagagatgcgccaggctgcagcctcgcggataccctccctctgggtgtacgcggaaaacgaccggatgttcccgccggagctggcccggcagctgttcgccagctaccgccaggcggggggcgcggggcgcctgcgagtgctggctgcgcatcccggcgacggtcatctgttcttccctgagcggagcggactgcaagcctggtggccggaggtagaggggttcatgcgggccgtgggattgccgacgcgcaaggtgcggcacatcgccgaaaccaggcgtccgggcgagagcgggttcgccgccatcggggacgtcgacagcgtgccgttcgtcgagcacgaacgtgaagccggcggcaaggactaccggaccttcctcgaggcttccggtcaacgggctttcgccctgagcgaggatgggggcgcctggggctggtcggtttccgccaatccgctggatgaagcgctggagtactgcaacaccaactcgtcgaccccctgtcgggcctatgcgctcgaccagcaggtggtctggtag

SEQ ID NO: 344667 - DNA, 930 bp, Pseudomonas aeruginosa
gtgcctgagatccgggtcggcgagcgacgcctggtcgtcgccgccggcagcaacctgctggacgcgctgctcgccggcgctatcgccttgccctatagctgccgggccggcagttgccatgcctgcctggtgcaatgcctggacggcgaggtggaggacctgttgcccgaggcgctcgacgccgagcggcgcgaacagggctggcggctggcgtgccagtgccgggtccgcggcgacctcgccttgcagcctttcgacccggcgcgcgacggactgccggcccgggtggtcgcttgcgactggctggatggccaggtgctgcgcctgcgcctggaaccgcagtggccgttgcgctatcgcgccgggcagcacctgctgctgtggagcgaggatggcgtggcgcggccctactcgctggccagcctgcccaacgaggacccttggctggaattccacatcgattgccgcgagcccggcgccttccgcgaccgcgcccgccagttggcgcccggcgccagcctgcggctcggcgagctgcgcggcggggcgttgcattacgaacccgactggcaggaccggccgttgctgctgatggccgccggcaccggcctggccccgctctggggcattctgcgcgaggccctgcgcggcgggcaccaggcgccgatccaactgctgcacctggcgcgcgagcattacctggccggcgaactcgccgggttggccgcgcaatacccgcagttgcggaccagcctggtcacggcggcgcagttgccctctgcgttggccgatctccgccttgttccccggcgcagcctggccttactctgcggccagcccgccagtgtcgagcgcttcgcccggcatctctacctggccggcgtgccgcgtagccagacactcgcggacctgttcctgccccacgcctga

SEQ ID NO: 344668 - DNA, 1269 bp, Pseudomonas aeruginosa
atgacgagccgccgtgcgcgtttcctgttcgtcgccgtgctcctgctgctggccggtttgctggcgctcttcctcttcagccggctgcaaccctataccgagaccatcgacctcggcccggcgccggaggcccggcgcaacccctacctcgccgccgagctgttcctgcgcaagcagggcgtcgcggtgaaccgtgccgacggcctggaggcactcaaggacctgccgccggccgggcataccctgctcctgctcggcagccgcgccggcatgaccccggcccaggcccggcggctgctcgcctggagcgaacagggcgggcacctggtgctggtcgccgagcgcctgtgggacgaggacgagaagaagagcggcgacctgctgctcgacagcctggacatccgccagtacctgaccgaggacttcgacgacagccaggaccaggcacgggagcaggcccaggccgacgaggaggtggcggaagaggacgaggccgtggatacgccaccggcggacgccgccgaagaggacgcgcagacgcctgccgacgccactcccgaccattccgcgctgacccgcctctacctggagaacgagcagtcgccggcctacatcggcttcgatcccgattatcacctctacgacccgcagaaccacgcctacgcctgggccaacagcggcgatgccacccacctgctgcagatgcagcacggcaagggcctggtcaccgtgctcaccgacgcctggatctggcagaaccgcaacatcgagcagtacgacaacgcctggctgctctggtatctgacccaggacaaccaggtcaccctgctctaccgcgccgagcgcgacagcctcgccaccctgctcgcccgccacttccccgaagccctggcggcggcgctgctgttgctgctcggcggcctgtggcgcgccggcctgcgccagggaccgctgcagccggtggccagccgctcgcgccggcaactggaggaacacctgcgcgccggcgccgacttcctcctccgccagcgtggccacgtcgccttgctgcacgggttgcaacgcgacatcctgcgcagggcgcgacgtcgccaccccggtttcgaacagctcggcgtcgccgagcaatggcagatactcgggcgcatgacccgcctgccacccagtgccatcagccaggccatgcgcccctacccggcgcagcggctttccgctgccgacttcacccgccaggtcgcccacctgcaaagcctcaggaatgccctatga

SEQ ID NO: 344669 - DNA, 213 bp, Pseudomonas aeruginosa
atgagcgatcccaggcaggcgggtaccgccagcccgccgccgaccctcggcgagggctgcaccagccgctacgacatcgacgcgctgggcgacgaggacggaaccgagtttccaggcgcggccgaactctggcggcgtctccaggagaacggcggcgagatggccgagggctccgccgacgacaggctcaggaagacgcctcgcgactgctga

SEQ ID NO: 344670 - DNA, 1998 bp, Pseudomonas aeruginosa
atgtctctgaaggcgcttaattcttgttacctcacagtaggaaccccggggaggttactagagaagaatgcattgattcagcaagtggatcaagccgatctcaaaggtggccagaagcagcccccaaagatccccttgggggagaagggaattgggcgtctgtctgcgatgcgtctcggtcatttgatcaacgttaagtctaaagtcagtggggagaaatcttggaactggttgcagctagattggcgccctgcgttcctagatcctaacttagatgcagctgaattagattttgagccttatcagcagtggtgctcagaagaagaagagggtgagagtggcacttctatttttattagcgaccttcaaagtgattggtcttctgaaaaagtagatggaatcataaataacgatcttgcaaaacttgcggatccctttaagtcagttttggcaaataaattcattgctcttaggtttcaaggtaagcctcgaaaaattcctcatctcgatcaggagccgctgtcggtagctgacgcaatttgtagagcaagatttgattatgatgaaaaaggtaatccacagcttttagtcaatgtgaattataagagatatgctcgggaacgtactgatcatatttcgggagatcatctacgagctacggtcagggaagaggccacaaccaagaagaagaagttgcaattgatcgatggagaggtcgttgctaaggctttgagggatctggggccatgggagatggaattccattggtttaaccgtggcaagataatgcgcgaccataacgatctatataatcgttccatcaagccttttttgaagcagtggggtggcggatttcttgtttatcgggatggctatcgagtctatccctatggcgagcgttctgatgactggttggatttagatcgtaacgctcttgctgcctctgcctacaagcttaatcgggcgcagatggtcggttatttacggatttcttcaattgataatccaaagctttatgatcaaacgaatcgtgagggttttcgtgattcctacgataaagaagctctgattcgcttgctgcgttatgtgattctttgtgtttgtcgaccttttttggagctcgtcgagcgagagagtaatcctccggtagaagaagtcgtagctgctgtcgaagaaaagattaccggctcaaagcagaaagccattgcaagcctaaaggaaattaagggacgagttcctcaggaagccaagagccttgaggtggtgatgcatcacttggaggaagtcagtgaggcttgggaaagagcaaaggtcagaattaccagctttgaagaggaacttgatcagttcatgcatctcgctggtgtagggttgatgattgaattcattgctcatgagttaactcgcgttactcaagatactttgcgcagtgtgtcatctggaaaagtttctttggatgttgttgaggcacagctcaaaacactggaaaaacgagtgcgcattctcgatgagctaagtataccaggccgccagagaaaggctgatcatgatatctattctattgctgagatgcttgttgagtttcattcttcaaaatgtcagcggcacaacatcgaggttgtgctcaggaaaacggcaaaatccaagttgtcgcgaagggtggaaaaggggcaaatcttacagattctagataatttgttcagtaactccttctattggttggttaacagatatgatcagcgtgagccggcaaaaatagtaattgaggttgactcttcagatcagaaagtctacttctcagataacggacctggtatttctgaggagcgggttgagtctgtttttgatcagtttgttactactaagcctcctagggaggggcgtggtttaggtttgtatattgcccgtcgtttggcggaagaaaacgatgcctccttggaattggtgcagccggatgaagacggcatgtacaggaagtttgtaatttcgttcaattga

SEQ ID NO: 344671 - DNA, 1812 bp, Pseudomonas aeruginosa
atgacttttaagatatccaaagctgcgattatagatgattcattgggtgcgcccgcagcgggtacagtagagagtgaagataaaaattcttggctagactttctgctggaacaagaggaggctcagaagaaacttctagagttgttcgcggagctcgaatgtgccgatcttggagaacttttcactgaaataacctccaagcatgagcatctatcattactgtgggagatgagcggtaaggtagatctgtccgatgtgttaggcttggagcttctatttaaggctgagcgcttgaatagaatagggaagtccgagaaggcagaacttgttactagtgtgttgcgacggatcgttgatgatccgaattgtgttcagcaatttgcggacattcaaagtgctgcagaatttttgtccggtgctgatattgctttcgtcgacttttttatgagtgataatgaaagcgaggcccaggctgtcgcgagaataaagtcttcggcttctattcttagtagagcaaagcttgtgttttttatgtcttctcgtgcttcgatcgaaatgcagcagcaggttagggagatactaggcattcgaactgctttttttgaggttatgactaagtcccaaattaatgagggctttgttgaagcccgtattcagcataaggctaaagcatttgatggtaattgggctcttcagaacgtaattgcagggctcatgactgctgctcaggaagctgctcttgagtttgagcaccaatcaaagacattggaaattcatgatctgcaatttttagaactattccgattaaatgctgagaatcaaacgcttcctgaatatctaacgtggcttttttctgaagcgttggctgctaagaccaggcggttgggtttacccaaagtcgccagtagtacaatacgctcggatgaggctacttttactggtgatattcttcagaaaaaagtcctttatgatttcttttcagagatagtattctcgccagcttgctcaaacgatggggctcgttttggtgatatccttaaatcggaggacgggagatatctgctagttttgacacctgcctgtgatctcatcaggtgtgaggcacataaaaatatactttgtgttgaagcaaaagttcaggattatagtgatccgagaaatcagtccaaagaaaagctgtttggaaagcatgatgcgggactgcggcacctgctgaaagtcggggccggtgaatctgagcgttcactattattgacttggcaaaaagactcgattcacaccttcaagtattcagagctttgtgggaaggcttttgagcgagttgggttgatgaatgagatttttgctcacgaggtaaaagaagaagtattgcgcaatttgggcagagtgggaacctctattaatcctgcccctcctttcgcgctgaatgctgtcattcgctggcggctcaacggagagacttacgttaaagaaactcctgctggggattttatctctgctgtgctgacctactcagagcaaatgaaaggtactgaaagaaagctttcacccacagtcgtattatctgacaaattcaaagattgggttaatcgccagatttcggaaggctctgctgctttagatattcagattgatgctaaattaagtcgttgcctcactactctcaatgagcctcaattttcattgaatggcagccattcttaccgagataatgattttattctaagagttgactctgcagttccggttgacgaactttcaagtcgaattctacttgaggtctcactgttagtagaatctattgatgggtaa

SEQ ID NO: 344672 - DNA, 891 bp, Pseudomonas aeruginosa
atgggtgccgtccttccgctcctcgcgctacgcgccttcgtcgaaacagcccgccacggcagcctgacccgcgcagccgtctccatgggcgtcacccccggtgcggtgagccaacagctacggctgttgcaggagcgcaccggcgtcgccctgttccagcgctccagccacggcatgcgcctgaccgcggcgggcgagcaggtctatcccggactccgccaggccttcgagcagatcgccgcaagcctcgcccagctggaagccatcaatgcccggcagacccttacggtgagcaccgagccctccttcgccgccgcctggctggtgccgcgcctcggccagttcagtgctcgccatccccaggtggaagtccgtgtcgaggcctcggcgcagctcgccgacctgcgtcgggagcgcatcgacgtcgccattcgccacggcctcggcgactaccccgggctcgacgtgcaggcgctgatggcgccgccactgatcccggtggccagcccgcgcctgctggcggaaggcccggcgctctgcgaagcggccgattgcctggcctacccgctgctgcaggaagcggagcgccgcgactggcgcctgtggctgcaggcgatgggggtggcggacgacccccggatggacaggggcccggccttcgccgacgacctcctcctgctgcgcgccgccgaggccggccagggcatcgccctggtgcgcgacatccacgcccgcgcggagatcgccagcggccgcctggcgctcgccctcgacagcccctggccgagccgcttcgcctactatgcggtgagcctgcccggggcggcgcaacgggcgcctctttcccagttcctcgcctggctacgcgagcaggccgccaccgaggcataa

SEQ ID NO: 344673 - DNA, 639 bp, Pseudomonas aeruginosa
atgagttatacaagagtggatatttcgtcctggaacaggcgggagcatttcgaaatattcaggggcgacgggcagtgcacgttcagccagacggttcaactcgatatcacgcggctgctcgacttcaccaggtccaggggctacaggttctatccggtgttcattcactcgattgcgaaagtggtgaaccggttcccggaataccggatggccatgaaaggcgacgagctgatcgtctgggactgcgtccatcccaactacacgaccttccatcccgataccgagacattctcgtccttctggagccactaccacgatgatctggcgcgtttcctcgccgaatattccatggacagggaaaaataccggaacgaccattcgtatttccccaagggtttcatcgagaatgtcttctacgtctcggctaatccctgggtaagcttcaccagcttcgatttcaacttcgccagcgcgaacaacttctttgcgccgttgttcaccgtcggaaagtactattcccaggccggcaagacactcgttcccctggcggtgcaggtacaccacgccgtttgcgatgggttccacgccgcccgcctggtcaccgagttgcagaaactctgcgacgaggcaggcggctag

SEQ ID NO: 344674 - DNA, 780 bp, Pseudomonas aeruginosa
atgaacgtactgatcgtctatgcccatcccgaaccacgctcgctcaacggcgcgctcaaggatttcgcggtcgcccgcctcgaggcggctggtcatgcggtgcaggtctcggatctctacgcgatgggctggaaggccgcgctcgacgccgcggacagcctcgaacccgcgaccggcgagcgcttcgatccgtcccgcgactcactgcgtgccttccagaacggccggcagagcgccgatatcgccgccgagcaggacaagctgcgccgggccgatgcgctgatcctgcaattcccgctctggtggttcggcatgccggcgatcctcaagggctggatcgaccgcgtctatgcctgcggtttcgcctacggggtcggcgagcactccgacagccactggggcgaccgctacggcgagggacggatgcagggcaagcgggcgatgctggtggtcagcgccggcggctgggagtcgcactacgccgcgcgcggcatcaacgggccgatcgacgacctgttgttccccatccaccatggcatcctgcattaccccggcttcaccgtgttgccgccgttcgtcgtctaccgcaccggccggctcgacgccgggcgcttcgccgcgctcggtgagcaactggggcagcgcctggacgaactgtggcggaccgcgccgattccgttccgccggcagaacggtggcgactacgcgattcccgcgctgaccctgcgcgacgagatcgccccggggcgggtcggcttcgccgcgcacctggcggagtag

SEQ ID NO: 344675 - DNA, 831 bp, Pseudomonas aeruginosa
atgtcgattcgtacatttctgctgctgggcatggtcggcgctttgctggggggatgccaggcggtttcccggccgccggcgccggagttcgtccttctgggctccgaggaggaggtcaggagcgcctgcgcagccatggcctggcgggggatcacctgccgcgtcgatggtgtgctgctggaggagacccagtatcgaaaactgatgatgccggtggcgtcgcagctgtgggaccagagcatgaaggtggtcggcgtgctcgacctcactacccacgtagcgtccagcgggttccgctacttcagcgcgacgggccaccaggagatctaccggcgcgacgagccggatgcggtgaggcggacccaggagttcgaccaggcattctggggatacctcgcccagtcgttccgggtcgcccgcgtaccgcccgatgatccgagggtcgcgcagttcatcgcggcgtccgagcagcgcgttcgccaggagcaggagcgtcttcgcgagcaacagcgcctggaagccaggaaggccatcgaggaggccgagcgggcccgcctcgaggcggcgcgccgggcctatgagaagaccgatgcctacaaggccgaacgggccagggaggcgatcctggattgccgggcgaccatggccgccgcccgtgagagcatcgcctgggacaaccgggtcgctgacatctccggctacgagaatcgctggatacgtcgccgtgccgcggtggatatcgtccagtgccaggacctcattccgcaatactggcgggaatacaagcagtacggcggcaaggcccgctcgatcggcgagctggggtactga

SEQ ID NO: 344676 - DNA, 612 bp, Pseudomonas aeruginosa
atgcatgccctcgtcgtcgtcgcccatcacgatcgccgttcgctcacccacgccctcgccgcgcgcatcgccgagagcatcctccagagcggccattcggcggaaatcgccgatctcgccgcggaaggtttcgagccgcgcttcggcctggccgaccacgccgtgcaccgcggacaggcggcggcgccggccgacgtcctcgccgaacaggcgcgcctcgaccgcgcagatatcctggtactggtctatccggtctactggtggtcgatgccggcgctgctcaagggctggatcgaccgggtgttctccaatggctgggccttcgactacagcatcggcggcgacctgcggaagaagctgcagcgcctgcgcgtggtgctggtgggggtcggcggcgccgaccccggtaccttcgagcgccacggttacgcggcggcgatgcggacgcagatcgaccatggcatcttcgattactgcggcgcccgggtggtccgttccgagctgctgctggagtcggaaacctccgatccggcacgccacctggcgcacgcccgggagatcgggcgggcgctgttcgtcaccacgtccggtaagaccccggtctccgcctag

SEQ ID NO: 344677 - DNA, 891 bp, Pseudomonas aeruginosa
atgagcgagccgccggccctggaggaataccgtcgcgcaatcctggcgcagtgcccggaactgacgggcgcttccttcgccatcctggcttcgggctggcattccacggcggtggaagtggatggccgctgggtcttcaagtttccccgcggcgcggaggccgaggcggcgttgctgcgcgaagccgcgctgctgcgcctggtgcggccggcggtgcgcctgccggtgccggcgctgcgggtgtacgccgggccgccacggttttcccggcacgcgaagctgccgggcggctttcttctcggcgagcactatcggcgcctggatgagcccgcgcggcaggccgtggccgaggcgctggctggtttctacgccgagctgcaccgcttggagccggcccgcatgctggcggccggcgccttgccggtggcgccctggcaggcccccgcggcgattcgccagcgggcgctggtggcgctgcctcgcgcctggcgcgaacgtgccggggggttgctgagggagtacgccgggctacctgccgacccgctgggttccacctacggtttcttcgacgggcacggctggaacatggccttcgatgccgaggccgggcgactgaacggggtatacgacttcgccgattcggggatcggcccgctccaccaggagttcatctactcgaacttcatcgatgccgacctgaccgagcgcatcgtcgcggcctacgaagcggccagcgggcggcgcctggagcggcggcggatcgcgctgctgacggtggtgcaccgcctgtcggagctggccgagctagcggacgatccgcgccacctgccggcgatgcgcgccagcgccctcgacggtctggcgctggcggagcggcagggactgctctga

SEQ ID NO: 344678 - DNA, 333 bp, Pseudomonas aeruginosa
atggttacgcacttcttgagcgaatccggccaggcagcctgcggtcgcggcgacagcaatgtgaacggctcgagcgcggtcgggcaggtcacctgcaagacctgccggcgcaccaacgccttcacccaggcccaggaacacgccgctccggccagtgccgccgttgctcccaccgccgctgcggcggcgccccgggccaatgccaggatcaagcacgccgcccgccggcagggcggcgacgccgcgcgcgacgcctggcagacgcgcctcaacgaactgtccgggaagaatcgtatgccgcgctcccgccgccgcgcgcaagcctatctctga

SEQ ID NO: 344679 - DNA, 909 bp, Pseudomonas aeruginosa
atgttcatcgttcgaatctgcaaggtcgccgcgaccctgggttgcggcctggtcgccctgtgcctggcgtcgctgctgtggaaagcctatgtgctggcgccctggacccgcgacgggcgggtcagcgcccaggtgatccgcatcgccccggaggtctccggcaccctcgacgcactgttcgtcggcgacaaccagcaggtgtcgcgcggcgatccgctgtatcgcatcgacccgagcagctatcgcctcgccgtgcgccagcgccgggcggagctggcccaggcgcgggaaaccctgcgccagcgcgacgaggaatggcgccgccgcgcgcaactggccggagcgatgtcacgagaggcgatcgccaacgccggacgcgccttgcgcatcgcccgcgcccaggccgacgccgccggcgccgcgctcgaccaggcgctgctcgacctgcgccgcagcgacctgcgcgcgccggtcgacggctacgtcacccagctgcgcgtgcagcccggcgactacgcgacggcgggcgagaccaatctcttcatcgtcgaccgccacagcttctgggtcaccggctacttcgaggaaaccaagctgcgcaacgtgcgcctcggcgcgccggcgagaatccggctgatgggcttcgacccgctgctggaagggcatgtcgcgagcatcggccgcggtatcgccgacctcaacgaaaaccgtgccgacagcggcctgccccaggtcagcccgaccttcagctggattcgcctggcgcagcgcgtgccggtgcgcatcgagcttgaccgggtgccgccggaagtggtcctggccgccggcatgaccggcagcgtcgaggtgctgcagccgggcagcgaagggcgctggcggctgacccgctggctgcaggagtacctctga

SEQ ID NO: 344680 - DNA, 2019 bp, Pseudomonas aeruginosa
atggcggcgtcggtcctgcgcgcccgtggctggcacgcggcgctgccgttgccctgggacgcgcacagcctgggctatgtgctgcgcagcattggcgccgcggcgctggccctcggcctgggtctctacctgcagctggatgcgccgttctccgcggcctccaccgtgctcctgctggtcaacccggtgcagggggcggtagtcggcaagggctggtggcgagccatgggcaccctggccggcgcgctggccgccttcgtcctcagcgcgctgttcgcgcagaagatgttgctgttcgtcatcgccctgggtttctggctcggcctctgcgtcggcgtcatgagcctggtccggcacttctacgccaccgccgcggtggtggccggctataccgtctgcctggcgctggggccggcgatggtcgagcccgggctggccttcgggcatatcgtcacccgcgcttcggcggtgatcgtcggggtctgcagcctgagcctggtgaccgtgctgttcagccgccggaccatgctccagcgcctgcgcgaccggctcggcaggctgtgcgcggcggccctggagctgctcgccgcgcgttgcgtcggcgctctcgacgaggcgcaggagagccgttggcgtggcctggtcggcgaggtgtatgcgctggacgacctgctcggcgtcgggcgcgccgagtcacgcaggttgaacgccgcggtcgcggcgatccggggcggcctggcggcgctgttcgccacgctgatggagttccgccttgccggcgaggcggagcgggacctggctcggccgctggccggcgagctgcgggtcctgggcgccgggctggagcgcggcgaggcggatttcgccggcgccgcgctgcgtatcgaggcgttgcgcgagcgactggcggcgagcgctcggcgcctgccggcggaggacttgcgggcctgccgcgaggcgttgcagctggagcgcctgggcgatcaactggcggacctgggcgtggccctgcgcggtttcgcccggctcgatggccatccccccgcccacgagcgcccggtggcgttccatcgccactaccgcgaggccctgcgcaacggcgcgcgggcctggctggcgatgctgatcggcgccgccgcgtggttcctcagcggctgggaccagggcccgaccctgctcgccgtgctcggcccgtactgcacgctgctggcggcttcggcgttccccgccgaggggacgcgcaacttcatccgcggcacgctctacgcgattcccgccgcgctgttctgcaagttcctgctgctaccgctggtcaacgggttccccttgctggtgctgtgcctgggcttcttctggtcgttcggcatccaggccaccaccgtgccccgccgggcgctgcaggggattgcctacctgatcgccttcaatacgctggtcgccaccgacaatgtcgcccggttcgacttcatcgacttcgccaaccagtcctgcgcctgggtgctggcgctgtgcatcagcctgctcgtgtaccgtctgctgccgaaggacctggcgcggcattccaccgtgctgctcgattacctgcaccgcgagaccctggcgctgctgcgcggtcgccggcgtttcgacgcgcaggcctggcagtcccgccagcagcaccgtatcgcccagttgggcgcgttgcacggggcggaccacccacaggcgcgccaggcgctgcgccagggcttcctgtccctgcagctaggccgcgaactgcagcgcctgcgtggcgcacgctcgaccgccgcgcccggcagcgccgaggcgctcgccatcgccggcgggctcgccggcatcgccgccgcccaccgcttaccggcccgcgccgcccgtcacgcccggcgcgcggcgaggcgcctggcgagcctgggagcgcaacgtgacagcttgcttttcaccgacctcgcctggttgctccaggcctatgcgcaagccgcctcggccggcggcgcgcctcgcgaaggagaaacgccatga

SEQ ID NO: 344681 - DNA, 249 bp, Pseudomonas aeruginosa
atgaaggcatcgtccatcctggcagcgctgctgctgctcgccagcctgccggcgccggccgcggaacgcttgccgccggtcgagcgctacgcttaccggatgagactggacatcgcgcgggtgctcgccgtcacgcccctgccggcgacctgcggggtggtcgcccgggtgatgctctaccgggatcgccaggggcgcctgcatcgcctgcagtaccgggcgctcggcgcgggctgttcgcggcactga

SEQ ID NO: 344682 - DNA, 510 bp, Pseudomonas aeruginosa
atggtctcttacgcggaactgttcgacatcggagaagacttcagcgccttcgtcggccgtggcctggccgcggaacagggcgcggtcgcgcggatccgccagaaactggaagccgacgccctgtcggacgccagccgcgagcgcctgcggcgcatcgacaagcgctaccgcctgctggccgccggcgagatgtggtgcccggactgccagatcaacctcgccgcgctggacttcatgcagcgcctgcaaccgaatctcgaactggcgatcatctccaggggccgcgccgaggacgccctgcgcgagcgccttggcctggagcgggtatcgattccgctggtgctggtactggacgaggagttccacccgctcggccgcttcgtcgagcgaccgcaggcggtgctcgccggcggccccgaggcgctgccggcgtacaaggccggcgactacctggacagcaccgtcgacgagatcctggcgatcatcgagaaccccgccgcgggcgactga

SEQ ID NO: 344683 - DNA, 1716 bp, Pseudomonas aeruginosa
atgacccagcctttcctgatcgaaccagccccgaacagcgaccgccaagccccgcgcttcctggctcacggaggcgcggtcggcgagttgctgggcaggctcgacgcggccgcctcgcccctgggtccgccggacggctggccggcgagcctgcgggcggcgctggccatgctgttgccggcgaaggcgcagatcgtgctgttctggggcgcggaattcatcgcgctgtacaacgacgcctatgcgccgagcatcggcgacaagcatccgcgcgccctcggccggccggcgatcgagaactggcgtgagctgtgggacgacctcgaaccgctgctgcgcggggtgtacgagaccggcgagacctacgcggcgcgggaccgggccttctacatcgagcgccacgggggtggcgagacggtgtatttcgatgtgtcctactcggcggtgcgcgaagccgacggctcggtcggcggcgtgctgtgcatcgtcaccgagaccaccgagcgggtccgcgccgaagccgggatgcgcgagctcaacgaaagcctggaggagcgcgtcgcaagcatgctcgcccagcgcgagagcgccctggcgcagctccacgaagcgcgcaagatggagatggtcggccagctcaccggcggcatcgcccatgacttcaacaacctgctgacgccgatcatggcctcgctggaactgattcgccgccggctcgacgacgatcgctccggggaactcatcgacggcgccctgcaggccgccgagcgcgcgcgcaacctggtcgggcggctgctcaccttcgcccgccggcagaccctcaagccacaggccaccgccctgcacgaactggtcgagggcatgcgcgacctcatcgagcgttcgctcggcccgtccatcgcggtgcgcatcgaggtatccgcgagtctcccggcggtggtggtcgacccgcagcagctcgaactggccatactcaacctcgcggtcaatgcgcgcgacgccctgggcgaaggcggccgcctggaaatcggcgcgcggacggaccaggtggtcgggggcacggtcgatggcctggccgccggccgctatgtgcgcctggacgtcgccgacaacggcgccggcatgcccggcgaggtgctggcgcgctgcatggaaccgttcttctcgaccaaggacgtgggcaagggtaccgggctcggcctgtcgatggtgcaaggcctggcggcccagtccggcggcgggctgggcatcgcctcggagatcggcaagggtacccgggtgagtatctggctgccgatcaccacggagcgcgcgcaggacgctgtcgaaaccgctgcggacgccccgcaggcctcgcggccgacccgggtcctgctggtcgacgacgacaggatggtgcgctacaccacggccctgctgctcggcgacctcggctaccaggtcagcgaggcggcctcggcggcggaggccctggagcaggtcgacaacggcctggcgccggatatcctggtcaccgaccacctgatggccgaccagaccggcgcccagctggcccacgaactgcgccggcgcttcgcgcaactaccggtgctaatcgtcaccggctacgccaacctcactcccgagcaactcgacggcttcgaggtgctgaccaagccgttccgccacaaccagctcgccgagcgcctgctccgtttgctggagggctccggctga

SEQ ID NO: 344684 - DNA, 1302 bp, Pseudomonas aeruginosa
atgaacgcctccgctcacagtgcgccgaagccacgccagatcctggccgcggtagccggcaacgcactcgaatggtatgacttcatcgtctacggctttctttccggcatcattgcccggctgttcttccccgccggggacgaatacgcctccttgctgatggccttggccaccttcggcgtggggttcttcatgcgcccggtcggcggcatcctgttgggcatgtatgccgaccgacagggccgcaaggcggcgatgcaactgatcatccgcctgatgacgctggctatcgccctgatcgccttcgcaccggactacgcggcaatcggcctcgcggcgccaatgctgatcgtggccgcacgcatgctccagggattcgccacgggcggggaatacgccagcgctacggctttcctggtcgaatccgcgccagcgggcaagcgcggcctctatggcgcctggcaactgttcggccagtgcctggcggtgttcgccggtgcgggaatgggcgcactggtcacccacctgttcgcgccggaggcgctcgacagctggggttggcgactccctttcattctgggcctgttgatcggtccgctgggcctgtggatgcgccggcacctgcaggagaccgacgaattccgcgccacccgccaggatccgcgggctgtgcgggaaccgctgctgaaagtcatcggcagacaccgccgcgcggtgttggtcagcatgggcatgaccatcttcggtacagcctcgttctacgtgatcctggtacacatgccgaccttcgccagcaaggagcttggcctgccactggaacaagtattcctgatccagatgctggcagtgctggtgatgacgctcatcatccccctggctggcgcattgtctgaccggatcggtcgacgcacgttgctgttcggctcgacgctggcgttcttcctgctgacctacccgctgttcgcttggctcacggcggcccccagcctgagccggctgctgctcatgcaactgctgctgtgcgccaacctcggggtctgcttcgggcccgcccccaccgccctggccgagcagttccccacccgggtgcgttcgacggggatctcggtggcctacaacatcgcggtcatgctgttcggcggtttcggccccttcatcgtcacctggctggtgcatgccgctggcaccccggtggcacctgcctggtacgtgctgttcgccacactgctgagtctcatcgccaccgcttgcctgcgcgaaagcgagcctccaggggaaatccagcacgccttgccgggctga

SEQ ID NO: 344685 - DNA, 1305 bp, Pseudomonas aeruginosa
atgaatgccttctctctgctccggctcggggtggccggcctgctgtgcgtatccggcgcgcaggcaggctcgctgatcgacgacggcaagactacgttgaaatacagtcagtattactggaaggaaaacgacggtggcgcggtcggccccaatcgcgacgaatgggtgcaggccctgcaactggggttcagctctggatggttccgcgacgtgctgggcttcgactacacccatgcgttggccgatggactgcgtatcggcgacgacgccagcagcgtcaccaacctgtccgccgggcgctccccacgcgatgcacatagcatcaacaagccactggaggcctacctgcgcctgcaatggcgagacgacgcgcgaacctggagcggcgggtacggcaagaaatcccgccgctacctcatctacaccgacgacgccacccggattctgcccgcggcgaccatgggctgggacctgggctacgcaaccgatgcggccgagctgcgctacagtcgcgtgcatgccttcagcccccgcaatgaaaccggctggggcgaaagactggaaaacttccgtggacaacagatcgacaatctgcagatctactcggccagttatcgcttgccgctcggaacccggttggcgggcgaatatgccgaggcacaagactacctgcgcagcgccttcatccaggccgaacagcgcgttgacctcggtgcctcgcaatcgctggtcgccagcctgacccacgggcggcagcaggatgccggtgaactcttcgagtacacaggcgtgccccggctgtaccaggccgagaacagccacgatgcgcgctatctggacatgacgctacgctacaacatcgatgggcactcggtggccctgagttggaaccaggtacgcggcgatgacttcgaccggttgttcttcgcccaggaccacggcacctggaacagcagcggcaagctctatttcttctttggcctgcgcgacgaagacatgtacaaggccagttcgagcctcgacctcggcaagttcggcctgcccggcctgaagatgacctcctactacgccttctcgaaccgtgcctacggctacgacggtttctcccgcaaggaattccagaatgtcttccagtacagcttcgacgggccgctgcgaggactgagcctggcctggctgcacgaccgcttccgtacgaccggcacgccggacggaatccatcgccaggtcgcctcgcgcggaccggcggggatcatcaccgagcattcggaacgcttctacctgacctggcagagagcctggtag

SEQ ID NO: 344686 - DNA, 237 bp, Pseudomonas aeruginosa
atgatcgaattgctcatcgaccagcgtccgctgcgagtcgccgagggcaccagcgtggccgccgcgctggccctcggcggcgacggcggcagccgccgttccgtcaacggcgggcggcgcgcgccgttctgcggcatgggcgcatgccaggaatgccgggtattgatcgacggccggcgacgcctggcctgccagaccctctgccaagccggcatgcgcgtggagacccgggcatga

SEQ ID NO: 344687 - DNA, 387 bp, Pseudomonas aeruginosa
atgaactgcccctatcgccgggaaatccacgacgcccacgtggcgatccgcgcctggctggccggcgaggcccccgccgatgcgctggatgcgctgatggcgcgtttcgccgaggacttctcgatggtcacgccgcatggcgcggtcctggacaagactgcgctgggtgagctgttccgcggcaagggcggcacccgtccggggctgcgcatcgagattgacggcgagagcctgctggcttcaggcgcggctggcgcgaccctggtctatcgggaaatccagtccgacgcggcgggtcgcagcgagcgcctgtccaccgtagtgctgcgccatgacgacgaggggcggctgtactggcgtcacctgcaggaaaccttccgcggctga

SEQ ID NO: 344688 - DNA, 780 bp, Pseudomonas aeruginosa
atgactcacaagcgaatcctggtgaccggggccggcagcggtttcggtcgcgaagtggcgttacgcctggccgaacgcggccatcgggtgatcgccggggtgcgcagcgccggccaggccggcgacctgcgcgaggaggccgggcggcgtggcggcacgctgcgggtggaggtcctcgacattaccgtcggcgccgatcgcgagcgcgcctgggagtgggatgtcgacgttctcttgaacaacgccggcagcgccgaggccggggccagcgcggagattccgctggagctggtgcgcgcgctgttcgagaccaacgtgttcgccagcctggcgctgacccagggtgtcgtacgccgcatggtcgagcagaagcgtcgcggccgggtgctcttcgtctcttccatcgccggcctgctcaccgggccctacacaggcgcctactgcgcctccaagcatgccctggaggccttcgccgaagccctgcatgcggaactgaagccgttcggcatccaggtcggaacgatcaaccccggcccgtaccagaccggcttcaacgaccgcatgatggagacctggaagcgctggtacgacccgcggcggcatttcaccgactaccgcggcgtgagattccccttcgaacagcacgatcccgaggaaatgatcgccagcatggttgcgctggtcgaagccgccgacggcccgttccgtaccctcctgccggcgagtttcgtcgaggcggtcaggcaggagcaggcccgcgcctgggagcgccgcctgtga

SEQ ID NO: 344689 - DNA, 2895 bp, Pseudomonas aeruginosa
atgtcgtgcccctccacccatcgcttcacccgtagtacccgtctctggtgcgccgccctcggtgccagcgtcctgttgccgcagatggccccggcgctggccgggcaggccgcccgggacgccgtgccgagccagcaggaagtcaccttcggtggacgcttcatcgacgtccaggccgtccgtggcggcgcgctgtcgcgcagcgccgtgtcgcccggcaccgagcgcctgcgccaggaggcgggggtgtcgatccgttccctgcgcgtgcaggacgatagcggctatccgggcttcaccctgctggccggcgccctggagggccaggcccggcaggccgccggcgatatcgtgatggccctgcgcgacgacggcagcttcgtcgccctgctgcccgagcgcaacgcgatgatccgcggtgctgccgacggccagcagacccttaccctgttcccggcgcaacgtggcgccgcccacgagcagatcgactatctggaagagcccgacgcgccgcttgcggcgacgatcgagtcgcgcaacggcgcgctgcgctaccaggcccagcgcaacgccgccggcgacctgctgatcgacgtgctggccggtttctccaggctgtccgtggcctatgtcggcgaccacgaggcctacgccctggcgcaggtcgcctcggtcaaccaggcgctggacaactccagggtcaagggcgtgcgcgtacgtctggtcggcacccaggtgatcgacgacgaccaccgggtcaataccgataccctggccgacctgaagaacctcttcgccgagggcatgcgccagtacagtccggacctggtcgcggcgttcttcaccggccgcggcaccggccccgggcagaacagcgcggccggctgggcctacaccaacgggcgctactcggtgaacgcggccgacggccccaccgtgttccgccacgagctgggccacaacatcggcggcagccactgcccgaccggccagggtttcaacttcggctacaacaacggacggatcggcaccatcatgtgcggcaaccagctgggctactactccaatcccgagctgaaggacaaccagggtgtgcccatcggcgacgccctgaccgccaacatggcgcaggtatggcgcaacaacgcggcgaagatctccgcctacgctccctcggtggtgccggtcgacgacgagcgggcgacccacgtcctgcacgaaggtttcagcctggccagggcggacagctggaagcacttcgtcgtcgatgtccccgccggtacccggcgcctggccttcggcatcacctcggggccgcgccacgaaccgaccggcaggaccgcgatctacctcaagcgtgacggccggccgagcgaaaccgacttcgaccaccgttcgcgcgagggcgtggtggccgcgctcggcgtcgacgaagaggctggcggccgctggtacgtctcggtgaaaggcaacaatgccgacatcgacgacctgatcctcgacggccatgccttcgccgtcgacagcgacagcgtcgaggcccgctacctgcgcctggtggtggagtccgaggcgagcggcaagggcggcgccagcgccgccgagatccagctggccgactcgcgcagccgcctgctcgatccgcgcaactggcggatccactcggtgagcagcgccgagggcgccaggggcgcggcggccaacgccatcgacggtgacccgaagaccttctgggctagcgcggcgggcgccggctttccccacgagatgatcatcgacctgggccgggacagccgtttctcgcacctgcgttacctgccacggcaggacaacagtcaggtcggcaacatcaagggctataggctttacgccagcgacaatccttatggcggctgggtcgaagtggccgacggcagcttcgccgcggacaacaagctgaagatgcaggtgctcaagccgaaggaaagcaacctgccgccgctggcgcagatcgacggcaaggccgaagccgaggccggcgagcgggtggtgctcgatgcctccgcctcttcggatccccagggcgccgcgctgagctatgcctggtcggtatcgccggcgctggacatggaactggacggcccgcgcctgagcttcgtcgcgccgagtctggcgcaggacacgacctatcgcttcaccctgaccctggacaacggcaagcagcgcgtgacccgcgaccacgaggtgaaggtcaaggctgctcaggatgccagttgccgtcctgcctggatgcgcaacaaggcctatctgtccggtgacatggtgcagcacggggggcgccagtactatgcgcgctggtggacccagggccaggagccgggtaacccgaacttcaccggtggcgatggcagcggcaaggtctggcgcgacgacggtccctgtcagcagggcgaagtgccgccgccgctggcgcagatcagtggcaagaccgatgtcgcggcgggcgagcgggtggttctggacgcttccgggtcgagcgatccgaacggccttgagttgagctaccagtggagcgtgtcgccggcgctggcgttcgaagccgacggtgcgcgcctgagcttcgtcgcgccgaaggcgctgcaggacagtcgctataccttcagcctgaccctcggcaacggcagccacagcgtgcgccaggatcacgtggtgcgggtcgcggcggaacagccgggagcgtcctgcggcaggtcctggaacgcttcgacggcctacgtcggcggcgaccgggtcacgtacggcggccgccagtacgcggcgcgctggtggagccgcggccagcagcccggcgatccggcgttcaccggcggcgagggcagcggcaaggtctggcgcgacgaaggcgcctgtctctga

SEQ ID NO: 344690 - DNA, 1332 bp, Pseudomonas aeruginosa
atgtatcgaaaagagttttccatggctccaggcaacctcctttcctgcgacaatgttggcgagcgggaagtggctttggagggcggatatatcactttcaaaggtaccagccacccctcgcctcccgcctggccggcatgtcctgtgagaattttcctaagaattaccagccaggattcaaacgccatattcatcgatcagagatttccgaagaaaccacctcacgcgcaaacccgggaagaaaccggctattgccaatcgcccactcgaaccctttcccgctccacctacaatggttatcccatcagggtcatccatagcgacgagttcttccctgcgacgcttgcgtttttctcgggatacctgaaccagcatgcctcgccgccgtccccctccggaccggcggcgacgccgctgtccgactcgccggagcccttgcccgaggagcgcgagccactcgcccaggccttccatcaggcgctgcgcgcagccatgcagcgactggccggacaggacggccaccactggttcttccagcccgccgtagccgcctcccacgccgcggaggaagcgcccgcgcgccgacgctggcaggatttcagccgagcacccggcagttgttgccagtcgctagccctgcgagtcgacctgggttgtccgggactcgatgcccagggtcgcccggccagcttcggagtccctgcgcaggtggtctcgcgctatctgcgtcgccatggcatcacgccgctgtgcaccggagactatcgcgtgctgctgttccttccccgggacgcccagccggaacatgcccgtccgctggtggacaagctgctggagttcaagcgctggcatgacgaagatgcgccgctgaaacaggtgatacccgacctgctggagagctcgcccctctacaactacctgggactgcgcgaactctgcgcaatgatccacgaggcctcgctccgcctgcgcctcgccgagctggccgcggccagcgtcgggaccgccatccgcggcgcggtctcgccggccgcgctctacggctacctggtcaacggcgagaccgagtgggtggaactggccgaccttggcggacgcgtcgtcgtcagcctgatcggcgccggcccggccgacccgcccctgctgctgccgggtgaccgcgtgcccctggaaccgcgagcgctggtcgactatctgctggcgctgcggaccttcggcgaacacttccccggcttcgagccgctgctacagggggtcgaggtggacgcgcgcggccgccatgtggttcgttgcgtcaagccggccgcgctcgccctgcgcttggcaccctga

SEQ ID NO: 344691 - DNA, 693 bp, Pseudomonas aeruginosa
atgacgttatcggatatcgaaagaattcaggatatgagtcgacacatgtcggtgcatattcctatcgaactgatcatttcctgggagcagagcgaagaagcctggagcgtaaaggacacctgtctgaacttcgtctacgtcaatcgacgctacatggaattgattaccccgcagttcggtcagaaaagctccctgctttcgccgttcagcagcaacatcgaattgcatgacaagctggtgatccagaccggcaagcgcatagaggcgctggcgctgctcagcgccgaggaccatcccgccccccgctgtctctacttcgagcggatgccgctgtacgaccgccgggccaaccgcaccggcgtgatcgcccatgccaagtcgctgacgtccatcgccccgcgcggcttcatcgccaccgatggcatcggcaccttcaccttcacgcagcccacgccattgttcaccgcacgcgagtgggacgtgatctacctgatgctcgccggcctgtcggaaaaggaaatagccgaacagatcagtcgttccctgagcaccataaagtttcacaagagcaacatcttccagaaagccgattgcacttccatcagcgccttcaagaccctggcgcggcgcaacaagtggaacttctacattcctccggccttcgccagcgccaagtacgtcatcaaccactga

SEQ ID NO: 344692 - DNA, 345 bp, Pseudomonas aeruginosa
atgtccagcctcaccgtgctgtcgctggccgccgtcctggccgtgccggcctggcccgcattcgccggggagccgctgccggacgacctgccgccagcgttgcccgccgcgccagcgaccgaaccgattcccatgggtcgcgcgccgcagccgcagcggcagatcgtcgagccggcgctgccgggcggcgcggcgcggcggcaggaggaaaagccacgtgccgccgaggaaggcctgcggatcggcaacggccgcctgcgcattcgccaggacgatgccgggccgacccgcgagagcccgctgcgcgatcccctcctgaatccctacgccccgcgccagccctga

SEQ ID NO: 344693 - DNA, 153 bp, Pseudomonas aeruginosa
atgtgccccgtttgtatcgcgtccctgtccctgctgttcgccggcggcgcttcgctgaccggcatcgccctgctgggcgggcgtcggcgcccgtcacgggcgaaggcggagtccggcggcaaacctggaatttccgtggagaatcggcaatga

SEQ ID NO: 344694 - DNA, 327 bp, Pseudomonas aeruginosa
atgaacgcttccttcatcgcccttggcgccctgctattcgccctgtccttccccgcgttctccgaaagcatgcccgacacgcggatggacagcgcgaaaagctaccagaccgcccgtgccgagggcaccatcaaggcgatcgacccggagcgccacacggtcacgctcgcccatggtcccgtcctcgcgttgcaatggccaccaatgaccatggggttcaagacctccgacgagcaactcgagggtctgcgggtcggggacagggtggagttcgagttccgcagtgaaggaggctcgtcgcggatcctgagtatccgcaagaagtaa

SEQ ID NO: 344695 - DNA, 1476 bp, Pseudomonas aeruginosa
atgagccgtttcccctggaaagcttcgatcctgtcaggtctcgtcctggtcgtaggtgccagcgccggctattggctggcgcgccccacccaggcgccggcagcggcaccgccgccgggtaccgaacgcaagccgctgtactggtacgacccgatggtcccgcagcagcacttcgatgcaccgggcaaatcgcccttcatggacatgcagttggtgcccagatacgccgacgatgccagtgccgccgacagcgagcccgcagtacgtatcgagccgggcattcagcagaatctcggcgtacgcctggccgtcgtcacccgcgacaaactcgatcgcgcactgcggatcagcggcgtcctggctttcaacgatcgcgacgtggccgtgctgcaagcccgtgccggcggtttcgtcgagcgcacctacgcccgcgcgccgggcgatgtggtgaccgccggagccccgatagcggacgtgctggtacccgagtggacggcagcgcaggaggaattcgtcgccttgcgccgtatgggcgagccggcactgctggcagccgcccgccaacgactgctgctggcgggcatgcccgctgaactcgtgcgacagatcgagcgcagcggcgaggtccagcccttggccaccctgagagtgccgatcggtggagtgatccgggagctcgatgtacgcccgggcatgaccctggcggcgggcgcgtccctggccaggatcaacggcctggggcacgtctggctggaagccgccgtgccggaggcgcaggccgccggcctgcgtgtcggccaggcggtcacggcgcgcctgatggcttttcctgagcgcccggtggccgggaccctggccagtatcctgccggagaacgaccggcagagtcgcaccctgcgactgcgcatcgaactgcccaatgccgatggccagttgcgcccgggcatgacgacagaggtcagcctcgatcttgccggtccggacgccgtgctgcagattcccagcgaagcggtcatccgtaccgggaagcgcaacctggtgatgctggcggaaggcaaggggcggtttcgtccggtcgaggttcgactcggccaggagaacggcagccatgtggccgttctgcagggcttgcaggaaggccagcgggtggtcgcttccgggcagttcctgatcgattcggatgccagcctcaagggcatcgaggcccgcacggccgacgaacccgtcgcgccgatgcggatgccgcccgttcacgaggcggacggccgcatcgtggagatctccgcgcaaggcttgaccatcgaccacggcccgttccacaccctgggcatgtccggcatgaccatgaccttccctctcgctcgccccggtctggcggcaggcctgaagcccggcgaccgcgttcgcttcggcgtcagccagggcgatgccggactggtcatcgaacagatcggcaagcaggagccccagccatga

SEQ ID NO: 344696 - DNA, 1245 bp, Pseudomonas aeruginosa
gtgacccatgtccgactcctatcgggctggctgctgctcgcgctgctgcccagcctgtccgcgcagggtgccgccctgtcgctggacgaagccttgttgctggctgaacgcaacgcaccatccctgctcgcacaaagcgagaagctatctgccgcgaaaagcgccgccatccctgccggagaactccccgaccccaggctgagcctgggtgtgcagaacgttcccatcgagggcgacgagcgttggtccacccggcgcgacaacatgtccatgcaggtggtcggcctgacgcaggagatgaccaatggcgacaagcgcaaagcccgtatcgagacagcgcaggccgccatcgagcgcgccgatgccgaggcgggcgtggagcgcctgaaggtccgtaatgccttggcccaggcctggatcggggcctacacactgcaacgcaagctggcaatgttcgacgacttctaccacgagaaccgtctgctcgaggcggccgtccgcgcgcgcctggccggcggcggcgcaagcgcggtggacggggtagccccgcgccaggaggccgccctgctggatgaacagaaggacgacctgctgcgccaggctgcccaggcccgtgcagcgctcaggcgctggatcggacaggacgtgccccggaccctgagcggcgacttcccgcactggtccatcgatgctgcgcattcgctgcaggcgctgcacaggcacccggaactcgccgcctacggaccgatgacccgcgaggcggaagcgctggtgcgcgaggccgtggcggagaagaagccggactggagctgggaagtggactaccagcgtcgcggccgcgacttcggcgacatgatgacgctgcagctgagcttcgacctgcccctgttcagcggcactcgccaggatccgaagatcgccgcgcgacgtgcccaggtgcgccagctggaagccgagcgcgaggccctggcacgcgagcacgagcagcaactggcggacgacctggccgaacatcgccgcctgcaacgtgccttggagcgcagccagggcaccctggtgccgctggccgaggaaaaggtacgcctggccaccgcgggctaccgcgccggcaagctccagctcgacgaggtgatcagcgcccgccagcaactggtggcggcaaggctcaggcagattgacctgcaaggcgccctggcacaggtcgcggcgcgcctccacttcacttacgaggagggccgcgcatga

SEQ ID NO: 344697 - DNA, 264 bp, Pseudomonas aeruginosa
gtgacgcgcgccgagatactgctgctcaagaacctggcggaacgactggtggccgaccgggaaaaccgtcacgacgatctgcaggcaacgatgcgcctggcgcacctgagttcgccggaaatgattctgtacatggtcaaccgggtgctggaactggaagagagcatcgagcggatcgccgctgtcctccggaatctttcgccagacgagacgcggcccgccacggaatcgccggccctcgccgcgcgccccgtggaaacctag

SEQ ID NO: 344698 - DNA, 981 bp, Pseudomonas aeruginosa
gtgcgccgtagcaccctgttcgcccttctgctgtttctcgcggcgctggcggcaactttcgcctggctccagcgcgagcgcgcggccgaggcgcctgcgccggcagcggacccgcgctggctgcccggcctggagcgttcggcgccgagcgccgtgctgctgcagtttcccgacggaacgccggagatccgcctcgagcggcgcgagtctgcctgggtgctgccggccaaggccggttatccggccgatccgcggcaaatggccgccctgttgcgggccctgggcgaggcgcgcaaggtcgaggcgaagagtgccgatccgcagaaccaggccctgctcggcctggcggagcgcggcgagggccaggcggtgcgccttagcctgctgcggcaggccggcgagcccctggtcctgctggtcggcaagcctgcccggcgcggcggcagctttgtccggcaactgggtgatgatcaggcctggttgatcgacagggtcctgccgctgccgcgcaatgagctcgaatggctcgaccggcggatcgccacgctgcctttcgccgaggtgcgcgaactgcaattgcgttatccgaacggcgagcgcctggacctgtatcgcgaacgcgccgggcaagccaacctgctggtccggcaattgcccagggggcgcaagctggcctacgaggcggtggccaacggcgcggcggcgctgttcgccgacctgcgcttcgtcgacgccgcgccgctggcgcaggtcgggttccggcaggcgccgttgcagttggcattcagcttgcggacgttttccggggcgcgcctggatggcgagattcggcgccagggcgggcaatactggctgttgccgaagaagatcgagggcttcgccgccggcgaggtcggcgcgcatccggactgggcctatcggatcgaggacgagcagtaccgtgtcctggccaggcacctgccggaactgctcggacgctga

SEQ ID NO: 344699 - DNA, 522 bp, Pseudomonas aeruginosa
atgaccgaggtccgcgtctggcagggggacatcacccgtcttgcggtggatgccatcgtcaacgcggcgaattcctcgctgctcggtggcggcggggtcgacggcgcgatctaccgcgccgccggtcccgagctggcggcagcgtgccgcctgctgcacggttgcaagaccggcgcggcgaaaatcacccctggtttccgcctgtcggcggcgcatgtgatccataccgtcggcccggtctggcgcggtggcgacaacggcgaggcggaactgctcgccagttgctatcgacacagcctggccctggccgagcaggccggggcggccagcgtcgcctttcccgcgatcagttgcggcatctacggctatccgttggaactggccgcgacgatcgccatcgaggaagtctgccggccacgcccggagggcggaagcctggaggagatcgtcctggtcgccttcgatgcgtcgatggccgagcgctaccggcgtttgctggacgaacggcgcggcccccgctga

SEQ ID NO: 344700 - DNA, 504 bp, Pseudomonas aeruginosa
gtgccccgctcggccggcgacccccggcgcaccagcaagctgttcctgctgttccgcatggagggtgaccgctatgccctggatgcccgcgaggtggtcgaggtgttgccgctgctgcgcctgaaacgtattccggaggcgccggaatgggtcgccggggtgttttcccatcgcggcgcgctggtgccggtgctcgatctctgcgcgatggccttcggccgtccggccctggcgcgcaccagtacgcggatcgtgctggtcgagtaccgcgcccgggcggaggcggtctggctcgggctgattctcgaacaggccaccgacacgctgcgctgtgaaccctcggcgttccgcgaatacggcctggacaacggtgccgcccgctacctcggcccggtctacgaggggccgcaggggctggtgcagtgggtgcgggtcgaggcgttgctgcccgaagcggtgcgcagcctgctgttcccgccggcggccggcgagggggttgcatga

SEQ ID NO: 344701 - DNA, 1863 bp, Pseudomonas aeruginosa
atgaccatctcccgccgcgacttcctgaacggcgtagccctgaccatcgccgcaggcctgacccccgccgagatcctccgcgccgcgcccggcggccgctactatccgcccgcgctcaccggcctgcgcggtagccatccgggcgccttcgaagtcgcgcaccagatgggctgggagaagaagtccttcgacgtcgaacacctgccgatcgaggaagaatacgacctggtggtggtcggcggcggcatcagcggcctcgccgccgcctggttctatcgcgaacggcaccccgcggcgcgcatcctcgtcgtcgagaaccacgacgacttcggcggccacgccaagcgcaacgaattccaggccggcggacggaccatcctcggttacggcggcagcgagtcgctgcaatcgcctaacgccctctacagcgacgacgccaggcacctgctgaagcgcctgggcgtcgaactgaagcgcttcgagacggccttcgacaccgatttctaccccggcctgggcctgtcccgcgcggtgttcttcgacaaggccagcttcggcgtggacaagctggtcagcggcgacccgacgccgatggtggccgacgaggttcctcgcgaccgcctcaacgcccgctcctggcgcgccttcatcggcgacttcccgctgccccgcgacgaccgcgaggcgctcatcgcgctgtacgaatcgcctcgcgactacctggccggcaagagcctggaggagaaggaaacccacctggcgaaaaccagctaccgcgactacctgctcaaggatgtcggcctttcggaaaactcggtgaagtacttccagggccgcagcaacgacttctccgccctcggcgccgacgccctgccggcggccgatgcatacgccgccggcttccccggcttcgacgccctcggcctgccgcaacccagcgaggaggcccaggcggaaatggacgagccgtacatctaccacttccccgacggcaacgcctcgctggcgcggctcatggtgcgcgacctgatccccgcggcggcgccgggccggggcatggaggacatcgtcatggcccgcttcgactacgccaagctggacctcgccgggcaaccggtgcgcctgcgcctgaacagcaccgcggtcagcgtgcgcaaccgcgccggcggcgtcgacgtcggctacagccgcgccgggcgcctgcaccgggtgcgcggcaggcactgcgtgatggcctgctacaacatgatggtgccctacctgctgcgcgacctctccgaggaacaggcccacgccctgagccagaacgtcaagttcccgctggtgtacaccaaggtcatgctgcgcgactggcaggcctggaaggccctcggcatccacgagatctacgcgccgaccctgccctactcgcggatcaagctggacttcccggtcgacctcggcggctatgagcacccgcgcgacccgcggcagccgatcggcgtgcacatggtctacgttccgaccactccgaatgccggcatggacgcccgcacccaggcccgcgtcggccgcagcaaactctacgccatgagcttcgagcaactggagaaggatgtccgcgaccagctccaggccatgctcggcccggccggcttcgaccatcgccgcgacatcaccggcatcaccgtgaaccgctggtcgcacggctactcgtacttcatgaacacgctctacgacgacgaggcgcaaagcgaagcgctgatggaactggcgcggcgcaaggtcggcaacgtcaccatcgccaattcggacgcggcctgggacgcctacgcccatgccgccatcgaccaggcggtgcgggcggtacgcgagctgggctga

SEQ ID NO: 344702 - DNA, 642 bp, Pseudomonas aeruginosa
atgaaaacacgtgtcctcctcgtcgatgaccatgcgctcacgctgatcggcatgcgctgcctgctgggtgccttcgacgacctgcagatcgtcggccaggcccaggatgccgacggcctgctgacgcagttggatacccatccctgcgacctgctgatcaccgacctgatgatgcccgacagccagcaggccgatggcctgcgcctggtacagaaggtccgccggcgctatccgcagttgcagatcatcgtcgtcaccatgctcaacaacccggcgctgatctcgtccctgctcaagctcggcatccgtggtctggtgagcaagcgcggggtgctcaacgacctgcccaaggccatccgccacggcggccgccggccgttcctctcgcactccatcgggcacctgctggacgtcggcgcggccgagcatggcaagccgctggccagcctggaggagctcaccccgcgcgaggtggaggtcctgcgtctgtatggcagcggcctggccatcggcgagatcgccctgcgcctgtgccgcagcaagcagaccatcagcgcgcagaagagcagcgccatgcgcaagctcggcctggataccaatgccgggctctacctgtacatccaggagcacgggctggcttga

SEQ ID NO: 344703 - DNA, 3600 bp, Pseudomonas aeruginosa
ttgaacggcactcgtctcccgccaggcgcgcgtcgcggcgtgcgccttctcgcccgcctggcgctgtgcatcctggcatcgctgccctggcaggcgccgcaggccagcgctgccgcgcaggcgcaaccggccagcctggcgcagttgctgcggatgcgccagaacctgccagaacgccccctgcgcgtcgcccaggtggctcatccgcccggacagcaggaaagcaacggcagccggatactcaacggcatcagcgacgactacctgcagctcatcggtgatttcctcgccctgccgctggagcgcatcacctacccttcggtggaggcttccttcgccggactgcgcaacggcgaggtcgacctgctgccacgcgccagcgacttcgagcggcacctgccggggctgatcttcagccatccgtacctgaacagcacaccgatcatcatcggccgcagcgacgaccagagcctgccccccgaccttcagggcaagcgcgtgctgctgctcaaccactacctgcatccggacacggtccgccaggcctatcccggggccatcctggaaagcgtccggggcaccgccgccggtctgcagcgcctggccgaaggcggggccgacgccttcctcggcgacaagacccgggccaaccgctacatgctccagcgccccgacctcaagctgcagaacaaattcgccgccaacctgcccagcgagggcttcgccttcgccgccctggcctcgcgccgagacctggtcaccctcgtcgaccatgccctggaaaccaccccggacactcgcaagcacgagttcctgcaacgctggacaccgtcgcgccagctgttcgcacccaccgacgccttcgccctcagccacggcgagcgcgaatggttgaagaaaaagcagcccctgcgcctgatcgcccagtcggcgccaccctatttcttccgcaacagccacggccagtgggacgggctcggcctggacgtgctgcgctacctgtccgatgcctacgagctaccgctcgaaatcctcgacgcccagtcgccggcgcaggaccagcgacgcctggagcggggcgaggcgctgctcgccagcagcatcccgcccaccccggagcgccgccgccggctggccttcagcatgccgttcggggtccaggactgggccttcgtcatccgccgccacgccagttcgcccagttcgctggaggccatggccgggcgtcgactggccatcgccggcaaccatcccctgcgcgactacctggaaaatcgctacccgcggatcgacctggtcctcaccgccagcggccacgaatccttttccctggtcgaaagtggcgaagtggacgccacgctgcagagcatccacaacaatccccgctggctccaggagcacggcctgcgccagggcgagcatatcgaggccacgcccacgccgcaggtcttcgccctcgccccgggccacggcgaactgctcgggatcctcgacaagctgctcggcaacctggcccaggacggcgatgccggctccgggctgcgcctgatggccagcggcgcgcaggacgacaacctctggcagcacctgcccgaaggcttctggcacgccctgctgctggcggcggtgatcatcctgctgtcgctgctgtggaactggcggctgaagaaacaggtgcagcagcggcggatcgcccagaaccagttgcgcgaccagctggcgttccagttctccctgctcaacggactgcccacgccgctgtacgtgcgcgacctggaaggccgcctgagcacctgcaaccgcgcctacgaacagttcttcgccagctcgctggaggaaatgcgcggcaccacgccttccgaacagggtatctgcccgccgagcctggcgcggaccctggagttcgaatatggcgaactgctgcaacatcgccagccgcgctacctcgactgctgcatcgaagtggctggcgaggcgcaccagatctaccagtggctggtgcccttctacaacgcgcgcggcaagctgcaggggctgctgggcggctggatcgacatcagcgaacgcaagcgcctggaaacccagctgcgcgacgcgcgccaggccgccatggccgccagcgccgccaagggccagttcctcgccagcatgagccatgagctgcgcacgccgctcaatgccctggtcggactgctggaactggaaggccagcgcgcgccctcggaaaacctgcgcatcgcccagcgatcggccagttcgatgatcgacctgatcggcaatatcctcgacctggacaagatcgaatccggccagatgcaactggcgccccaaccgaccgacctgggttcgctgctgtcggacagcctcgaactgttcgtcgcccaggcccgccagcgcaacctggcgctggagctggactgttcgctgccggcgcagcgccgctaccgggtcgacccgctgcgcctgcgccaggtgctgtacaacctgctgagcaacgccctgaagttcaccgaggccggctgggtacgcctgagcgtggcagagcatccgcaggaggacggccgcagcctgctggcgttccgcgtcagcgacaccggcatcggtattccccgcgaactccagccacgcctgctggagccctaccgccaggcgcatgccgacaccgccctgcgctatggcggctccggcctcggcctgagcatctgcagccagctggtacagctgatgggcgcacgcctctggctcgacagcgaacctggccagggctgcgcagccggcttcgaactgtcgctggagtggctggtcgccggcgacgccccgctcagcgccgcaccagccggcagcgaggcgacgggggcgttgaaggtgctgatcgtcgacgacgtctccaccaatggcctggtattgcgccagcaactggcgaaactcggccacgacgccaccttcgtctgcagcggcgaagacgccctggacgcttgggaacgcgagcgctacgaccttctcatcagtgactgcaacatgcccggcatggacggctacgacctgacccgctgcatccgcgagcgtgacaggcaacgcggcctgccgcgtcgcctggtgatcggctacagcgccagcgccctggccggcgaggccgagcgttgtcgcgacgccgggatggacgaactgatgatcaagcccgtcacgctgggccgcctgcgcgaagtgctcgccggcgtgcagccggcacgcgccgtcgaggcgagccgcgaggctcccggcgctggtttcgatctgggccacgtgcaagacctggccggcgccgacccggacctgctcaaccgcctgctggtcgaactgcgcggcaacctgcgcgaggaacagcgcagcctgcgccagcccgtggccgccaccgcggtggaccaattggcccatcgcctcagcgggctcgcctgtaccatcgatgcccccggcctgatccgcgcctgcctggacctggaaggcgccgtccagcacggcgaggcggccctgcaacggcaacaggcgcagctgctggcggtcatcggcgacctgctggcggacgtcgaacggcagttggacggtacgcctgcgcctgactga

SEQ ID NO: 344704 - DNA, 1500 bp, Pseudomonas aeruginosa
atgatccactcccaccgctcgcgcagcatgagcaagcttcccctcgccctggccatcggcctggccgccctgtcctcccagcaggcgttttcccacggctacgtggaaagcccgaagtcccgcgcctacatgtgcaatgccaagggtggcaacctgaacgcgaactgcggcgcggtcacctacgagccacaaagcatcgaatacgcggagggcgccaaccatcactacccgagcacctactgccccggcgacttcacccagtgcggcccggccgatggcaccattcccgccggcggcctcaacaacttcgccccgctgaacgagcagaccgccacccgctggcagaagaccaccctcaagccgggcctgaacgaattccgctggcgcttcaccgccggccacgcctcggcctattaccagttctacatcaccaagaaggactggaacccgaaccagccgctgacccgcgattcgttcgagctcaagccgctgctgaaccaggatgcgggcggcgagactccgcagtccggctcgagcaagtccttcaacgtgaatattcccggcgatcgcagcggctaccacgtgatcctggccacctggaggatcgccaacacttccgcgaccttctaccaggccatcgacgtgaatatcgacaacaacgccgtgccgccgagcgaatggaccagcatcggcaccgtccagcccgaaccgctgcagatcggcgacaaggtgatgacccgggtcttcaccaatgccggcgagcaggccaaccgccagaccgttctggacatcggcagcgccaccgaagcccaggccaacacctggccgttcctgctcgcgcaaaaggccaaccaggccaacgccggctaccggatgggcgtgctcaacgctgacggcgaggtagtcccgaactatggcgccaacagcatctacaccaaggccggcagcgatgtcgtccgcgtggagattcagaaggaccagccgaccgttcccggcgagctgagcctgtccggcctgcaaccgagctacacgctgaaggacggcgccgccgacctgcacttcaccgccatcgcccagggcggcacctacaccatcgacgccaccgtgttcaacggcaagggcgagagcatcgcccaccagcaggccgaagccggcaacaacgcgccgcacttcagcatcccgctgcgcaatgccagcgccggtgactatgacctggtcgtggtagccaagccggagaaaggcgaactgctgcaggaaacccagcgcttcagcctgaaggccgaggacaacggcaacggcggcaacggcaagtacgacttcgtgttcccggacggcctgtccaggtacaccgccggtaccaccgtactggcgaaggacggcaatacctatgcgtgcaagccgttcccgtacagcggcttctgcaagcagtggaacgccggttccaaccagttcgagcccggcgtcggctccagctggaaggacgcctggattcgccggtaa

SEQ ID NO: 344705 - DNA, 516 bp, Pseudomonas aeruginosa
atgaccttcgacaaatacacgcggccgcgcaggctgctgcactggtgcttcgccgtcatcatcatctgggccagcctcagcggtttcgtcaacgcgctgttcgagctgcccgcgccgattccggacaccatcgcgttcgtcaacgtgtccctgaccaccctgctgatcccgttgctgggcgcgcgcgtgtactacgccctggcccaccccgcggcggaagagcccgagcaacagggcgaggcgctgcgactgttggccaaggccggacacctggcgctctatgtgctgatcggcctggtcctgctgaccggagtgctgatgatggagcggcccatcgacttcttcggcctgctggtgttcccccagccactgcacgaaccgttgctgaccggattcttcaaccgcgcccaccgctacagttgcgtggtcctggccctgctggtggtcgggcacgtcgcggcggtcgccttccatcacctgcgcggccaaccggtgctgcgccgcatgctgccctga

SEQ ID NO: 344706 - DNA, 513 bp, Pseudomonas aeruginosa
atgccgagccggatacccgccctgccgttcctgcaacgcctgctcctacccgccaccggcgtcgccttgtgcgcctggatggcctggctcgccctggagagctggcaatacagccgcgcccttgccgctccggacagcgcgccgacgccacccgcggcgccgtcacgccccgccccggcgccgctggacacccgcggcgtcgcccggctgttcggcgccatgccggcggaacggcagcaggcggtgccgctgagcctgctcgccagcctcgccgacacccgcgcggaacgttcccgcgccctgatccagtcgcccgagggcgcggcgttctatggtctcggcgcacgcctgccgggcggcgccatcctcaaggcgatcgccaccgatcgcgtactgatcctgctgggcggacgcgaacagaccctgaccttccccagccacgccacccgcctgctggcgccactgtccgccagccccggcgcgcccctcgcccaggcagagaacacaccatga

SEQ ID NO: 344707 - DNA, 1905 bp, Pseudomonas aeruginosa
atgaaactgacccgcctcactcgggcgctgctgatgctcggcaccctgtctttccccctggcgtcccaggccaacgacccggacggccgcctgtggaccctcaacatgaaggacgcggagctgcgcgacctagtcagcgaggtcggtgaaatcaccggcaagaccatggtcctggacccgcgcatgagcggcaaggtgacggtgcagtcgacctccgccatggaccaggaaggcatctactcgctgttcctcagcgtcctgcgcagccagggcttcgccgccctcgaccagggcgaccgggtgctgatcgtgccggtcgccgaggccaagaccaaggccagccggcaccgcggcaacgccagcgaggccttcgtcaccgaggtcctggcgctggacaacgccaccgccagcgaggtgtccgcggtggtccgcccgctggtggccaacgacgcctacgtcgcaccgtcggccagctccaacgccctggtggtgaccgacagcgccaacaatgtcgagcgcatccgccaggtggtgcgcgaactcgacggcgccgggcacaagtccttcaccacgctgaagctcgagcacgcctgggccaccgaagtggccaggaccctcacggaaagcgtgagccagaacggcggcggccccaacgccgcgaaggccatcggcgacgcccgcagcaaccggctgatcctggtcgggccgacgtcgctgcgcgagcagatggcgcgcctggcgcgcgcgctcgacgtgcccggcgacgccaacgccagcacccgcgtggtgcgtctgcaccatagcgatgccaagcaactggaagaactgctcaatggcatcggcaagcgcatggagaacggcgcccgcggcggcaaggacggcggcgcccagggcagtccgatcatgatcagcgccgataccagccagaacgccctggtgctgatggccgagccggcgcaactggcgatgctcgacaacgtcatcgcccagctcgaccggccacgcgcccaggtgctggtggaggcggcgatcgtcgaagtcagcggcgacatcaacgaagccctcggcgtgcagtgggccgcccgcgccggcgacgtcgccggcggcaccagcttcggcaacggcggcctgaccatcggcagcctgctcaaccaggaagccggcaagcgcccgaacctgcccgacggcgcgatcatcggcatcggcagtcgcaatttcggcgcgctggtcacggcgctgtccagcgactccaacaacaacctgctgtcgaccccgagcctgctgacgctggacaacgaggccgcggagatcctggtcggccagaacgtaccgttccagaccggctcctacaccaccgacagcgccggcgccagcaacccgttcaccacggtggagcgcaaggacgtcggcatcaccctcaaggtgaccccgcacatcaacgagggcgacaccctgcgcctgaaggtggaacaggagagctccgagctggccagcgctccggccggcatctccaccagcgacgtgatcaccaacaagcgttcggtgaagagcaccatcctcgccgacgacgggcagatcatcgtcatcggcggcctgatcaaggacaacgtcaagacccaggtcagcaaggtcccgctgctcggcagcatcccgctgctcggccggctgttccgcagcaccaaggacgtcaacgagaagaccaacctgatggtcttcctgcgtccgaccctgctgcgcaataccgccaacgccgacagcctcagccagcgcaaatacgacgacctgcgccagctgcgcccggccgccggcggcgccaacggcctgttgctgcccgaggatccgcgccggctgttcgacggcgccggggacaaggtggtcgacatgcgcaagggagcccgtcggtga

SEQ ID NO: 344708 - DNA, 1473 bp, Pseudomonas aeruginosa
gtgagcgccgtggaccgtctgccgttcagctacgcgcgtcgtcacggcgtgctgctggacgccgagcgactgtactgccgcgccgacaccgcgctggcgatcctcgccgaagtgcgccgccgccatgtcggcgcgccgcgctgccaggtgctcggcgcggaggacttcgcccgacgcctggccgagctctaccgcgacgggcgcgacgacgccatgcaggtcgccgagggcctgggcgagcagatcgccgagcaggacgacctggccagcctcgccgagcaactgccacggaccaccgacctgctcgaccaggaagacgacgcgccgatcatccgcctgatcaacgccatcctcggcgaggcggtcaaggccaaggcctcggacatccacctggagaccttcgagcaacacctgtcggtgcgcctgcgggtcgacgggctgctgcgcgaagtgcttcgtccgcgccgcgaactggccggcctgctggtctcgcggatcaaggtgatggccaggctggacatcgccgagaagcgcatcccccaggacggtcgcatcgccctgcgcatcgccggccacgaggtcgacgtgcgcgtctcgaccctgccctcggcccacggcgagcgcgtggtgatgcgcctgctcgacaagcaggccggacgcctggacctggggcgcctgggcatggccgaggccacccgcggacgcctggaaggcgccctgcgccggccccacggcatcctcctggtcaccggtcctaccggctccggcaagaccaccaccctgtacgccgggctggccagcctcaacagccagacccgcaatatcctcaccatcgaggacccggtggaataccacctccccgggatcggccagacccaggtcaacaccaaggtcgacatgtccttcgcccgtggcctgcgcgcgatcctccggcaggatccggacgtggtgatggtcggcgagatccgtgaccgcgagaccgccgagatcgccgtgcaggcgtccctgaccggccacctggtgctttccaccctgcacaccaacagcgcggtgggcgcggtcacccgcctggtggacatgggcgtcgagccgttcctgctctgtacctcgctgctcggcgtactcgcccagcgtctggtgcgcgtgctctgcccgcagtgcaagcgaccggcgccggccgatggcggcgcctgcgagcgcctcggcctcgacccgctggcgccaccgacgctgttccatccacagggctgcccggcctgccagcacagcggctaccggggccgccagggcatctacgaactggtcctgttcgacgagggcctgcgccagcgggtccacgcaggcgccggcgaggccgagctggcccgctacgcccgcctgcacggccacagcctgttcgccgacggccgcgaaaaggtgctgcagggcatcaccagcgtcgaggaactgctgcgcgtgacccaggaggactga

SEQ ID NO: 344709 - DNA, 1218 bp, Pseudomonas aeruginosa
atggctgcctacgaatacctcgccatgtgcaacgccggacgccgcagccgcggcgtgcaggaagccgacagcctgcgccaggcgcgccagttgctgcgcgaacgcaacctggtccccctgcaggtcaggccggcgcggggcagccgggctccggagcaggccgcgggagcaccctccagccgcagcctcggcgccgccgagctggccctgctgacccgccagctggccaccctggtacaggccgccctgcccctggaggaagtcctctcggcggtcgccgcgcaatgcgagaagcgcagccggcagggcatgctcctggcgatccgctcgcgggtcctcgaaggacacggcctggcccgcgccatggccgagttcccccgcgccttcccggcgctgtaccgggccacagtggccgccggcgaacgcgccggccacctcggccaggtgctcatgcaactggccgactacaccgaggcgcgccaggccgcgcgtcagcagatccagctggcgatgctgtacccgggcatcctcctgctggcggccttcggcatcgtcggcttcctgctcggtttcgtggtaccggacgtggtcaaggtgttcatcgacagcggccaggagctaccggtcctgacccgcgggctgatcgccctgagcaacctgctgcgcgactacgggatgctcctgctggtgatcggcggcggcctctccggggccgcccggatggccctgcgcaagcccgccgcgcgcctgcgctggcaccgtctccagttgcgcctgccattgctcggacgggtgatccgcgccagcaactgcacccgcttcgtcagcaccctggcgatcctcgggcgcagcggcgtgccgctggtggacgcgctggagatcgccgccgaggtggtcgccaaccagcagattcggaccggtctgaaagacgtcgcccgctccgtgcgcgaaggtggcggcctgacccgggcgctggaacggagcgggcatttcccgccgatgatgctctacatgatcgccagcggcgaacgctccggcgagctggacgccatgctcgaccgcgccgcgcgccagcaggaagcccagctggcgaaccgcatcgccatgctggtcggcctgttcgagccggcgatgctggtgttcatgggcgccagcgtactgctcatcgtgctggcgatcctgatgcccatcctcagcctcaaccaactcatcacctga

SEQ ID NO: 344710 - DNA, 435 bp, Pseudomonas aeruginosa
atgcgcacgcacttcaagcaacggggtttcaccctgatcgaaatcatggtggtcgtggtcatcctcggcgtgctcgccgcgctggtggtcccgcagatcatgagccgtccggaccaggccaaggtcaccgccgcacagagcgacatcaaggccatcgccatggccctggacatctacaagctcgacaaccatggctacccgagcacccagcagggcctcgaggcgctggtgagcaagccgtcgggaagcccgccggcgcgcaactggaatcccgacggctacctcaagcgcctgccgatcgacccctggggcaatccctaccagtacatcgtgcccggcagccagggcaacgcctacgacctgttctcctacggcgccgacggccgcagcggcggcgaggggctgaacgccgacatcggcagctggaacctctga

SEQ ID NO: 344711 - DNA, 507 bp, Pseudomonas aeruginosa
atgcctgtgcgcggcatgctgcgacagcccggccagcgcggcttcaccctgctggaagtgctcgtggtggtcctgctggtcggcctgctcgccggcctggccggcctggcccaggtcgacagcggcggccagcaggcgcggcgcgagaccgaacgcctgcgcagcctgttcggcctgttgcgccaggacgccctgctcagccagcgtgactacggcctgcgcatcgggcgccggggttactcggtgcaggtactcgacctcgacggcgagtggcgtccggcgcccggctaccggccgcagacattgccggagaacctgcgcctgaacctggaggccggcgcggacgcaccgacgccgggacgctcgcagcgtagccgcgccccccagttgctggtgctgtccagcgacgagatcacgcccttcagcctgcgcctggagtaccgcggccagccgctgtacgcgctgtccagcgacggtctcgcggaggtccgcgttgaagcgctgtga

SEQ ID NO: 344712 - DNA, 384 bp, Pseudomonas aeruginosa
ttgaagcgctgtgaaaaccggcggcaacggggcttcaccctgctcgaggtgatggtcgccctggctatcttcgccgtcctctcggtcgcgctctacagcgccgcccagcacatcgccggcaacagcgcggggctgaccgagcgcagcctcgcccagtggctggccgacaaccggctcggcgagctgcgcgccggcatgcgtccgctcggcgatggccggcgccaggaacaggtcgccttcggtggccgcgactggctgctggccagcgacgtcgaggccgcgccggacccgcgcctgcgcagggtcagcgtcgaggtctcgctcgccgggccgcgccccgtgcgacgcgcgctgctggtcgggttcgtcggggtgcggcgatga

SEQ ID NO: 344713 - DNA, 600 bp, Pseudomonas aeruginosa
atgaatcagcgcggcttcaccctgctcgaggtactgatcgccatggccctgttcagcctgctcggcctggcctgctaccagttgctcgagcggatcctgcacagcgagcggcgcatcgaccagcacgaccggcaactgcgccagctgcaacgcgcgctgggcatcttcgagcgcgacctgagccaggccatcggccagccgctgagcgacgacccgagccgccgccaggcgctgatcggccgcgccgacggcctgcgtctggtgcgcggcggctggagcaatccgctggcgcagaggcgcagcgaggtgctggaagtgagctaccgctggcaggacgacgcctggatccgcgagtaccgcagcccgccggagcgcgaccaggacgtgcccgccggccacagccagcgactgctcgagggggtggccctgaagcgcctgggctatgtcgacgcccacggccgcacacaccccgcctggcccgcccacggcgcgccgctgagcctgccacaggcgatcgacatcgagttcgacgcgcccggctatcccggcctgcgccgggtcgtcctgctgcccggcggccaggagcgcgacgatgagtga

SEQ ID NO: 344714 - DNA, 879 bp, Pseudomonas aeruginosa
atgagtgacacgcacaggcagcgcggcgtggccctgatcagcgtgctgctgatcaccgccctggtcaccctggtcatcagcgacatgctcgcccgccagcgcctgaacctggccagcggcgccaaccagtccgcccagctacagctctggcaactggcgctgagcggcgaggcctgggcgcgccagcaattgctcgccgacctcggcgatgccgacggcctcgctcgcgtccacctgggacagcgctgggccagcggcgcgcaggagttcgagatcgagggcggccatatccgcatccagctgcaagacctcggcgcacgcttcaacctcgaccgcctgcgcgatggccgcgaccacatcagccgcgcccgctaccagcgcctgctggccctgctcggcctggcctcgcacgacccggcccggctcccggcaccgctcggtcacgacggcaagccgttgccattcgccgacgccagcgaactctggcgcctcgaagcgctggacgccgccggcatgcgtcgcctgcgtccctgggtaacggcgacgcgcgctgccggcctgaacctgaacaccgcgccggccgagcagctggcctgcctcgaaggactcgacccgggcatcgcccaggccctggtacaggcccgtccggccgacggctatcccagtgtgcaggccttcatcgagcagccgctgctttccgggcgcaaggtcgagcagtacggcctcgccgtggccagcgagcgcttccgcgccgtgctcgacgtccagctcggcgaacaccggttacgcctgctcagcgacctgcgcacccgcagcgacggccaggtgcaggtcctgcgccgacggctcgcggcgcccgaccttcccttcccggagtaa

SEQ ID NO: 344715 - DNA, 1080 bp, Pseudomonas aeruginosa
gtgcaagcctggctctacctcacttccaccgccgacgacgcgccgctgtgctggtggcgcgccgaccatgacgtccgccacggcgacctcgggcaggccgccgctgacctggccgatgccgagctgaccctgctgctgccggccgaggccaccagccaccatgaaatcgaagtaccggcccgcagcggtcgctggctgcgccaggcgctcgattcggcgctggaggaacgcctgctggaagaccccgaagaactgcacctggcgcgcggcggcctgcgcgacgctcgtttctgccggctgttcgcggtgcgccgcgactggctgcgcgagcgcctcgcgcgcctggcggcccggcacctgcgaccgaagcacatccatgtcgacgtcgactgcctgccgggcgatccgccgctggccctgcgctgcgccggccgctggctggtgtccgccggcagcgcgcagcggctagcgctggacgacgccggcctggaggacctcggcccggtgcttccccccggtttgcggcgcagcgaggcccctccctggccattgctcgccgaaggcgcgcgactggccatcgacctgcgccagggggagttcgccgcgcacgccgcgaaacggattcgctggcccctgctggcgctgctcgcggtgcttgccggcgcggcgcaaatgggacaggacatcggccatcgcctgctgctggaacagcgcagcgcggagctgcggcaggacaacctggcgctctggcagcaacgcttccccagcgagggccgggtcgtcgacctgacccgccaggtgcaggcgcgcctgcgccaggatggccagttgccggtcgacctggcccgacgcctggatcgcctggccgacacctggagcgccggtggcggcgccaccgccacggtccgccggctcgactaccaggccggcgagggctggagcctggaggtcggcgcgccggccttcgccgatctcgagcgcctgcgcgaaggcctggcgcgccagggcctggacgtccaggccgactccgcggtgcgcggccacgatggcgtcagcgcccgcctgcagataaaggactga

SEQ ID NO: 344716 - DNA, 468 bp, Pseudomonas aeruginosa
atgccccgcatccctcccgccctgcacgcccgctggctgcgcctgcccactcgcgaacgccgggcgctgctcggcctggcggcgttcctcggcctgtccctggcctgggtcctgctctggcaaccgcaacgccaggccctgctggatgccgaacggcactaccaggacgaactgcgtctgcacgccgatctgcagcgtctgcccggcgatacgggcggcggcccgcgcatcgacgccacggcgctgcccggcctgctggcgcgcagcagcgcgcaagcgcggctgaacgtggagcgcatggacagcgaaggcagcggacggatgaacctggccctggagggccagctcgccgacctgctcggctggttcgaatcgctcggccgcagcggcgtggaagtcaccagcctggacctggaggtgagcccggatgcgctggccagggcgcgcctggcggtggagctccgctga

SEQ ID NO: 344717 - DNA, 1227 bp, Pseudomonas aeruginosa
atggatagcccgtccactcccgcacgtccgcgtacccaggccatggcggtcgccaatctgatcttcgccggtatcgccgcggctttgcatgtcggcaaggcgtccatcgccctgccgtcgctgcagcaggacttcggcggcgatctcgccgcgctcggctggatcatgtctgcctttcccttcgtcggcgtgttcggtggcatcgccgccggcatcctcgtgcgccgctggggcgatcgccggctgcttgccatcggtttggcgatcctggggggcgccagcctgctcggcgcgtcgatgacagacttcgcctggctgctcggcacccgtttcgtcgagggactggggttcctcatcgtggtggtggcggctcccgccgtgctccaccggatcaccgccgagtcgcggcgtagcctggtgttcggcctgtggagcaccttcatggcgggcgggatcgccctttcgatgctggtcgggccgctgctcgccgactggcgcgcggactggctggcgagcgcgttgccggtgctgctcgccgcggcgctgctgttcgtcacggtgcccgccgcggctggcgggacggcgggcggccagcgaggcgggctgggcgtgctgctgcgaaatcccgccatcagcctgctggcgctgagtttcagcgtctacaacctgcagttcttcgccctgatgactttccttccggtgttcctcatgcagcgcctgggagttcccctggaaaccgccgggctcgtcggggcggccatcgtcgcggcgaacgccctcggcaatctcgcggcgggcgtcgtcctgtcccgcggggtccgtcccggagtcttgctggcgctgaccgccgtcctgatgggtgtcaccggggcggccttcttccatgccgccaccccggcatcgctggcggtcgggctgggcttcgtcttctcggcggtcgccggcatgcttcccaccacgaccctggccagcgccccgctggcatcgcccacgcccgcgctgacgccactggccatcggctgggtgatgcagggcaactacctgggacaggtggtcggcccgctgctgatcggcctgatcgtcagccgcttcgactggtcgggggcgataggactgatgctgggggcgggggtggcgggtgccaccctgggggtctgcctgctgcgtacgctgggcaatctgccaacggtcgcttccacggatttcgcggctcgtccctcgggctag

SEQ ID NO: 344718 - DNA, 162 bp, Pseudomonas aeruginosa
atgcgcttgaacactccacacagcaagccggcgcgggaggatggcgacgccaccaccagcgccgttccgcgtcccgccggcggtcggcggggctgtaccgagcgcctgcgccgcatggcccggcgcaatgcctgggacctgtacgccgagcacttctactga

SEQ ID NO: 344719 - DNA, 426 bp, Pseudomonas aeruginosa
atgaatgccgccattcaaagcctgttggatatcgatgccttccccctggtccaggtccgcgacatgccgcgcgacctgccggcagtcgagcgctggctggaggaggtcgaggcggtgcttgccgtcgagcgcgacttcgccctggtctatccaccgttccccgcgggggagggggaaggcgatcagcgcgcgcgcaaacgcctggtcctgtggctcaaggaaaaccgccagcgtttcgtcgagcactgccggggcatcctgctcagcgccaacggccaaccggacaatctcgccgacctgcaacagctggccccggtgctacaggcggtctatggtccgccggtgagcgtggcgccggacctcgcgtccgcccgcggcatggcgaaggctctgctgagcgaagcggcgaagggaatgaactggtga

SEQ ID NO: 344720 - DNA, 1899 bp, Pseudomonas aeruginosa
atgcccaatggttatccacatcccaagtaccgccgggatatagatggcttgcgcgcggtggcggtgctttccgtcgtcgcgtttcacgcttttcccgaatggttcggcggaggcttcatcggcgtcgatgtgttcttcgtcatctccggcttcctgatttccagcatcattttcgaagggctggagaagggctctttccgttttgcggacttttacattcgccgtgtcagaagaatcttccccgcactgctgctggtgctcgcggcgagcggggcagtgggctgggtgatcctgcttcccgatgagtacggacagttgggcaagcacatcgccgcaggggcagggtttgtctccaacctcgtcctctggtcggaggccggctatttcgatggcgctgcagggttgaagccgctcctgcacctgtggagcctgggggtggaggagcagttctacatcgtctggcctttgctggcctggattgcctggaggttccgactcggtttcctctggcttgtggtcctgctggccggggcgtctttcggactgagcctgtatcgactggaaagcgatcccgtggctgccttctattctccgctggcgcgcttctgggagttgctggctggcgcaggtctggctgtgttgtccgtacgctaccggcatgggctgcgacgcaggccggaatttaccgcggccgccagcctgctttcgacgggggggctcctgctgctggctggcggttttgcagcgatcgacaagagctccgcgtttcctggcgcatgggccttgttgccggtgtccggggccgttctgctcatagcggcgggcgagggcgcctggttcaatcgtatcgtgctgtcccatccgctgctggtctggatcggattgatcagctatccgctgtacctgtggcattggccgttgctggtattcgcccggatcaccgaaggcggtgttccggctccggaattgcgtgccgcgctggcggtggtttcagtagcacttgcctgggccacctatcggttggtcgagaagccgatcaggcgtggcgagccgatattcgcatacgctgtggtgccactggccgtcatggcagtatgcggtgtttttggctacaagatccatatgtcgggcggtgtcgccgagcgtttcccgaaactgatccagggtttgacgcaataccgtttcccatacgccgagagctatcgcgagggtagctgtttcctcaggccggagcagggggccgaggcgtttcgggaatgtccgccagatgctgtgggcaggcgcggaagactcctgctgtggggcgattcccatgccgctcatctgtatccggggtacaaggcgatctatggcggggagttcggcatcgttcaacggaccgcgagcggttgtccgccgatgccgggcatcgatgtcgagagccgcgtgcactgtcgcgccatcaatgacgaggtcatgagctttgtggcggcgtcccgtccggacaaggtcgtactggctgccatctggaccagctacgatctctcccggctcgaggatactgtcggccggctgcgggcggccggggtcggcgagatcgatctcgtcggcccggtgccgcaatggcgcgacggcttgcccaagcaactttatctacgcttccgcgacagcatgtcgcacagggtgcctgtgcgaatgagtagcggcctggacgagcgcttcatgggggtggacgacattctgcgggaaaaggccgtggcgctgggtgtcaactacatctctccgcgaaggatcctatgcgatgacgagggctgcctgactcgcctgggggacacgggagaccagctcaccgcctgggactatggtcacctgaccgatgcggcttcggtgttcctggtcggcaggttcgcagcgtattga

SEQ ID NO: 344721 - DNA, 918 bp, Pseudomonas aeruginosa
atgataagcgcaccgcctcgatggactattgatgaacttgccgaagactctgccacctctgcagcgttgttccgggccgagcgtttagcagtctctgactcttgggaaacacactacaaccaagcacgtggcaagttcgagcagctcttcaaaaaactgagcgatctcaacccaggcgcgatcaccaacgacaacctcgccgaagcctatagcctcggccttggtgaggcgctgaggtatcttgctggcccgccgatttctgacgacgacctacgagttatcgccaacgtcgattcgatcgctccaggtgttttgaagaaaaatcccgagacattgcgtaaggtgttcgaggttatcgagcgtgtgatcgacccgcatcggttcccatggatggagggaggcggtgcgccgactgaccaacaacgcgaagcagccttgttggcttcgtctgtcctcttggccgcgcaacgcatcgccaccgagcgacgcaatgaagggaaagaaaaccaagaggcgaaggtgaaggattatcttcgcagtcttggtttcgccgaggttccagcggtggcgatcaatacaatcgtcaaggggccgcagactatgcagttctgctctgaatgtcagctcggcgagcgcaaggccgatgttgtcgtgcgcttacacgacacccgcctcatggcaatcgaatgtaaggtgtcgaacagcgcgaccaatagcgtcaagcgattaaacaacgatgcagcagtcaaagccgaatactggatcaagcagttcggtagcgcacaagtagtgcccgctgctgtactggctggtgtctttaaggtgctgaaccttgaacaggcgcaggcacgcggtctctctttgttctggtcgcatgatcttgagaagctcggtgcattcatcgattcgacacagtga

SEQ ID NO: 344722 - DNA, 1587 bp, Pseudomonas aeruginosa
atgaccgtgcagacggaacaagagctagtagccctgagcctagccctcatcggaggacaaggcggcctgtctgcgcccgagcgtaagcttgtgaagactgcgccggcattggtgcttaaacctcgggaaatcgagtcggtccgcaaagcgatcgcacgtggcggcgatccgctaggcgaagccttctcgtcgatccgttcggcgaccgagcgtcgtgcggctggtgctgtctatacgcctgcaccaatcgtccgttcaatgatgacctggctggcgagccaaggaacgcctcaccgaatagtcgatccgggggccggttcgggtcgcttcatcctggccgcaggcgaaaccttccctcaggcgcagctcgtggccgtagagatggacccgttggccgccctcatgttacgcgcgaacttgagtgcccgtggctggaccgatcgtgcgacggtgttggtcaaggactatcgggagaccaaactaccgcgttgcgccggcatgaccgctttcataggcaatccgccttatgtacgacatcacgaaattgccgaggactggaaggcttggtacgcctcgaccttcgcttcctttggcattaaggctagcgcgctagccggcttgcatttgcacttcttcctgcaaacgcggttgcttgccaaagcgggtgatgtgggcgcattcatcacctctgccgagtggatggatgtgaactatggctcggcgttacgacgactcttgctcgatgaactgggcggggtcgccctgcatgtgcttgagccgaccgttgaagcctttcctggcacggcgacaacggcagcaattacctgctttcgtgttggcgtcacggccgagccggttcgcgtgcgtgccgtcgacgagctgaaacgcctcaacggtttggccaaaggcaccgacattccacgcgaacggctgcatgccgcgcctcgctggtcaatcatcgtccggccgtccgaatcggttacagttggcgagatcgagcttggcgagctattccgtgtacatcgcggccaggttaccggcgcaaacgatatctggattgctggagagcatgcgaaaggcctgcctgatcgcgtcaaactgccggcggtgactaaggccaaagacttgatccaggccggtgcgcatttgcactcggctgaggttctgcgccgcgtcatcgatctgccagctgagctggacgacttcaccaacgaagagcgcaggagcatcgccgcatttttggcttgggccaaacttaacggagcagatcaaagctacatcgcgcgacatcgcaaagcttggtggtcggtcggcctcaaggccccagcccctatcctatgcacttacatggctcgccgaccgccccagttcacgctcaacgcgtgtgacgcgcgacatatcaacatcgctcacggcctctatccacgtcaaccgctggccgacggagtaaccgctcgactagtgacttggctaaacagaaacatcaacacgggaagtggtaggacatatgccggtggcttaactaagttcgagcctaaggaaatcgaacgcctgcgcatcccaagcttggaagctcttcttgcatga

SEQ ID NO: 344723 - DNA, 189 bp, Pseudomonas aeruginosa
atgtcaatcaaagattccgggatgcgcatcagggtggagaaggagctgcgcgacgcgttcgtgcaggcttgtcgcgcccaagatcggcacgcttctgatgtgctgcgcgatttcatgcgtaccttcacggagaagcaactgctaggccaggctgacctgttcgccggcctaaagggaaagcaaaaatga

SEQ ID NO: 344724 - DNA, 1758 bp, Pseudomonas aeruginosa
atgcaggaaatagaggccctatttcaaggaatcaggtccgcctttgatggcaacgaggacttgggcaacgctatatctgacctgaaagagcttcgtgatgcattcgggattacgaagacaggaacgctttccaagtcaagcaaaggctacaaggcatttggttcgggaaataaaattgcgaatatcccagatcatctcagaccgttcgaaaactttattaagagcgatcaaccagcaacgtggatagcgtggcagactaaaggaaattccttcttggagttgtcggataactgcccttattgttcttcaagttttcaaggaaccgataggaagaacgtagcacaatcagttgccaaggagtacgactcaaaagccgtagagcatttgagtgcattgcagacaattattggaaggttggggaagtattttgacgatgcttgccgcgagagcttggaaaaaataacaaaatcgaaggttgagctttcactggaagagacgaatttcttgagtgcccttaggggtgacgttgaaacgcttatcaccaaacttgaagggttgcgctctatttcattttttgcgcttcgagatgtcgagaaaatagaagacgaaattggtaagctcaaaatcgacctcggatttcttgagagacttagttcggcggagactaaatctgttgttgatcccgtaaatacaaagctccaagagctggcagagaaggtgggggacctgaagggaaaaatcaacaaacacaaaaagctgatcgagagaactgtcgccgaaaaccaagatggcatcaatggtttcctgaagtcggctggttataagtacaacgttgttatcaaagctgaggctgattcctacaagatgaagctagtgcaccaagaccacgatgagcatattgagaccgctgcgcaacacctgagctatggagaaagaaatgcttttgctcttatactgttcatgtatcaggttttgagggaaaaacctgggctggcagtcttggatgatcctgtctcaagctttgacaagacgaagaaattcgctattttgaatgagttgtttagaggtaaggcgagccttcgcgatacaaccgtcctcatgctgacccatgatatcgagcctgccatagatgttattcgcggcgttaaacggctatttcagcaccccaagccaacggcatatttcctagcgtcgaaggcaggcgtcgtatccgagttggagattaaagaggaaaacattcaaaccttcgcgcagatatgcaatgacaatattcgcgaactagcagatgaagttattaagtgtatatatttgagaaggcactttgagataatcaacgatctcggtatggaatataactatttagcgaatcttttgcatgcgagggacgtgcctactctaaaatctgccgtgggcgatgttgcaatggatgcgcagcagattacggatgctgaagcaggcatcaagaagtttatcccgactttcaattacgcgtcgatgcttgccataattaaagataaggcagagatgaagcgtcgcttcaccgatgctacggttgggtacgataagattcaacttttccgcatttataaggaagtgcacagttccgccaatggggagcaggatggaattctccaaaaattcgtgaatgagtctttccatatcgagaatgagtatgtgatgcagctaaatccccacaagtttgataatgtgccggaatatgttgttcaggagtgtgatcgcctggttttagccagctga

SEQ ID NO: 344725 - DNA, 3705 bp, Pseudomonas aeruginosa
atgtccagcccgctcaccgatcgcagcgcccgtctgcaagccctccagcacgccctcagggaacgcatcctgatcctcgacggcggcatggggaccatgatccagagctacaggctggaagaagcggactaccgcggcgagcgtttcgccgactggccgagcgacgtgaagggcaacaacgacctcctgctgctcagccgtccggacgtgatccaggccatcgagaaggcctatctcgacgccggcgccgacatcctcgagaccaacaccttcaacgccacccaggtgtcccaggccgactacggcatgcagtcgctggcctacgaactcaacgtcgaaggggcgcgcctggcccgccaggtggccgatgcgaagaccgccgagactccggacaagccgcgcttcgtcgccggcgtgctcggcccgaccagccgcacctgctcgatttccccggacgtgaacaaccccggctaccgcaacgtcaccttcgacgagctggtggagaactacgtcgaggcgacccgtggcctgatcgaaggcggcgccgacctgatcctgatcgagaccatcttcgacaccctcaacgccaaggcggcgatcttcgccgtccagggcgtgttcgaggagctcggcgtggaactgccgatcatgatctccgggaccatcaccgacgcctccggccgcaccctgtcgggccagaccaccgaggccttctggaactcggtgcggcacgcccggccgatctcggtgggcctgaactgcgcgctcggcgccagggagctgcgcccctacatcgaggaactgtcgaccaaggccgacacccatgtctcggcccaccccaacgccggcctgccgaacgccttcggcgaatacgacgaatcgccggcggaaatggccgtggtggtcgaggaatttgccgcggctggcttcctcaatatcgtcggcggctgctgtggcaccaccccggcgcacatcgaggcgatcgccaaggcagtggccaagtacccgccgcgggccatcccggagataccccaggcctgtcgcctgtccggcctggagccgttcaccatcgaccgcagttcgctgttcgtcaacgtcggcgagcgcaccaacatcaccggatcggccaggttcgcccgactgatccgcgaggaaaactacgcggaagccctcgaggtcgcccagcagcaggtggaagccggcgcccaggtgatcgacatcaacatggacgaaggcatgctggactcgaaggcggccatggtcaccttcctcaacctgatcgcctccgagcccgacatctcgcgcgtgccgatcatgatcgactcctccaagtgggaagtgatcgaggccggcctgaagtgcatccagggcaagggcatcgtcaactcgatctcgatgaaggaaggcgtcgaggccttcaagcaccacgcccgcctgtgcaagcgctacggcgccgcggtggtggtgatggccttcgacgaggacggccaggccgacacccaggcgcgcaaggaagaaatctgcaagcgctcctatgacatcctggtcgacgaagtcggcttcccgccggaagacatcatcttcgacgcgaacatcttcgccatcgccaccggcatcgaggagcacaacaactacgcggtcgacttcatcaacgcctgcgcctacatccgcgaccacctgccctacgcgctcagctcgggcggggtgtccaacgtgtccttctcgttccgcggcaacaacccggtgcgcgaggcgatccactcggtgttcctctactacgcgatccgcaacggcctgaccatgggcatcgtcaacgccggccagctggaaatctacgacgagatcccgaaggcgctgcgcgaccgggtcgaggacgtggtgctcaaccgcacgcccgaggccaccgaggccctgctggcgatcgccgacgactacaggggcggcggcgcggtcaaggaggccgaggacgaggaatggcgcagctacagcgtcgagaagcgcctcgagcatgcgctggtcaagggcatcaccacctggatcgtcgaggacaccgaggaatgccgccagcagtgcgcgcgccccatcgaggtcatcgaaggcccgctgatggccgggatgaacgtggtcggcgacctgttcggcgccggcaagatgttcctcccgcaggtggtcaagtccgcgcgagtgatgaagcaggcggtggcccacctgattcccttcatcgaggcggagaaaggcgacaagccggaagccaagggcaagatcctgatggctacggtgaagggcgacgtgcacgacatcggcaagaacatcgtcggcgtggtgctcggctgcaacggctatgacgtggtcgacctcggcgtgatggtgccggcggagaagatcctgcagaccgccatcgccgagaagtgcgacatcatcggcctgtccggcctgatcacgccgtcgctggacgagatggtccacgtcgctaaggaaatgcagcggcagaatttccagctgccgctgatgatcggcggcgccaccacctcgaaggctcacaccgcggtgaagatcgacccgcagtacagcaacgacgcggtggtctacgtcaccgacgcctcgcgcgcggtaggcgtggccaccagcctgctgtccaaggagctgaaggccgactacgtggcccgcacccgcgccgactacgcggtggtccgcgaacgcacggccaaccgcagcgcccgcaccgagcgactgagctacgaacaggcgatcgccaacaagccggccttcgactgggccggctaccaggcgccgacgccttccttcaccggcgtcagggtgctcgacgagatcgacctcgcggtgctcgccgagtacatcgactggacaccgttcttcatttcctgggacctggccggcaagtacccgcgcatcctcaccgacgaggtggtcggcgaggccgccacctcgttgttcaacgacgcccaggcgatgctgaagaagctgatcgacgagaagctgatcaaggcccgcgcggtgttcggcttctggccggccaaccaggtcgagcacgacgacctggaggtctacgacgccgacggcgagaccctcgccaccctgcaccacctgcggcagcagacgatcaagccggacggcaagccgaacctgtcgctggccgacttcgtcgcgccgaaggaaagcggcgtgcgcgactacctcggcggcttcatcaccaccgccgggatcggcgccgaggaagtggccaaggcttacgaagccaagggcgacgactacaacagcatcatggtcaaggcgctcgccgaccgcctcgccgaagcctgcgccgagtggctgcacgagcgggtgcgcaaggagtactggggctacgcccgcgacgagcacctcgacaacgaggccttgatcaaggagcaatacgtcggcatccgcccggcaccgggctacccggcctgccccgaccataccgagaaaggcaccctgttcgaactgctcgatccgcagggcctgtccggcgtcagcctgaccgagcactacgcgatgttccccgccgcggcggtcagcggttggtatttcgcccatccgcaggcgcagtacttcgcggtcggcaagatcgacagggaccaggtggaacgctacagccagcgcaagggccaggaagccagcgtcagcgagcgctggctggcgccgaaccttggctacgacgactga

SEQ ID NO: 344726 - DNA, 1134 bp, Pseudomonas aeruginosa
atgtcgaagaactacggacaagctgcaccgaagaaggcaaggatgctgggactggtgccgatgatgaagcctctttccatatccggaaagcatccggattccccactcttatcccgctccagaatcgttctgcggagagtggcgctcgccctgttcgcctggcagttttcctgctcggccatggcggcatgcgaagtcggctcaggtggtgtctacagggctacgctgtcattgccgaccagcgtcaccgtaccgcgcgacgcagcgcctggcagcgtcatagccagcgcccgctacaactacagcttcaaccagtcgagcccggtcggcgtttactgcaacaccggcgtgacagtggactggatctctggcaatggacagtcggccaacaccgatggagtgattcccagcggcacccctggcatcggctatcgactgaaggccacctccagcgagtacgccctgaaacctggctcttcgcaggtcccggtgacgaccttcaccacgccgtcactgtgcggctatccggccagcggcaaatgctacctctacctgggcagcccgatcatcctcgaactggtcaagaccggcgaagtttaccccggtgccgaggttagcggcggcctgctcctcagccagcgagtgggcgggttcaccagttcgaccatcaccctctcgaccccactggtgcacgtcacgccgcagacctgcaccttgcagacgaggcagcccgtgaacgttgcgttcgggccgataggcatcggcgagatgaaagatctcaacagcgtatcgtccgcccgtaccttcaggctgagcatcgactgccgggggaccagcaccaagctagcggtgaccttcaccgacgccacatccccctcgaaccgctccgacgttctgtccctcagccgtgactccaccgcgaccggcttcggcatccagatcctgctcggcgcccagaaggtgcgcttcggcgccgactcgcgggacgcgggcaatcccaaccagctcctcctgggtaccgttgccaaccgcatccacgaagagcagttcaccgcccgctacatccgcaccgcgacgaacgccaaggctggcaaggccaacggcagcgcaaccttcaccatgtcgtaccagtga

SEQ ID NO: 344727 - DNA, 1203 bp, Pseudomonas aeruginosa
ttgagtctacaagcaggcaaactgccgcgtttcagtgatgtatcgtggcgctggatcgcctattgttcatcggccgcggtcctggggggtgtcgtcttcgcgttcgttcaggaggtcgagctgaagcgggacgtgccttgcgaaatcgtctcgccttccgaactcaagatcaccggccacgaaggactcgtcacccgtgtcctggtagctcccggacagcctgtccgcgagggccagccgctgttcgagctgagccgcgacctgacgctttccagcgacggaaccccacgaccgaaattcgacgaacgcatgcgcgatgccaagctggccaccatcgaggcgcaattcgtcgatcgtcgctcggccctctccgcccgcctgcaggccggcgaactgagcgagatggcacggacccgcgaactccaggcactggacaggcaacgttcacgcgcccgccagttggtccgggatacacgggccacgctcgaacgcctgcagggccttgccgactacgtcaccgccgagcgcctggagcaggcacgcgcacgccagcatcaaagcgaggcggacgcagcacagggtgacgcccggcgtctttcattgcaggcggagatcgaaacgctgcgcggtgcgcgccacgaactccaggcccagatagcagaattggacgcccagcgcgcgcgcgacatccaggacgtgcaaacgcgcttcgagaacgaacgccaggacatcgtcgtcgccgcgccccggaacggcaccatcgccttttccagcctggttgcaggccacacgctgcagagcgaggacatcagcctggtgatcgataccggctcctcgcaatcgctgtcggtgatgctgcgcattccgtcgcggcagcgcggattcgtccgcgagggccagacggtcaagatcaagctcgacgcctacccgtacgcccgcttcggcgcggtggaagcacgcatacggtcgatctccggcaccaccatgggcaaggtcgagccgacatccccgccagcgctccccaccccggtgcgccaagccgactacatggcctgggcgctccttccgagcgacagcttcggcccggcgcgccggccgttgcgcatactgcccggcatgcagggtaccgccagcatcgtcgtcgagcgcaggagcatcgccgagtgggtactcgaaccgctgttccagatggtgcggggctga

SEQ ID NO: 344728 - DNA, 2103 bp, Pseudomonas aeruginosa
atgcgggtcatctaccagaacgaagtggccgattgcggctacgcctgcctggcgatggtgctgtgtcatctgggccgcgccacggaagtccgcgagattaccgcgcagcgaccgatctcctcccatgggctgaccttgatggatctgtacgatgtggccaccgagttcggcctcgccgtgcaggcctaccggttcgatgccggagacctcggggagatcaagcgtggcgcgatcgtccacttcggcggagcccacttcgtggtcttcgagaagtaccgccgcggctacgtccaggtgatcgaccccgcgctgggccgccggcgcatagccctcgacatgttcctggcgaacgtttcgggctacctgctcgagtgcgcgccgaccccacgcatgccacgcatacgcgcacgctcccggataccggcggcccttgcccgtgtccgcgaactcaatccgcaactgcgtggccagatcggcaagctgatgttcgtcgcgatcggaggacagttcgcgatcctggccatgccctacttcggcaacctggtcctcgaccaggtcgtgaccagcgacaatcgcaacctgttgcacatcctggccttcaccttcgccagcattttcctggtcgggaccatcagcacgctggtccagtcctatctgaccgctttggtcaccgcgctggtaagcgtcaacgtcacccagggactggtcggccagttgctgcgcaacccgatcccctacttcgagaaacgcaacgtaggcgacctgttcgcccggctcaagtcccaggacgaaatcaacgactatacggtgcatacagccatctcgttgcgcatcgacctcgtggtcgggcttgccgcgctgctgctgatgctggtccagagcccgctgctgaccgccgtcgcgctggctatcttcgcgctgtacctggcgaccgcgttcgccctgtatgtccccatgcgcgacgcccacatgcgggtgctggaacactccgcggaatgcgacgacacactcatcgagacgatccgcggcgccagcctggtcaagctcgcctccggcgaggtccggcgcacctcgatctacatgggcaagttcagggcctatgccgccgcgatgctggacagcgccaggctctccgcgatccgcgatggcgtgctcaagttcgtcgattacatggacgtcatcgccataacctggctctcggccggcctcatgctcgacggcaagctgtccgtgggcgtcttctactcattcatgatctacaagtccctggcatccgagcgcctggcgcaggccatcaacgctctgttcggccgcttcatgctgagcgtaccggtggagcgggtggccgacgtgatcgacaatcccccggaacgctatgccgccgccgagcagtccggtggcccggcagagttccgccacttcgaggggctgcaggttcacgacctgtccttcagctacggggcctccgaccgtaacgtgctggacgcggtcaacctggacatccgcaagggcgacaagatcgctatcctcggcccctccggcagcggcaagtcgaccctcttcaaactcctgtgcgcagccgagcctcttcatcacggcgagatccgtctcaacggcgtggacttcgccaacctggcggtcgacgagattcgccgccacatgacgcagatgcgccagggcgacctgatcctgcgcggcaccatcgccgacaacatctcgctgttcagcgccaacgccgaccagcagcgcatccaccacctgctcgaccaggtaggtctgctggctgatgtgatgcgcctgcccatgcgcacccgaaccgtcatcagcgactccatcgccaacatttccgccggccagcgccaacgcctgctgctggcacgggcgctgtaccagcccgccgagctgttgctgctggacgagccaacctcgaacctcgacccggcctccgtccagcgcatcgccgggttgctgcgcgacctcgatcgtaccctcgtggtgatcacccacgatcgtgcgctggcagccagtttcgaacgctgctaccagatgcacgacggaaccctgctatctcgtggccggcaggccgggctggcgacgccatga

SEQ ID NO: 344729 - DNA, 1299 bp, Pseudomonas aeruginosa
atgagacggctgattttcctgctcgccctgatctgcaccggccccgcaaccgcgggcgagctgctggcgctggtcaatgatgcccttgcctacgacgcagggctcgccggtgggcgtgccagcgtagagatcggccgcctggaggtcccgcgggcacgctccgcgctcctgcccaggctggagggcggctggggccgagcctacaatcggatcgaaaccgaggatgtaccctcgatcagctaccggcagaatggctggacggtttccctcacccagccactgttcgactggcaacgctggatcgcgctgaaacaggccggcacagccagtgcgcgttcgcgcctggaatacgcgcaggcctggcaggatctggtcttgcgcaccgcacgaagctatttcgacgcactccaggcacaagatgtcctggagttgtcacagggctacctggacgctgttcaggcgcaacactcgctcgtccttcatcagcaccaaggcggtgaagcgacattgatcgacatgcgggaagcgcaggttcgcctggacagcgcccgcctgcaacgacgctcggcgcgccatgcactcgactcgaagctgcgagaactcgaaagcctgagcggccgaccagcccgcctagccccaaggaacctggcgagcatccccgcaccgtggctcgaaccgggcagcatcgagcaatgggtgcatcaggccgaaacgaaaaactatggggtacagctcggacaactgaaggtccgcgccgcacaggacgacgcagaaaggactcgcgcccagcgctatccggtggtcagtctcagcggtacccattctccctcgggcgccgcttccggctacgccaggcccaccacgaccaccacggccatgctgaccgttaccgtgccgttgttcaccggtggcgaaatccgtacccgcgtacgccaggccctggcctcggaggacctggcccgtaacgagttgctggaggcgacgcgccaggccagcagcgatagccgcgagtccttcgagaacttcatctgggcccgcgagcgcaacgagacgctgaacgatctggtccaggcccggcaagccgccctggcggcaacgcgaatgggctacctggccggcagtcgtggcaacctcgacgtcctgcgcgcccaggaagccctgcatgacagctcgaaggaactggtccaggcgcaccacgacatgcttacgtcctatctttcgctgaaagccgacgcggccgcccttgatctgggcgacatcgcccggctggaccactggctggcaaacgatgcgcattag

SEQ ID NO: 344730 - DNA, 918 bp, Pseudomonas aeruginosa
atgcgcattagattgtcgaactccgcactgcgctggcatgaccggtttctgctgcggttgtcgccgcacggcatcgaacggcttgcgctgctgtcatggtgcacgcgcagcctgttcgactcccgcacgcgctggaacggctggctacgctacgaatgggggaaaacgaccctgtccctggagcgtgaggccgtgtggcgcacctgcgctgccggccatctggaacgactgctggaccagcgctttctgctggagcggatcgctggaaggccgtcccgctggccggacctcgaagagacggcctgcgccctgcacgagagcctccagaggctccaccgggacctaccgggccagccggtgattctctcgccgttccactacgtgtcgcagcacgccaatatctacctgatggaccggctacgctcgctgctgggactcgacgagatagccgtggtttccggcgtaccccgcgcagactatgggcatcgggagcgggcgctagcacctggcctgcgcctgctgcatacctacgatgaaagcaaccgcaacgcactcggcctgaaagtgctccaggcgctgcgccgggatcgcctcgcggtactgttcgccgatgtgccgccctatctgatgcaacgctatccgatggaaacgatcgctgtctcgatgctcggccgaccggcccggatccaccgcggcgtattccgtatcggcgcgcgtctggacgccctgctgctaccctttcatctgaccttcgcgaaaggtcgcttcggtcacgtgctgttcgagccgatcaggctggcgcgggacgaggcgccgcaacaactggccgattgcatcgaacgggcatgccggcacgcctacccggactggatcatcgctggacatccggcccaatatggattcgcgccgcgcaagtga

SEQ ID NO: 344731 - DNA, 1659 bp, Pseudomonas aeruginosa
atgtacgtatacgacgagtacgaccaacggatcgtcgaggaccgcgtcaagcagttccgcgaccagacccgccgttacctggcgggcgaattgactggcgaggagttccgcccgctgcgcctgcagaacggcctctacatccagcgctatgccccgatgctgcgcatcgccgtgccctatggcctgctctcctcgcgccagttgcgcaagctggcgcagatcgcccgcgactacgacaagggctacgcccacatcagcacccggcagaacgtgcagttcaactggccggaactggaggacgtgccggaaatcctcgccgaactggccaccgtgcagatgcacgcgatccagaccagcggcaactgcattcgcaacaccaccaccgaccagttcgccggcgtcgcccgcgacgagctggtggacccccgtccctggtgcgagatcattcgccagtggtcgaccttccatcccgagttcgcccacctgccgcgcaagttcaagatcgcggtgaacggcgcggtgagcgaccgcgccgccatcgaggtgcacgacatcggcctggaagcggtgaagaacgaggccggcgagctcggcttccgcgtctcggtcggcggcggcctgggccggaccccgatcgtcggcagcttcatcaacgagttcctgccctggcagcacctgctcggctatctcgacgccatcctgcgcgtgtacaaccgctatggccgtcgcgacaacaagtacaaggcgcggatcaagatcctggtcaaggcgctgaccccagaagtcttcgccgagcgcgtcgaggccgaatgggccagcctgaaggacggtccgagcaccctcaccgaggccgaagtccagcgcgtcgccgcgcacttcgtcgatcccgcctacaaggccctcgacgacctcgacgaatccctcgcccggctcgatgccgagcatcccggcttcgcccgctggcgcgcacgcaacaccttcgcccacaagaaggccggctacatcgccgtgaccctctcgctgaaacccaccggccaggccccgggcgacgtcaccgacaagcagctggacgccatcgccgacctcgccgaccgctacagcttcggcgaggtgcgcaacagccacaaccagaacatcatcctcgccgacgtcgagcagggcgagctgttcaccctctggggcgaactgcgcgaactgggcttcgccacacccaacgtcggcctgctgaccgacatcatctgctgcccgggcggcgacttctgctccctggccaacgccaagtcgatcccgatcgccgaggctatccagcgtcgcttcgacaatctcgactacctgttcgacatcggtgacatcgacctgaacatctccggctgcatgaacgcctgcggccaccaccatgtcggccacatcggcatcctcggggtcgacaagaaaggcgcggagttctaccaggtctccctcggcggcagctcggcgcgcgacgccagcctcgggcagatcctcggtccgtccttcgcccaggaacagatggccgacgtgatcgacaagatcatccaggtctacgtggaacgccggaccgaggaagagcccttcatcgacaccttccgccgtatcggtatcgacccgttcaaggagcgcgtatatgcagcgaatcattaa

SEQ ID NO: 344732 - DNA, 318 bp, Pseudomonas aeruginosa
atgcgcaacgcctggcagatcgtcggcggccactatgccgcctcgacccgcggcgacctcgccgggatgctggcggacatggacgaacgcacgcaatggacggaaacggccggtttcccgctggccggcacccatgtcggcgtggcgatccgcgccggggtgttccaggccttgcagcgggactgggagggctccagggtcgagatcgagcgcctgatcggcggcggcgacaacgtggtcgccgtcggtcgatatgcagcgcccaccgccgcagcggcaagtcgttcgaggcgcgggtggcgcatatctggatggtga

SEQ ID NO: 344733 - DNA, 1803 bp, Pseudomonas aeruginosa
atgttccgcgcaatgcatctccctctcctcggctgcctgatcggcgccagcggctgccagggcctgccgcccagctctccgatgacaagcgccgatccggaacactacggcgaggtcatcgactacctgcagcagcatatccgccagcagatgaagatccagaaggtccccggcctcgccctggcgctggtcgatgatcagcaactgatctgggcacgcggcttcggctacgccgacgtcgaacgcaggagcaacgccagcgagcacaccgccttccgcgtcggcggcctgtccaaactgctgaccgccagcgcctcgctgcaactggcagagcgcgggctgctgccgctcgacagccccctgcaggacagcctgcgcgagttctacgtccgctcgcggttccatgccgaccagggcgaggcggatcgcgccgttaccatccgccggctgctcagccaccaatccggcctgcctggcgaccacatgccggatctgttcgacgaccgcccactgccactggcacagttgcccgcgaaagtatccggagtctggctgagcaatccacccggaacccaggtcgcctactccaacctgggctacgcactgctcggcgcggccatcgaacgcagcagcggcgaggatttcgagcagcacctgcaggacagcctcctgcgccccctgcagatgtcccgctccagcttcgccacgcacacgcggacggaacagcatcgcgcccgcggctatggcgccaccgaagacgagtcccgcgacctgccggccaacggtttgtgggccagtccggccgacctcagccgcttcgtccgcatgctgttcgccgacggccggtacaaggaccggcagttgctgcgcaagcagtcggtcgaggagatgttccgccagcagaacgccggcaacgtcctggacttcgactgccaggtgggtctcgcgtggttcctgacgtcctgcggcacgccacccctggaaaacgccgggcgccactacgcctacgcaggaagcgcagcgggcttccacgcctacctgatcctggcaccggagcagcgcctggcggccatcgtcatgagcaattccgccgccgccggcagcctcacctcctccctggcgcggcatgcgctttcgctgatgctgcgggtcaagcaaagcggcgcgcccaccccgatgacaacgacgccctccagatccgcgggtctggcagtaccaagccccatggatcgccagcggctgagcggtcattacgcgaccagtcttggactggttcgcctgcacgagcgcaaaggccgcctgtatgccgacttcggcgaccagcgcgtggagctgctgcgcaatgccgcgggctggctccaggcgagaaaacggctgctgggactctggcccgtcgacctgaaggaacccgggcaaccgcaactggacgtcgtcagccatggtcagcgacagatcctggtctgccgccgccacggacgaaccacctaccttggcgagcgcatcgcccggacacccctgccccaggcctgggtagataccgtcggcagctaccgcgtctccggcaatggcgggcacagctacctcgatggcctgtcgatcaggctagcggatggcttcctgctggtgcgcggacgaaccggaaacggccagctcggcgaattcatcctgcaacccgtggacagcgcgcatgcggtcctggccggcagcggccagggcctgggggacaccttcagccgtgacttcgacggcctgaacgcgctcggctaccgcttcgcccgccagggcacccaggcatcaccctga

SEQ ID NO: 344734 - DNA, 780 bp, Pseudomonas aeruginosa
atgaaaaccgcctccctgtgcctcgccggcacgctcgccggcctgtgttccgccgccaccgccgaggaatggcactacagcctcggcctgggcgccagcaacgcgccccgctacagcggtagcgacgaacgcgtcagcgctcccctggtcaatctggaagtggagggtccttatggatttttcctggacctggacaaagggctcggctggcaacatgactggcaggacgccagtcttgcgctctacgcgggccccagcgagcgccgcaaggaccgccgctcgcgcttccatggctcggaccgcctgaacggcctgggctcgatcgatgcccgcccccggctcggcctggccggtacctacgatatagggccggtcacgctcggggcgaccttcgagcacgccctgcgcaaagacagcgagcgcgacaccggctccgccttcagcagcctggaactgagcctttccggcgaactgtacgaaggccgcttcggccggctgaacggggctctcgacagccgcttcggcgacggcgactacctgcgaacctggtacggcgtcagcgcgcgacaagcggcgcgcagccgcttcaaggcctacgacgcgcacggcggattggtgagcattggcgccagcctgacctggcgctatccccttggccaggacaccagcctgatcggcgccttcgacatacaacgcctggccggcgacgccggcgacagcccgatcgtcgaacgtcgtacgcaaagctcgctcagcgcgctggtggaataccgcttctga

SEQ ID NO: 344735 - DNA, 129 bp, Pseudomonas aeruginosa
atgttcacgaccttcgccctccgtggccgtcaaccctacatcgcccgccgaaacgccctgcagggcaacgccccgctccagaaaccgacaggccgccaggagcccccggcagccacgggaaaatcctga

SEQ ID NO: 344736 - DNA, 216 bp, Pseudomonas aeruginosa
atgaaatggaccgagcagcgcttgcgcaaggcgttgaaacagatggccaacgatcaggagtctgcggccgtcgagatcatgcgcgccgtcgagcgctcgagcgatcccaggctggctcagcgcttgctcgaagtgatcgagcgaatgcaccagggtgccgatgtgcttcgttccatcgatgacgacatcgccagcggcgtgatccgttgccagtga

SEQ ID NO: 344737 - DNA, 948 bp, Pseudomonas aeruginosa
atgaaaccaacgcagcggcggatcggcatcatcggtacgggagccatcggcggcttctatggatcgatgctggcgcatgccggccacgatgtgcattttctcctgcgcagcgagttcgaggcggtcagtcgcgccggcctgaccctgaacagcgcggtgcatggtacgcggcgcctggcgccggtccaggcctaccattcggcgcaggacatgccgccctgcgactggttgctggtgggcgccaagaccaccagcaacgcccagctcgcgccgctgatcagcgcggcggcggcggagggcgcgaaggtgctgctgttgcagaacggcctgggcgtcgaggaacagttgcgcccgttgctgcccgaaagcctgcatctgctcggcggcctctgtttcatctgcgtgcaccgcagcgagccgggagtgatcgagcaccaggcttatggcggggtgaacctcggctatcattccggcccggccgagcagtcgcgacgaggcgagatcgtcgaggagggggccgcgctgttccgcgccgccggcctgggatcgacggcgatgccggacctggagcaggcgcgctggcagaagctggtgtggaacatcccctacaacgggctgtcggtattgctggacagcagcaccgcgccgctgatggccgacccggacagccgggcgctgatcgaggcgatgatgcaggaggtcatcgacgccgccgctgcctgcggcttcgtcctgccgcctggctatgccggacagttgctggcggcgaccgagcggatgcccgattatcgcccgagcatgtaccacgacttcgcccagcggcgtccgctggaactcgcggcgatctatgctgcacctctggcgcgggccgccgccacgggatgcgacatgcccagggtacaggcgctgcaccaggcgttgcgcttcctcgaagcgcgaggacgctga

SEQ ID NO: 344738 - DNA, 336 bp, Pseudomonas aeruginosa
gtgccgtccctggaactcaccgatctggacgccgaccagcgattgctcgccctgccaggggtttccctgctggttttcaccggcgaagggtgcgcctcctgccgatgggcgcggcgtcacctcggtgacctggatctccccgtcgagcgcctgtgctgggtggatgccggccgcaacggcggactggtggagcgctacggggttttccacctgccagccctgttcgtggttcgcgacggccgtttccacggcgccttgaatgtcccgctgcaacgcgaggccctgcggggcgcggtactggcgggattgtccggttcacctgaggagttgccctga

SEQ ID NO: 344739 - DNA, 189 bp, Pseudomonas aeruginosa
atgaaacgcaatgtcttcgccactctcctgctcggcctggtcgccagcctttccctgccgggtgccttcgccgacgagtccagcctgatggaaaaccgcatggtccggttgaaccagcacgccatcgaacaggcccaccagcagcaggccatcgcgccggctgcgagcgatagcgatgcgcagggctga

SEQ ID NO: 344740 - DNA, 2295 bp, Pseudomonas aeruginosa
atgaacaggctgtgtgtactggggcttttcatcgggctgagcgggagcccggcactggcggcaggccaggctggatccgccggtccggcagcggacgccaaggagcgtttcatttccaccctcatggctcgcatgagcaatgaggaaaagatcggccagctgcgcctggtcagcgtcggcgccgaccatcccaagcaagcgctgatggcggacatccgcgccggcaaggtcggcgcgatcttcaacacggtgacccggccggacatccgcgcgatgcaggaccaggtccgccacagccgcctgaagatcccgctgttctacgcctacgatgtggcccacgggcatcgcaccatcttccccatcagcctcggcctcgccgccagctgggaccccgaggtggtcgcccgcagcgcacggatctccgcgctggaggctagcgccgacggcctcgacatgagtttctcgccgatggtcgacatcacccgcgacgcacgctggggacgggtctcggaaggcttcggcgaagacacctacctgacctcgctgctgtcgggcacgatggtccgcgcctaccagggcaaggacctcgccgcgccggacagcatcatggcggcggtcaagcacttcgcactgtatggcgcagccgagggcggccgcgactacaacaccgtggacatgagcctgccgcgcatgttccaggactacctgccgccctacaaggccgcggtggacgccggcgccggcgcggtgatggtctcgctgaacaccatcaacggcgtgcccgccaccgccaaccgctggctgctgaccgacctgctgcgccagcaatggggcttcaagggactgaccgtcagcgaccacggcgcggtgaaggaactgatcaagcacggcctcgccggcaacgagcgggacgccacgcgcctggcgatccaggccggtgtcgacatgaacatgaacgatgatctctactccacctggctgccgaagctgctggcggccggcgagatcgaccaggccgacatcgatcgcgcctgccgcgacgtgctggcggcgaaatacgatctcggcctgttcaccgatccctatcggcgcctgggcaagccggacgacccgccgttcgacaccaacgccgagagccgcctgcaccgccaggccgcccgcgaggtggctcgcgaagggctggtcctgttgaagaaccgcgacggcctgctgccgttgaagaaacagggacggatcgcggtgatcggccccctggccaagagccagcgcgacgtcatcggcagttggtcggccgccggcgtgccacgccaggcggtgagcgtgtaccagggcctggccaacgccgtcggcgagcgcgccaccctcctctatgccaagggcgccaatgtcagcggcgacccggcgatcctcgactacctgaacagctacaacccggaagtcgaggtcgacccccgtcccgccgacgaaatgctcgacgaggcgctgcgcaccgcgcgcgacgccgacctggtcatcgccgtggtcggcgaatcgcagggcatggcccacgaggcctccagtcgcaccgacctgcgcatcccggccagccagcggcggctgctgaaggcactgaaggccaccggcaagccactggtgctggtgctgatgaacggacgcccgctgtcgctgggctgggagcaggaaaacgccgatgcgatcctggaaacctggttcagcggcaccgagggcggcaacgccatcgccgacgtgctgttcggcgagcacaaccccagcggcaagctgaccatgtccttcccgcgttcggtgggccaggtgccggtctactacaaccacctgaacaccggccggccgatggaccacgacaaccccggcaagtacacctcgcgctacttcgacgaggccaacggaccgctctacccgttcggctacggcctcagctacaccgaattcagcctctcgccactgcgcctgtccagcgagcgcctggcccgcggcgatacgctggaagcacgggtgaccctgaagaacgatggcaagcgcgccggcgccacggtggtccagctgtacctgcaggacccggtcgccagcctcagccggccagtgaaggaactgcgcggtttccgcaaggtgctgctgcagccaggcgagtcccgcgagattgtcttcaccctcggcgaggcggacctgaagttctacgacagccagctcagacacgctgccgagccaggcgagttcaaggtcttcgtcggcctggactcggcaaaggtcgaggaagggcgcttcaccctgctctga

SEQ ID NO: 344741 - DNA, 408 bp, Pseudomonas aeruginosa
atgaccggatacggcagtctgttcgaacgcctcaccggcgagacggataaacgcgctggctggagcagcgaggtttccgccatggcgtcggtggctgcccatctggccaagatgctcagcacccgggcgggcagcgtgcagacgctgtccgactacgggttacccgatctcaacgacatgcgcctgagcctgcatgatgccctgagccaggcccgggcggccatcgaaagcttcatcgaggcctatgaaccacgcctgggcgaggtgcatgtcgttcccctgccgccggacaacgaccaactccgcctggccttcagcatagagggcctgctggaagtggagggagtcaagcgccaggtgagtttttccgcgtgcctggatgggcgcggccaggtgacggtcagttga

SEQ ID NO: 344742 - DNA, 336 bp, Pseudomonas aeruginosa
atgggggttccttccgaccgccaactggaagtctgccgtcgccatggcctggaaccgcgggcgccagagccgatgctggcgctggccctgcgaacgttgggagattcgccgctgcacggcagccgtatcgagctgccggaaggtggcaatgtcagttggttcatccatgccggcgagtactccgaagccgaggacttctaccagccagtgcatgccgcccatctcgccgagctgctgccagaagtgctcgattacctgtacctgccgccgggcgcgcgcttcctcatcgacggggacggctacgaagatgtctggctggagccggcgtcggcctga

SEQ ID NO: 344743 - DNA, 537 bp, Pseudomonas aeruginosa
atgaatgcaccgagcccctgtctttccgctgaccgcggcagcgtcgccacgctgtacctcgaaaaccacgcctggctgcgcggctggctggcctaccggctacgttcctggggccgcgaggtggcggacgacctggcccaggacaccttcctgcgcatcctcgccagccacgacgccgcgcagcgcgaggcgatccgccagccacgcgcctacctgacgcgcatcgccacctgcgtgctggtcagctggcgacgccgccagtcgctggaactcgcctggctcgaggccctggccacgctgcccgagccgttgcagccgtcgccggagcagcagagcgtgatcgtcgagaccctgcacgagatcgacgcgctgctcgacaccctgcgcccgcgggtgaaacaggcattcctgatggcgaccctggacggcatgaggcagaaggacatcgccgaggcgctggacgtggcgctgccgacggtgaagaaatacatccaccagggcttcctgacctgcctgagcttgatgcccgatgactga

SEQ ID NO: 344744 - DNA, 342 bp, Pseudomonas aeruginosa
atgaaaggttccctgatcctcggcctcaccctcgccgccctgaccaccaatgccgccttcgccgccgacggcgccagccgcaccgtcgaccgcctgcaccaggacatgaccagcgtcgagctgcgcatcgccggcaacggcagcgagcggaccatcgaccgcctgcacaaggacatgagtcaggccgaagcccgcctggccgacaacggcagcgaacagaccatcgatcgcctgcacaaggacatgagccaggccgaagcgcgcctggccgacaacggcagcgaacggaccgtcgaccgcctgcatcgcagcatgagccgtttcgacctgcgcaccgcctga

SEQ ID NO: 344745 - DNA, 537 bp, Pseudomonas aeruginosa
atggccgcgccgatcagtgccgaggaggtggcccaccgggccgcctccgacgccgaactcatcgcctgggtcgacgagcaggaccgcccgctcggcagcctgccgcgcgccgaactgcgcacgcgcgggctgatcggccgcggcaccttcatcctgctgttcaactccgccggcgagctgtgcgtgcagcgccggaccctgagcaaggcggtctatcccggctactgggatctcgccgccggcggcatggtgcaggccggcgaggcctacgcagagtccgccgcgcgcgaactggaggaagaactgggcatccgcgacgtgcccctgcgcgagcacggccgcttcctcttcgacgaaccgggcaaccgcctctggtgcgtggtctattccgcggtttccgacgcacccttgcgcctgcaacccgaggaaatctccgaagcccgtttcatccgccccgaacgggcgctggaagaggcgcgcagcctgccgtactgccccgactccctgcgcgcgttgcgcctgtacctggatgcctga

SEQ ID NO: 344746 - DNA, 171 bp, Pseudomonas aeruginosa
atgagcaaagttccactcggcaccaaggcaaagaccggcgagaaatgcccggaaagcggcgtttggcgctccggcgatacaccgtcgaccaccgcgccgatcgcccgcggcaacaccatgccgccgcacaacggcaaagcggttgtctggagcctgatccagtacgcctga

SEQ ID NO: 344747 - DNA, 573 bp, Pseudomonas aeruginosa
atgcgttatcccgaagaccacaagcagaagacccgccagcgcatcgtcgaggaagccgcccgcctgttccgccaggacggcgtcggcgccaccggcctgcaaccgctgatgaaggccctgggcctgacccatggcggcttctacgcgcacttcaagtccaaggacgacctggtggaaaccgccctgcagcacgccgccgcccagctcaaggaggcgaccgccccgctggccgacagcgagcggccgctggcggcgctgatcgggctgtacctgtcgccgcgccatcgcgacgaccccggtgccggctgtcccttgccgaccctgtcggcggaactcggccagcgcggtacgccgagcccgaccagcgatgcgatagtccgcgatcggctggaactgatcgagtccgccctgccgggagaagacgccggcgagcgcagcgtgctgctgctcgcggcgctggtcggcgcgctgcagttgtcgcgcagcgtacaggacgaggcgctgtcgcaacgcatcctcgcggcgacccgcaggaagctgctggaacaggtggaaagcggcaacggcggatag

SEQ ID NO: 344748 - DNA, 144 bp, Pseudomonas aeruginosa
atgcaacgctatgacgtgatcgtgatcgtgatcgtgatcgtgatcggtgccgggcccggcggctacaacgccgccagccgggccggccaaccgggcctggcggtggcctgcgtggagggccgcgagaccctcggcggcacctga

SEQ ID NO: 344749 - DNA, 135 bp, Pseudomonas aeruginosa
atgttcaacagaagcctgaacgaaacggctttttcggttgacctcgcctggcgagaggtctataaaagccccgcccgcagaaccgggcactttctttccccctacgaagagagccatggacagtattcccagtag

SEQ ID NO: 344750 - DNA, 219 bp, Pseudomonas aeruginosa
atgaacttcgataattcggtttcccccggcgtatccgccttcgtggcgaggatgcgcgtgcgcgccgcccagtcccccggcgccgttcctccagcccatggtcttcccgcgaccctcgcctggcgtgtcagcccggccggcggtcgcctggaatgccgccgcctggagacgcaggtcgacgagacccccgggagcgcccgccgcccgctacgcggctga

SEQ ID NO: 344751 - DNA, 777 bp, Pseudomonas aeruginosa
atgaccttgcacccacggcgcccacgggcgcccctgttcgaaccgctgccggctccgctgcggcgggccctgcgctggcgcctgggcttcctcgccggcgcgctcgccgcggtcctgctgctggccctgttgtccgaagcccgcgccgcgggcggcgcctaccgggtcgacgatggcgagatcaatcccgtcggcgaatgcaacctggacacctggcaccagcgtgagcgccgccacgccaaccgctaccagtcggtgctggcgccggcctgcaccttctccgccctgccgtcgctgcaactcggcgcggcgctggtgggcgagggcgacgccggccagcggcagcgtcgcctgagtcccgaactgaagacgccgctgctggcccgcgaggaactcggcctggcgctggccctggcactgacggcggatgtctacctggatcgccggcacgccttcgagggcgccggcttcagcctgccgttgagctaccagccgaccaccgccctgcgcctgaatgcctcggccggcctcggccatgcctacgccgagggcgcccgccagcaccgctggaactggggcgtcggcctggagtacgcgctcggcgaaccgttgaccctgatcgccgagcgcttcggcgagtcggccggcgacagcggctggcaggccgggccgcgctggcacctgggccagcggctggacctcgacctgctgctcggcgcttacctgcgcggcgagcgcgaacgctggctggtgtcgggggcgaccttgcgtttctga

SEQ ID NO: 344752 - DNA, 210 bp, Pseudomonas aeruginosa
atgaacgctgtgcgcaaaaccctggggatgccgcgtcgcgtcctatgcggcctggcggtgcggttcctggcgaaggccgcgcacctgctgatggtgatcagcgtgcgcgcctacgccagcggccggctgagccagctcgaggtgaagtgcctgctggactgctcgagcgcgctcaatcgcgcctcgctcaggctggcgctgggcgaatga

SEQ ID NO: 344753 - DNA, 411 bp, Pseudomonas aeruginosa
atgcgcctcctgatctgcgcgggacgtcacttcaaggaggccgggcgcctgcgcctggcgctcgagcgctgccacgagctgcagccggtggaactgctcggtcatctgctgcatgccggcagcgggctgctggacgccgccgcgcactggtgccgcgagcgcggagcgcaggcgcgcgcctacgactatccggagcgcagtggcggcgaggaagtcttgcgcggtcacgccgaggcggtcctgggcgacttcgctccggacctggtactggtgtttcccggcggacgcctggccaacgaaatggtgcatgccgcccacgccgccggtatcccgctgatgctcgcctacagtccgctgccggcgcgctgggcggcgaaccagccgtcgcggcgggtcaggcgccagccgtag

SEQ ID NO: 344754 - DNA, 363 bp, Pseudomonas aeruginosa
atgctcctgggacgtttcgtctcggtcggtgcctgtgccaccgccatccattacctggtgctgaccctgctggtcgaaggcttcgccgtcggcgccgccccggctgccagcgcaggtgccgcctgcggagcgctggcggcctacctcgggcaccgctggcggaccttccgccagcgcgccccgctactccgctcgctgccgcgcttcctcctggtcagcctgttctcggtgctcggcagcgccgccctggtgtggctgctcggcgatctcgccggactcgactaccgcctggcgcagctcgccgccaccggcgcgctgctgctggcgacctatcacctccaccgactctggaccttctcatga

SEQ ID NO: 344755 - DNA, 1437 bp, Pseudomonas aeruginosa
gtgagggcgctgcgcggctggccgctggcctggagcctgctcggcctggcgctcgtcatccgcctgctgagcctgggcagctatccgctgatggacaccaccgaggcccgctacggcgaggtggcgcggaagatggccgaactgggcgactggatcaccccctggtacgacgtcggcgtgccgttctggggcaagccgccactggctttctggctcagcgccggcggccaggcgctgttcggcgccaacgaattcgccagccgcctgccgcactggctgctcggcatgctggtgctatggctggtatgggactggctggcgcgcgacgaccggcgcctggcgggcatcgcctgtgtgttgctgggcagctcggcgctgttcttcgtcgcctccggcgcggtgatgaccgacatggccctggccctggcgctggtcctggccatgcgcggtttctggctgggcctgcatggcgcggcggggatccgccgtcgcgagggctggctgatgttcctcggcctcggcctgggactgctggcgaaaggtccgctgacgctgatcctggccggcctgccgatcggcctgtgggctttgctggaatggcgctggcgggccctgtggcaggggctgccgtggattcgcgggagcctgctgatgctgctggtggcgctgccctggtacctcctcgccgagctgaagacgccgggcttcctcgattacttcctgctcggcgagcactggcagcgcttcgtcaccgccggctgggacggcgaccgctacggcaatgcgcacgcctatccctacggcagcgtctggctgttcctgctggccgcggcgtttccctggagcctgtggctgccgctgctgctctggctgggctggcgccagcgcgcggagatcgacgggcaacgcctgtcgcggcgccgctactggctgttctggggactgatgccgtgcctgttcttcactttcgccggcaatgtcctctggacctacgtgctgcccggcctgccggccctggcgctgctcgccgccgacctgctgcgcgcgccgctggcacgcagcgcctggctgcgtcgtggctggctggcctgcctggcgctgacgccgctgctgttcgcgctgttcctcggctccctgctgctgggtgggcgcgccgagcagaagtccaccgccgcgctgctggccagcgataccggctggcgcgagcggccgctggtgttctggccgaagcggccgtattcggcgtcgttctacagcggcggaagggcacaacgggcggcggacgacgaactggccggctggctgcgccgcgacgcgctgctggcgatccgctcgcgctcgttcgccgccttgccggaggacctgcgccagcgcctgcactgccggccgccggtggggcagtaccagctctgccggggcgtggtgccgccaggctga

SEQ ID NO: 344756 - DNA, 297 bp, Pseudomonas aeruginosa
ttgcgccagtggcgccgcgagccggccagccgtacctggcccccgggacaggagccgcgcctggagctggtcgagatcgatcgggtgccgggcgtcgagcgcttcgtcggcatcggccagctggcgccggaactgctcgcctggctgtggacccaccgccgtccgctggacgccgaggctctggcgctggcccgcgcggcctgggacgcctatcgcgccccgtcgccgcagcgctgggtgcggcactgcgtcgacaactgcgcgagctgccggccctgtgcgacggcctgtcgctga

SEQ ID NO: 344757 - DNA, 1926 bp, Pseudomonas aeruginosa
gtgatcgtcggcaccgccgggcatatcgaccacggcaagacctcgctgctgcgcgccctcaccgggatcgagggcgaccgccgtccggccgagcgccagcgcggcatcaccatcgacctcggctatctgtacgccgacctcggcgatggcagccccaccggtttcatcgatgtgcccggccacgagcgcttcgtccacaacatgctggccggcgccagcggcatcgattgcgtgctgctggtggtggccgccgacgacggcctgatgccgcagacccgcgagcatctggcgatcgtcgagctgctcggtatccgccgggcactggtggcgctgaccaagatcgaccgggtcgagccgcagcgggtgcagcaggtgcagatccaggtcgagcacctgctggcctccggaccgctggcgcgctcgccgatctttccgctctccagcagcagcggtgagggcgtggcggcgttgcgcgaagctctgcgcgggcttgccggcgaagtccgcgagcgcggccgcgaagggtatttccggctggcggtggaccgggccttcagcgtcgccggcagcggcatcgtggtcaccggcacggccttctccggacaggtcgcggtgggcgacgaactgctcctcggcaacgccgggcggccggtgcgggtgcgcggcctgcacgcgcagaaccggcccgcgcaacaggcctgggccggccagcgcgtggccctgaacatcgccggcgagcgcctcgcgctggagcaggtccagcgcggcgactggctgctgcaggcagcgctgcacgcgccgaccacgcgggtcgacatcgactttcgcctgctccccgacgaactccgcgacttcacccactggaccccggtgcacctgcacctggggacccaggacgtcaccggtcgcctggccctgctcgagggcgagcaactggagcctggccatcgcgccttcgcccaactggtgctgaacgcgccgatccaggccctgcacggcgatcgcctggtgctgcgcgaccagtcggcgcagcgcaccctcggcggcggacgggtgctcgacagcgccgcgccggcgcgcaaccggcgaaccccggcgcgtctggcgcaactccaggcgctgcgccaggacagcctggaggaggcgctgccgaccctactcggcgccgccgagaacggcctcgatccgcaacgcctggtgcaactgttcaaccgcccgcgcgagcactggcggctgccggaggagatggtcgaggtacagacccgcctcggcccgcggctgttcgccggcgagcgctggttcgccctggtcgagcgactgctcgccggcctgcggcgcttccatgaggaattgccggacgaactcggcccagaccgcgaccgcctgcgccgctatgccctgccgcagctcgagcggccggtgttcatcgccctgctggaggccgccttggccggcggcgacgtgcacagcagcggcccctggctgcacctgcccggccacgaggtacgcctgagcgacagcgaggaacagttgcgcgcgcgcctctggccattgctcgaagccggccgctacgacccgccctgggtccgcgacctggctcgcgagctgggccaggacgaagccgccatgcgccacctgttgcgcaagctggcgcgcctgggccaggtgcagcaggtggtgcgcgacctgttttacccggaggccaccctgcgccagttggccgggatcgccctgcaggtgcgcgacccgtccgggctgatccgtccggcggagttccgcgaccgcctgggtatcggccgcaagcgcagcatccagatcctcgagcatttcgaccgcatcggcctgacccgccgcatcggcaatgaccgccgcctgcgcgagggctcggcgctggccgaacaattgctcggtgggtccacgtcctga

SEQ ID NO: 344758 - DNA, 534 bp, Pseudomonas aeruginosa
atgcgggcggatcgcagcgacgcgccggcacgtctcgggcgcgcttcccggcaaggggtgggcgccggctggctggtattcgcggcgatcggtggcggcatcaccctggcggcgctgctggcggcgggggcgttgttccgggcgggcgccagcccgctggtggccgaggatggcaaccggctggcgctgcgggacgaagacccggccgtgagaaaggactgggacaggatcgtcgaggaggtggcgcggcgcaacaccagcaccctgccgcaggccatcgaggaaagcgccgctcccgccatgcgccagaccgtatacaacgatggcaattaccagccacgcggggccgacaacctgctcagcctgcgccaggcgccgcgacccgccgagcggcggcaacccgcgaccagggtgcgggtgagcgtggtcgagcaggcgctgcctttgaaggatcgcgcctgcggcgctttcaaggaaggcagcctggagagacgcgcctgccgagcccgtatcggactgcaattccgcgagtga

SEQ ID NO: 344759 - DNA, 567 bp, Pseudomonas aeruginosa
atgaccaaaccactcctccaccttcgacgctggctgctgccgctgcccctcctgtgcacggcaacgacagccatcgccgaaagttcgggcgactactggatcgtctacggcaagggcgaacgctacaacaacgagatattcgtcgccgacgccgccggcatcgtgcagaagcccaagggcatccagtcggcgcagatcatgcagatcttcgaagacccgtcgatgccgacgctggcggcctacgaagtccagttcaagtgcaaggagcgcaggatccgcttctacaacgcgcgcgccatgcgccgcatcgacaacgtcatcaacaacgtgaaaaccgtcgaaggctggatcgacccggagaagtacgactattggctgcaacgctcgttcgccttcgtctgcgcccctgccatccgcgccaacaaccagatgctgccactgggcaagatggccaccgcgcgcatggtgcggaccgtccaggcgatgttcgccgaactcaagggcgtccaggccaggaaacagaccatgcgcgacctggacgagatgctcggcaacgcgccgaaatga

SEQ ID NO: 344760 - DNA, 2847 bp, Pseudomonas aeruginosa
atgagggcaatggcttggcgcgcgctagcctttcttgtcgttttccttgccggcaacacgctcagcctggcccaacagacgcccatcaccctgttcgggcgggtagccccgacccttcgcccctggctggacgaagccgataggcagtggctggccgagcggggaccgctgacccttggcgtgtccagccccgactatccgccactggaactgctcagcgccaatcacctgcagggcattaccgcggattatctcgcactgctgttcgaccagcctgtccggatcgcccgctatccttcgcgggaagccgcgctccaggccctgcgccggggtgaagtggacctgctgggcagcagcacgccggtcgaagccagcgccagcaaactggccctgagcgaactctacctgctcgaccaacccgtgctggtcaccaccagcgacgcagcggaatccctggagaaatccgccatccgcctggccatccctcccggctatctcacggaaacgcagattgccgccgcctatcccggcagtcggctgttcctctacgaatccaccaagcgggcactggaggccctggccctcgacgaagtcgacgcggcgctgggagacgtggtttccagcaactacctcatcaataccaattactgggtgaacctcaagatcaagagcttcgcccccatcgaaagccgaggcttcggttttctcctgagacccgacgacgcgcgcctgcgcgcctatctcgacaaggccctgcctgtcgtctccgcacagttcggcgacggcatcctgcgcagctggagcggtggccgaagcatcagcctgagcgacaaccggatagccctgacgcccagggaaaaccgctggctggcggacaaccccaggatcaaggtcgtgctcaatggttcgctgggcgcgctcgggcagttcgaccagaatggcaaggcggtaggcatcggcccggactacctggagctcgtcagccgccgcagcggcctccgcttcgactatgtcgccgcccgcaactacacggaactcgaccaggcgatggccaggggggatgccctgctgtcaccggtgatgtcgcctacgccagcgctatcggacagcatcgagttgttgccgccctacctgcagtcgtcggtcatcgtcctcgccgcgaaaggctcgcccagacccggcggaaacgatcaggtccaccacctttccgaactcgaggggcagcgcgtggcggtggtttccggctacttcctggaaagcgagatacgcacgcatcacccgcgcatcaggctggccgtctatcccaccctcgtcgatgcgctgcgcagcgtcgacgaaggcataaacgacagcttcgtcggcagcgactacgccgcccgcttcgtggtgacccaacgcttcgacaatcgcctgcgggtgacaggcgtactggacgagtacagccgccccgtcagcctggccgtgcaggcgccggaaaaggagctgtacagcatcctggaaaaggcccagctctcggtgaccccggaagaaatctccgagctgatcaggaaatgggagcccaggtatctgagcatcaagggaagcttctggcgtgattaccggcaacttatcctgcaaatcgtgggcgtgtttctgcttctggtagccatttccatcgtctgggggctctacctgacccggcagatccgcaggacccgccaggcggagcagaaggcggaggccgccaaccaggccaagagcatcttcctgtcgaccatgagccatgagctgcgtaccccgctgagcgcggtgatcggcctgcaggaactggccctgcgccaggccgaccagggcgtgctggacaaggaatcgctcgtcgccgcgcagaccgctgcccaggggctgctcctgctgatcggcaatgtcctggacctgagccggatcgaaagcggaaaaatcgactccacgcccaaggccgtggcgctgaaggcgctgatggaagagatagccgggctggtggacggcctggcccgccagaaacagctgacgctgaccaccgagttccatggcgaggtggacacgtgggtcacagtggatccgctgcacctgaagcagatcaccttcaacctgctgagcaacgccatcaagttcaccgagcggggcggcgtgacgatgcgggtaagcggcacgcgccggtcgcagcatctgcatgtgcaactggacgtcatcgacaccggcatcggcgtctcggcggaggacagcgccaagctgttccagcccttcgcccaggtcgaatccgcccaggccgggcaggctcatggcagcgggctcggcctgaacatcacgcggcgcctggtggagcacatgggagggcatatcgcgctgcagagcgaacccggcaagggctcgcatttcagcgtgacgctcgaactgccgctcgccgcgcctccggccaccctgcccgaggtgacggccagtccggacatggatacgcgggagacatcgctgagcatcctcgtcgccgacgaccacccgttcaaccgcatcgtcctggaaggacaactactgcagctgggccatgccgtcacgctttcggaggacgggctcgaagcctgggaacggtggaagacagggcaattcgacctgctcgtcacggatggacacatgccgaagatgaacggcttcgaactggtcgcccggatccgcgcggaagagcaggccgaaggccgcacccgtcgccgcatcatcgccctgacggccagcgccgaggaggccatggcggagcgcttccagcaagcgggcgcggatgaagtcctgttcaagccggttacgctggagacgctggctcttgtcatccgcaaggaatga

SEQ ID NO: 344761 - DNA, 390 bp, Pseudomonas aeruginosa
atgaacgagaaactggattcgaaacagtcgatggataggctgttcgatagccgatccttggagtccataacaggcggtgagccggacgcattgcgacgtctgctggacacgctgctgacgagcagccgggacgaccgcgcacgtttggcgcagttgctcgaacacaaggaccagcaggggctggccgaacttgctcaccgtataaaaggcgctgccagggtggttggcagcagcgtcctggtagaggcttgcacccggctcgaggaggcctgtcgggggcggggcgaaggtcttgccctggtgcccggctatgcggcgactctggacgatggactcgaaacgttcgaagccagcattctggcggagttggccaggcttacaaaagtctga

SEQ ID NO: 344762 - DNA, 612 bp, Pseudomonas aeruginosa
gtgtccatttccatgaaaagtcttctggctgccgcagtagccagcctggttgtcggtaacgccatggctgcagacggcaccatcaacttcaccggcaacatcactgctgcatcctgcaatatcaccggcggcgccggcaccggtgttaccggtgacaaaggcaacaagatcatcgacgtcaacctgggtactgtcagtatcgatgctctgggcggcaccgctggtggcggcatcgcggccggtaccaacatcaacctggatctggactgtggcgctaccggcaccggcctgacccacgtccagctccgcttcgacccgcagtccggctcccagatcgaccccaacaacaaccagttgctgaagctgactggcggctcgacggccaaaggcgtaggcatcggcctgtacaagcaggacggcacccgcatcaacctgtccaactccagcgacgtcttcgaggaagcgctggtcaaggctggtaccgatccgaactacacctatagcgccaagctgaacctgcgcgccggttatgtcatgaccgcctccgatgccaaaggcgtaactgcgggttccgcgaacggcaccctgccgttcaccctgacctaccgttaa

SEQ ID NO: 344763 - DNA, 717 bp, Pseudomonas aeruginosa
atgaaacttgcattgtcttccagattactttgggctggcgccttcatgttgttttccggcatggccagtgcgggcattaccttgggtggcacacgcgtcgttatccaggctcctgccaaggaggcgtccatcctggtgaagaaccaggccgcagaggacatcatgatccagtcctggatggagcctgaatccggcagcgggatacaggatgttccttttgcgatcacgccaccactgagccggttgggcgcgaacaaacagcagaacctgcgcattctcttccagggtcaagggctgccgtcggatcgtgagtccgtgtttcgcctgagcgtccaggaaatcccgcagaaggcaaaaggggaaaacaccctgcagatcgcacttcgtcaacgtatcaaggttttctatcgtccggcaggactgccgactgttgaagacgcgccaaagaacttgaaatggcgcctggttcgtcaggatggaaaagcactcctcgaagtcaccaatgattcgccctttcatatttcctttgtcgccgtgaagttgaaatccggtagcaagtcctatgaagccatggcggacatgattgcaccgaagtcctctcaaaagttggttctaaaggatgctgttccgagtgccgccaccggtttgagcgtcgagtttgaaaacgtcaacgattttggtgcctccgagaaacactcaggtgtcctgacgaactga

SEQ ID NO: 344764 - DNA, 2457 bp, Pseudomonas aeruginosa
atggccctggggcttgcgctgccggccgctgtccaggcggtggagttcaatacggaactcctgaacaataccaatggcagtccggttgaactcaagtatttcgagcaaggaaactcggttgcgccgggctcctataacgtcgacgtctacctgaaccagacgatgatccgtcgccaggacatcaacttcagcgccaatgccgaaaccggcgaggtccgtccggtcattcaggtcggcctgctcagggacctgggcgtcgacgtggcccgcctgatgcgcgacaacctgattccatccaatctcgagaacaatactccgctggacatcgcagcgctcattcccggcgcgtcggtcgatttcgaggtcaaccagctggccctgctggtcagcattccgcagatgtatgtccagcggcatgtccggggctatgtggatccttccctgtgggacgatggggtcacggcactgttcaccaactaccaggccaacttcagccgcaataccagccatggcgacagcagcgactatcgatacctgggtttgcgcaatggcttcaacctgttcggctggcgcctgcgcaacgactcctccctggtcggcggcaccggcatgcgcaacaagttcagcagcaaccgcacctatgtagagcgcgatatacgtccactcaagggcactctttctctcggcgagctgtataccaactcggaaatcttcgacagcgtgcgtatgcgaggggtgaggttgcaatccgatatcggcatgcaacccgacaacgaggtcggctacgcgcccgtggtacgtggaatcgctgaaaccaacgccactgtcgagatacgccaggacggctacgtgatctattccaccagcgtatcgccgggggctttcgagatcaccgacatctatcccagcggttccaacggtgacctggaggtgaagatcatcgaggaggatgggcgcgagcgaaccttcaagcagtcgtattcctacctgcccgtgatgacgcgtaaggggaacctgcgctacagcgtatcggctggtgagtaccggaacgacgggcaaccctcgcccaagctggtgcagggcaccaccgtctacggcatgtccgacaacgtcaccgggtacggcggcctgctggtggccgacaactacaatgccaccaaccttggcctgggcttgaacaccccttatggcgggctctcgatggacatcacccacagccagtcgaaggcccggcgcagcggcaggaaccaggggcagagcttgcgcttcctctattccaagaccatcaactccaccgacaccaacttcaccatggtgggctaccgctactccaccgagggctaccgcacgctcagccagcatgtggaggatctgtcgagcgaggacttcctgaatggtgtcagctatggccggcagaagagccgcctggacctgacggtgaaccagacgctgttccgcaccagttcgatctatcttagcgccggcgagacgacgtactggaaccgccagggtagtacccgccgctggcagttcggctacagcagcagctacaggagcgccacctacagcctggcggtatcgcgtacccaggacaccgggccggtgggccaggccgatacccagttcaccgcctctgtcagcattccattgggtagttcgagtcgttctcaccgtgcctacgccagtgccgtatcgtcccggcatggggattccagcctgcaaagtggcgtttccggttacctggacgatcagaattccgtcaactactccgtccaggcgggacatagcaagtacaacggcgacagcggtagcgtggggcttggctgggataccgcgaaggcttcgttgagcgccaactacagtcaggggcgcgacaacaagcacatcgacatgggcgccagcggttccgtcgtggtgcacggtggcggcgtgaccttcggccagtcggtgggagaaaccttcgcgctggtcgaggtgccggatgtctccggtgtcggtatcgaaggctaccggggcgtgcgtaccgatggcagtggctatgcggtagtgccctacgcgcagccataccgatacaactatgtgaacctggatgccaccacgctcggttccgataccgaggtttccgacaactccaagatggtcgttcccactcgcggggcggtggtccgcagcagcttcgccgcggaatccggccgccgcgtgcagttcgaactgaccatgggctctggcgagaagatcccgttcggtgcccaggcctacgacgcggaggagaaggtggtcggcatggtggacaacctttctcgtctgctggtgttcggcatccaggatcagggacgtctttccatccgttggagcagcggctcttgcatggctgactaccagttgccgccgaagaacaaggaacttgcctatgaacgcgtgcagctctcttgtgtctcgcccaccaacggaatatga

SEQ ID NO: 344765 - DNA, 834 bp, Pseudomonas aeruginosa
gtgatctatgatgccgcgggtatgggagacaactacttcgcggtcgtgatgtgtggagttagtgagctcatcgggaacatggtgtacgaaggcgtggggaggtacaacgccaagttcaatgcctatgaaacgtcggtgtcaggggtcggctatcgaataacggatttcgaaaaagatgggtggtggccgagaaacataaactatcagggaattggaaagattcttttaggggcgaacgactatagagtgcagctggtgaaaaccggacccattaccgccgccggggtactgtcaggtgagatcggtactatcagggtcctggatcatggcggtctggtagccgcacgagtcagtttcaatggcggcctgccgattcgcccgaccgttcccacctgcaccatccagaaaaagaggctcgacataggcctgggtgaggtcagcctggtccagctggagcggagtggcggatcggattacaagcccttctccatcgacctgcaatgctcgggaggctcgacaggcgcctctacccggatgttcatcaccctgaccgactccacgaacccgggtaatcgcggcaaccggttgactctgtcctccaagggctccaccgcggccaagggcgtcgccgtggaaattcgccgggcggacgactccatggtcagcttcggcccggactccaagatcaccggcaaccccaaccaatggttcgtcggccagttcggcaacaccagtacctcgattccgttgagggcgcgctatgtgacgacgtcctctccgctggcagcgggccaggccaatgccgccgcgaccttcacgatgagctaccagtaa

SEQ ID NO: 344766 - DNA, 519 bp, Pseudomonas aeruginosa
atgtactaccgctatacgaaaatgcagtcgccggtcggtaccctgacgctggtagccaggggcccggcgctggtcgccgtgctctggccgcacgaacgtccgaatcgcgttccgctggacgagatggaggcggcggacgccaaccccgtgctcatcgagaccgaacgccaattgcgcgaatacttcgccggccagcgcacatgcttcgacctgcccatcgacttccagggcaccgattttcagaagaaggtctgggccgcgctgcttaccattcccttcggcgagacccgcagctattcggaaatcgccacgcagatcggcagccccagggccgtacgggcggtcggggcggccaatggcaggaacccgatctccatcatcgccccctgccatcgggtcatcggcgcatcgggggggctgaccggcttcgccggaggactggaggccaagcagaggctcctgcaactggaacgccaggtatgcaggccggacctgctggatggactcggcggtggctga

SEQ ID NO: 344767 - DNA, 1380 bp, Pseudomonas aeruginosa
atgaccgactacgccaagctcttcgaacaggaccgggcgcacttaatgcacccctccacccacgcccacgaccacgccagcggcaccctgcccggccgcataatcaccggcgcctcgggcgtgcgtatccgcgaccagcagggccgcgaactgctggatgccttcgccggactgtactgcgtgaacatcggctatggccgcctcgaagtggctgacgccatccatgagcaggccaaacgactggcctactaccacacttatgtcggtcactcttccgaggcgatcatcgagctgtccgcacggatcatccgcgactgggcgccggcaggcatgaagaaggtctactacggcctctccggctccgacgccaacgaaacccaggtcaagctggtgcgctactacaacaacgtgctgggccgtccgcagaagaagaagatcatctcgcgccagcgcggctaccacggctcgggcatcgtcaccggcagcctcaccggcctggccagcttccaccagcacttcgacctgccggtggaaggcgtgaagcacaccctctgcccgcacttctacaaggccccggcgggcatggacgaggcggccttcgtgcgccactgcgcccaggaactggagaagctgatcctcgccgaaggcccggacaccgtggcggccttcatcggcgaaccggtgatgggcaccggcggcatcatcgttccgcccgaggggtactgggaagcgatccaggcggtactggcgaagtacgacgtgctgctgatcgccgacgaggtggtctgcgccttcggccgcctcggcgacaagatgggcagccagcgccatggcctgcgcccggacctgatcaccaccgccaagggcctgaccagtgcctacgcgccgttgtcggcggtgctcgtcggcgagaaggtctgggatgcgatcgacagcgcctccgcccgcgaaggcgccatgggccacggctggacctattccggtcacccgatctgcgcggcagcggcgctggctaacctggatatcctcgaacgcgaaaacatcaccgccaacgccgcggacgtcggcggctacctcaaccgacggctgcgccagaccttcgaaggccacccgctggtgggagaagtgcgcggcgacggcatgctggcggcactggagttcatggccgaacacgagacgcgcacgcccttcgacccggcgcagaagataggcccgagagtctcggcggcgtgccttgaacgcggcatgatcgcccgcgccatgccccacggcgacatcctcggcttcgccccgccgctggtgctgagccgcgccgaggccgacgaggtagtggagatcgccaaagccgcggtggacgccgtggcggcggaggtgctctga

SEQ ID NO: 344768 - DNA, 1458 bp, Pseudomonas aeruginosa
atgtcctacgcccaccccctcctcttcaagtcgctgtgctacgtcaacggccagtggctgcatagcgccagcggcgccagcgtcgccgtggaaaacccggccagccgcgaggtcatcggccacgtaccgctgctcgaacgcgagcagatagtcgccgcggtggatgccgccgccgcggccttcccggcctggcgcaagctgtccctggaccagcgcgccgcgcccctgctgcgctgggccgaactgatccgccggcaccgcgaggacctggcgcagatgctctcccaggaacagggcaagcccctggccgagtcccgtggcgagatcgactacgccgccagcttcatcccctggttcgccgaacaggcccggcgcctggatggccgcaacatccccagccacattcccggcgcccacctgggcaccgtgatggagccggtgggcgtggcggcattgctgaccccctggaacttccccgcggcgatgatcacccgcaaggccgccgccgccctggccgctggttgcacggtggtggtcaagccagcccacgagacaccctactcggccttcgccctggcccagttggccgaggaagccgggctcccggccggcgtcttcaacgtagtgctgggcgaaccgcagatgagcatggaaaccctggtacaggacagccgcgtgcgcgcggtgagcttcaccggctcgacccgcgtcggcaagctggtgctgcaggccgccgcccaggatgtgaaaaaagtggcgctggaactgggcggcaacgcgcccttcatcgtgctgcccgacgccgacctggagcaggcggtgaaattcgccatcaacgccaagttccagacctccggccaggactgctgcgcggccaaccgcattctggtcgcccgcgaaagctacgagcccttcctcaagcgcttcgccgccgcggtgcgcgagctgcgcgtgggcccggccagcgacccgcgcagcgacatcggcccgctgatgcaccaggctgccttcgctgccacctgcgagcgcgtgcgcgacgccatcgaccgcggtgcgcggctgctggcgggcggcgaaccccatgccctgggcggctggttccaccagcccacgctgctcgccgacgtcaccccggccatgcgcatctggcgcgaggagaacttcgcgcccatcgccggagtgaccgcctacgacgacctggagcaagccgtcgaactggccaacgccagcgagtacgggctggccgcctacatttgcggacagcgcctcgatcaggtctggccgctgatgcggcgcctggagttcgccatggtcgcggtgaacggcgcccgcttcaccggccaccccattcccttcggcggcatgaaggcctccggcctgggccgcgagggtagcagcgaaggcttcgagcccttcatcgagaccaaatacttctgcctgcatcacggcgccatctga

SEQ ID NO: 344769 - DNA, 483 bp, Pseudomonas aeruginosa
atgaccaagctcgaccgctacgacctgaagatcctgcgcatcctcgccggcgacggacgcatcaccaagtccagcctggccgaagccatcaacctctcggtcagcccggcctgggagcgggtgcgcaagctggaggaagccggcctgatcaagggctaccgcgcgcagatcgactggccggcgctgttccgccagcagcaggtgctggtggaagtcaccctgggccgccacacggcccaggacatgcggcgtttcgaacagcgtctgcagcaggcgccggaagtgggcttctgctacgccaccggcggcggggtggactacatcgcgatgatccaggctcgggatatcgatcattaccagcgttttatcgaccagttgctactggaagacctgggaatcgagcgctatttcacctacatcgtcaccaaggtgatcaagccgctggatgcggccgtaccggcagaggcgctggcgggaacctga

SEQ ID NO: 344770 - DNA, 1002 bp, Pseudomonas aeruginosa
atgaaccagttgcccgacaaccccatcgccgccagcgtcaacttcgagcacgacggcgtgcagcacggccatctcaagctgccctactcccgcgacgactcggcctggggcgcggtgatgatccccgtctgcgtggtaaagaacggcgcaggccccaccgcactgctcaccggcggcaaccatggcgacgagtacgaagggccggtggcgctcagtcgcctggcccaggaactgcgcgccgaggacatccgcggccgggtgatagtcgtacccttcatgaacgccccggccttcctcgccggcaagcgcacctcgccgatcgacgccggcaacctcaaccgcagcttccccggccgcccggacggcacggtgacgcagaagatcgccgactacttccagcgcaccctgctgccgctggccgatgtggtgctggatatccattccggcggccgtaccctcgacttcctgcccttcgccgcatgccacgtcctgccggacaaggcccagcaggaaggctgcgaggcgctgatgcgggcgttctccgccccctacgccatgcgcatgctggagctggacgcggtgggcatgtacgacagcgccgccgaggcgcagggcaagctgttcgtcaccaccgaactgggcggcggcggcagcagcagcgcgcgcagcgtcgccatcgcacgccgcggcgtgcgcaacgtgctggtgcaggccggcatcctgcacggcgcaatcgagcaggcgccttcgcggatgctcgacatgcccgacgcagactgcttcgtcgccagcgaacacagcggcctgctggagatgtgccgcgacctcggcgagcgagtggcgcgcggcgaggtgctggcgcgggtgcacgacgtgctgcgcacaggcgccgcaccggtggagtaccgggccaagcgtggcggcatcctcgccgcgcggcacttccccggtctggtgcagagcggcgacaccctggcggtggtcgccgaagtgctggactga

SEQ ID NO: 344771 - DNA, 1191 bp, Pseudomonas aeruginosa
atgcccgaaatcgtcgtcgatctccccttcgcgcgggaggaatacgcccagcgcctggccaaggttcgcgccagcatgcagcagcgcggcatcgagctgctgctggtcagcgatccgtcgaacatggcctggctgaccggctacgatggctggtccttctacgtgcaccagtgcgtgctgctggcgctggacggcgagcctgtctggttcggccgcggccaggacgccaacggcgcgcggcgcaccgtgttcatgcaggccgacgctatcgtcggctacccggaccactacgtgcagtccgtcgatcgccatcccatggactacctggcccgcgaagtcatcgccgcgcgcggctgggaaacgctggccatcggcgtggaaatggataactactatttcagcgccgccgccttccgctcgctgcagagcaacctgccgcaggcgcgcttcgtcgacgccaccgcgctggtcaactggcagcgcgcgctgaagtctccgcgcgagatcgaatacatgcgcgtcgccgcgcgcatcgtcgagaagatgcatgcgcacatcctcgaacgcatcgaaccgggcatgcgcaagaaccagttggtggcggagatctacagcgccggcatcctcggcgtcgacggccacggcggcgactacccggcgatcgtcccgctactgcccaccggcgccgacgccagcgcgccgcacctgacctgggacgacacgcccttccagcgcggcgccggcaccttcttcgagatcgccggctgctacaagcgctaccactgcccgctgtcgcgcacgatctacctgggcaagccgccgcagcacttcctcgatgcggaaaaggccgtggtcgaaggcatcgccgccggcctggaagcggccaggccgggcaataccaccggcgacatcgcccgtgcgttcttccgcgtgctgcagaggttcggcatccacaaggacagccgctgcggctaccccatcggcatcagctacccgccggactggggcgaacgcaccatgagcctgcgtcccggcgacgagagcgtgctgcaagcgggcatgaccttccacttcatgcccggcctgtggatggacgattggggcctggaaatcaccgaaagcctgctgatcgtcgacagcggcgcacagaccttctgcgactacccgcgccagttgttcgtcaaggagtga

SEQ ID NO: 344772 - DNA, 993 bp, Pseudomonas aeruginosa
atggctgatgtcaccctgctcagcgaagccgacctgcgcgcctgcgtggcgctggaccgcgaaagcctcgacgccgtcgagcaagccttccgcctgctggcaacggcggcggtggcgatgccgccgatcctgcgcctggacattcccgagcgcaacggcgaagtcgacgtgaagaccgcctacctgccgggcctgccgcgcttcgccatcaaggtcagtccgggcttcttcgacaatccccggctcggcctgcccagcctcaacggcatgatgatgctgctgtcggcgcacaccggcctgctcgacgccctgctgctggacaacggctacctcaccgcggtgcgcaccgcctgcgccggcgccgtagccgccaagtggctggcccgggaagacgcccgccgggtagccctcctcggcgccggcgagcaggcgcgcctgcagctcaaggcgctatgcctggtgcgcccgatcgaaggcgccagcctctgggcccgcgacgcggtcaaggcgcgccagtgcgccgccgagctgagcaccgccctgggcatcccggtggtcgcctgctccagcgtcgacgaagccctggaaggcgcggacatcgccatctccagcacgcccagtcgcgagccgctgctcgaacggcgccacctgcgtccaggcttgcacatcaccgccatgggctcggacgccgagcacaagaacgagatcgccgccgacgcgctggcggcactggactgctacgtcgccgaccgcctgagccagacccgcgtgctcggcgagctgcaccacgccatcgcggccggcctggtagcggcggacgccgacttcgccgaactcggccaggtcatcgccggcctccgcccgggccgccgcagcgcccgggacatcaccctctgcgatctcaccggcaccggcgcgcaggacaccgccatcgccggcctggccttccagcgcgcgcagcgcatgggcaaggggttccgcttcagcagttga

SEQ ID NO: 344773 - DNA, 978 bp, Pseudomonas aeruginosa
atggccaacgagatccccctgatcgagctgtaccgcgcgcgccagcgcatccacgggatggtccggcagacgccgctggagcattcgccgagcctctccgcacgattgggcgcgccggtgtacctgaagctggagtcgcagcaggccaccggcagcttcaagttgcgcggcgccagcaacgccatcgcccaactggacgacacgcagaaggcgcgcggggtggtcgccgcctccaccggcaaccacggccgcgccctcgcccatgccgcccgcgcgctgggcgtaccggcggtcatctgcctgtcgtgcctggtgccggcgaacaaggtcgaggcgatccgcgccctcggcgccgaggtgcgtatcgtcggccacagccaggacgacgcgcaggccgaagccgagcgcattgcccacgagcggggcgcggcgctgctgccgcccttcgatcacccgcagatcatcgccggccagggcaccctgggcctggaaatcctcgaacaactgccgcaggtacgccaggtgctggtcccgctctccggcggcggcctgttcggcggcctggccctggcgctgaaagcagccgatccgtcgatccgcctgcacggcatcagcatgcgtcgcggcgcggccatggccgccagcctggaagccggccgaccggtggaggtggaggagcggccaagtctcgccgactccctcggcggcggcatcggcctggacaaccgctacaccttcgacctcgcccgcgcccactgcgacgaattgcacctgctcgacgaagccgcgatcgccgccggcatccgccacgcctaccgcgaggagcgtcaggtgctcgaaggcgcggcggcggtgggcattgccgccttgctggaagggaggatcgccgccgaagggccggtggtggtggtcgtcagcggccgcaacatcgccatcgatcaacatcaacgcatcatcgaggaagccccccatggctga

SEQ ID NO: 344774 - DNA, 1404 bp, Pseudomonas aeruginosa
atgcccatcatgcaaagctggcgccacgcgctggccggcctgcgggtcggcgaatccaagtacaagacgctggtccaggccatcgccacggaaatcgagcagggccgcctgcaggacggccagcgcctgcctgcgcagcgccaggtggccgacggcctgggcatcagcgtgcagacggtgaccaacgcctacaaggagctggaacgccaaggcctggtgcgctgcgaggtgggtcgcggcagcttcgtctcgcgccgcatgaccgagggcatggcgcgctacatgctcgaccacccggaacgcgcgctggtggacttctccatcgccagcatcgtccacaccgacgagcacgaccgcctgtggcgggacacctgccgcgaactggcacaggagacggaccagccgtggatgcgcgcctgccggccgatcgccggcttcgacagccaccgcgaggcggcggcgcagtggctggcgcaacagggcctgcactgcgagcgcgacgacctgctgatcaccaatggcgccgcccacgccatcttcctcgccctcgcctcgctggccgggccggacgacgtggtgctctgcgagcagttgaccgaccacggagtgatcggcaattcccaggtgctcggcttcactctcaagggcgtggaggtcgaccgcgaggggatcgatccggagcacttcgaagacctctgcgccaacgagcgcatcaccgcactggtgtgcacgcccaacctgaacaaccccacctccagcctgatgagcgatgcgcggcgccgggagatagccgccatcgcccagcgcttcggcgtctacgtcgtcgaggacgacgtctatggcccgctgctgggcgagcgccgcgcaccgccgctgagccactatctgccggagctgtcgttctactgcaccagtttcaccaagagcgtgctcaccggcctgcgcatcggctatctggcggtgccacgacgcctggccctgcgcaccgagagcatcctgcgggtgaacagctggatggccgcgccgctgctggccgaggtggccacgcgctggattcacaacggcaacgcccaggccctcgcggaacgccagcgacgcctgttggcggcgcgtcaggcgctggtcggcgagcgcttcgccgactacctgctgggccatgcgccgcagtccctgaactgctggatggggattcccgagcactgggaactggacagcctggtgcgcgaactgcggcaccggcacatcgccgtgaccttgccggatcccttcatggtccgcggcacgccccggccgcgcgcggtgcgcctgtgcatgggcgccgaatgcagcgacgaacgcatggcccaggccctggacgacatgcgcgagctgttcgagcagtatccgaagatccacgacttctga

SEQ ID NO: 344775 - DNA, 855 bp, Pseudomonas aeruginosa
atgagtaccgccccccgttccctccatcgcctggccctggccggcagcctgctggcgggccttgcggccagcttcgccagccaggccgagagcaccctcgaacgcatccagaacagcgccacggtgcgcatcggttatgccaacgaggcccccttcgcctacaccgagacctccggcaaggtcaccggcgagtcgccggagatcgccgccaaggtgttcagcgccatgggcgtgaagaagatagagccggtgctcaccgaatggggcgcgctgatccccggattgcgcgccgggcgtttcgacgtgatcgcagccggcacgtacatcaccccgccgcgttgccggcaggtgatcttcaccgatccgcactaccagatccccgacaccctgctggtgaagcggggcaacccgaagaacctgcacagctacgccgacgtggcgaagaacccggacgtgcgcctggcgatcatgtccggcaccgtcgagctgggctacgcccgcgccgagggagtgagcgaggagcagatcgtccaggtgccggacaccaccgcgcagctccaggcggtgcgtgccggtcgcgccgacgccagcgtcggcaccgcgctgaccatgaagggtctggcgagcaaggggggcgacagcgtcgaggccatcgccgacttcaaggacgacccggcgcacatcggctatggtgccctggccttccgcccggaagaccaggacctgcgcgatgcggtgaaccggcagctgaagaagtggctgggcagcgacgatcacctgcggacggtcgagccgttcggcttcgacaagtccaatctgaccgacaagagcgccgccgagctctgcaagcaatga

SEQ ID NO: 344776 - DNA, 660 bp, Pseudomonas aeruginosa
atgggtgaattgcttccactgctgatggagggcgcctgggtcaccgtccaggtcaccttcttcggttctctgctggcggtggcgatggccatcatcgccgccctcggccgcctggcgccgtggccggcggtacgctggctggccatcggctacatcgagctgttccgcggcacctcgctgctggtgcaactgttctggctgttcttcgtactgccgttgccgccgttcaaccttgatctgggcgcctacacggtggccattctcgggctgggcctgcacatcggcgcctacggcgcggaagtgatgcgcggggccatcggctcggtgcccaggggccagtacgaggctgcgctggcgctgaacatgacgccgttcacgcgcttccgccggatcgtcctgccgcaggcgctgctgtgcgccataccgccgggcaccaacctgctgatcgagctgctgaagaacacctcgctggtgtcgctgatcactctttcggacctggccttccgcgcccgtcaactggaccaggcgaccttcgagacgctgaagatcttcagcctgacccttgtgctctacttcgccatggcccaggtcatcgtcttcctcatgcgccgcctggaacgccggctggggcatgggcgcatccggggaggcttgcgatga

SEQ ID NO: 344777 - DNA, 657 bp, Pseudomonas aeruginosa
atgaaattcttcgactggcagttcgcctggcagatcctgccgcagctgctgcacgcttcgctcaagaccgtcggcatcaccctggtcggcttcaccctggcgatggtcttcggcctgctcttcgccatggctcggcgcagccggcacttctggttgtcgtggccggtggcctggctgatcgagttcatccgcagcacgccgttgctgatccaggtgtatttcctgttctacgtgctgcccagctacgggctgagcatgacctcgctggtggctggcaccctgggcatcgccctgcactacgcctgctacaccgccgaggtctaccgtgccggcctggattctgtgccgcgcggacagtgggaagcggtcacggcgctgaacttctcgccgtggcgcgcctaccgccaggtgatcctgccccaggccatccgccctgtgctgccggccctgggcaactacctgatcgccatgttcaaggacactccggtgctctcggctatcaccgtggtggaaatcatgcagcaggccaagaacgttggctccgacagctttcgctatctggagccgatcaccctggtcggggtgttcttcctgctcatcagcatcggcctggccggcgtcgtccgccaggtggaaaaacgcacggcgctgccatga

SEQ ID NO: 344778 - DNA, 834 bp, Pseudomonas aeruginosa
atgaccgtcctgtccatgaccgcccggccgctggccagcgaggccccgcaggcgcagaccgcgcagccgatggtgcgctttcgcgacgtatgcaagagctacggcagcttcagcgtgctgaaccgcctgaacctggaggtaggcgccaacgagaaggtcgccatcatcggcccgagcggctcgggcaagtcgaccctgctgcgggccttgatgaccctggagagcatcgacagcggggtgatcgaggtggatggcgagccgcttacccaccagttgcgcaacggcgaaccggtgcgcgcttccgaagcccacgtgcgccgcgtgcgcggcaagatcggcatggtgttccagagcttcaacctgttcccgcacatgagcgcgctgaagaatgtgatggaggcgccggtccaggtgctgggaatgcgccgcagcgaggctcgcgagcgtgccgaggagctgctggcgatggtcggcctgggcgacaagctggagcactatcccacgcaactctccggtggccagcagcaacgcgtggccatcgcccgggccctggccatgcgaccgaaggtgatgctgttcgacgaggtgacctcggcgctggacccggaactgtgcggcgaggtgctcaacgtggtgcgccggctcggcgccgagcacaacctgaccatgctgatggtcacccaccagatgggcttcgcccgcgagttcgccgaccgtgtgtgctttttccaccagggcggcatcctcgaacaggggacgccggagcagctgttcgggcagccgcagcatgagcggacgcgctgcttcttgagcgcggtgaacgaagcgagttga

SEQ ID NO: 344779 - DNA, 1068 bp, Pseudomonas aeruginosa
atgagcgagcaagacgattgggaccgcgagcgcgaggagcgcttgcggatgatccgtgacagcgccgcctccctggtgccgcgcgacggcgacctgacgcgggtgcgccgcggccgtttcagcgggaccgcggtggaccgccaggcctggcgcgaggtctgtgccatggggtggccggggctgcgtctggaccaggcgctgggcggcagcggcctgggcatggccgagtgggtggcgttgctggagaccctggggcgcggcctgctgcccgagccgctgatcgaggtcgggctggtggcgccgctgctgccggaggagcaacgcgccgcgttgctggccggggagcgcctgatcctgcccgccggcatcggctaccgcgaggaacggcagcgcccgtgcctggatggcggacggctgcgcggcggcgtcgcccgcgtttgcctgggaggcgccgccgatgcctggctggtggcttgtgcgcagggcctggcgctggtcgagcgcgatgccgccggggttgagctggtttgcgagccgacccaggatggcgcccaccgggcgcgcctgcgtttccacgacacgccggcgcgcccgctgcccgtcgacgggcccgtcgagcaggcgctggatgaggcggcgctggcttgcgccgcctacctggtcgggctgatggacggcgccttcgagcggaccctggaatatctcagggtgcgccgccagttcgggcgcgagatcggcagcttccaggcgctgcagcaccgcatggtcgacctgaagatccagatcgagctgtcgcgcgcgatggttgggcaggccgccgccgcgatcgatgccggggcgtccgccaacgagcgccggcggcaggtctccagtgcgcgggtacgcggctcggaggcggcattgctggtgacccgccaggccatccagttgcacggcggcatcggctacaccgacgaggccgacatcggcctgttcctgcgccgcgccatggtgctgctcaatgcccatggttcgctggatttccaccgggcgcgctacgtcgagtcgctacagcgggaggtggcctga

SEQ ID NO: 344780 - DNA, 282 bp, Pseudomonas aeruginosa
atgggtttcttcgaacggttgctgcagggcggtcgccatcatgggtacggcggaggcggccaccacggttccggtcatcggcgcggcgcggacggccagccgtcggcgccggccgccgcgccggctgtcgcctgcccgtcttgccgtgccgccaatgcggcgacggcgcgtttctgccagggctgcggtggctccctggcgccgctgcgctgcggcgcttgccaggcggaagtcgccgcggctgcgaagttctgcggcgcctgtggcgcgccgcagcggtag

SEQ ID NO: 344781 - DNA, 510 bp, Pseudomonas aeruginosa
atgcaccccttcgccgaccagccacgcccgaccatggacaagaaacagctgctgcacctgatcatgcaagccctcgccgcggatctcgacgccgccgtgcgcgccgcccagaccgcccacgagagcgcgacccacgaagagaacgtcgccgagaacaagtacgacaccctcggcctggaggccgcctacctggccgccgggcagtcgcgccgggtcgaggagatccgccaggcgctgaacctgtaccgcaacctggcgctgcgcgatttcgacgaggagcaggggatccagctcagcgcgctggtcaccctgctgaacaccgacggcagtcgccgcgtggtgttcctcggccccgcggcagccggcctgaaggtcgactgcgagggccgcgaagtgctggtcatcaccccgcgctcgccactggggcagagcctgctcggcaagcaaccgggcgacacggccgggccgaaggatccccgccaggcggtggaaatcctcgccgccgactga

SEQ ID NO: 344782 - DNA, 1287 bp, Pseudomonas aeruginosa
atgggtggtttgcagcaacggtgtctatgggaagtggtcacgccaggcttgcccggggcggcgagcctggacggcgagcagcgggcggatgtctgcgtgatcggtgccggcttcaccgggctgtcggcggcgctgcacctgctggaggccgggcgttcggtgtgcgtgctggaagcgcacgagatcggtcacgggggatccgggcgcaacgtcgggctgatcaacgccggcacctggattgctccggacgaggtggtctccagactcggcgccgagcatggggaaaagctcaacggcgtgctgggccgggcgccggcgctggtgatggaaacgatcgagcgcctcggcatcgactgccagctgcggcgcgagggcaccctgcacatggcgcacaacgccagtggcgtggccgagctgcggcgccgccacgcgcagtggacgcgacgcggcgcgccgctggaactgttgggcggagcggcctgccacgaggcctgcggcacccgccggatcagcgccgcgctgctcgaccggcgtgccggaacattgaaccccatggcctatgtacgggggctggcggcggccatcctgcgcctgggcgggcgtcttcacgagcgctcgccggtgtgccggctggagcgtcacggctcgtgctgggcggtacgcagcgcggcgggtgtggtgctggcggaacaggtggtaatcgcctcgaatgcctataccgaaggcgagtggaccgacctgcgccggcacttcttccccggctactactaccaggtcgcttcggcgccgctgcggggagccgcggccgaccgcatcctgccgcatggccagggggcctgggatactcggacggtgctcagcagcatccgtcgcgacgcccagggacgtctgctgttgggcagcctcggcaacggttcgagcaagccgacctggttcctccgccagtgggccgaacgtatccggcggcactactttcccgagctcggccgggtcgactgggagtacacctggaccggccgcatcgccttcacgcccgaccacctgatgcgcctgttcgagcctgcgccgggcctgctcgcggtgaccggctacaacggccggggggtgaccaccggcacggtcgttggcaaggcgttcgccgagtatctgctgggcggcgagcgcgatgccttgccgttgccgttcagcgcgtcgaaaccggtatcggccgcccggctgcgcggttgcgcctacgaggcgggcttttccctgtaccacgccgggcagtgcctgcgggtcgtgctctag

SEQ ID NO: 344783 - DNA, 552 bp, Pseudomonas aeruginosa
atgcctatcgagttgaagcattgcttcgtcttcacgggcgcccccggcacgggcaagaccagcctgctcgaagccctgcggcggcacggccaacgctgcgtgggcgaggccggccgggcgatcatccgccagcaactggcgaaccggggcgacgccctgccctgggcgaacgccgaagcgttcaagacactcatgctggaacaggccctggcgacgtggcaggcacatcgcgaaaccgccggcccggtattcttcgaccgcggtatcgtcgacgtcctgggttacgcccgcctgagccgactcgacgaaccgcccgcgctgcgcgaagcggcgaacgacctgcgctacaaccgccgggtgttcatcgccccggcctgggaggcgatctatcgcaacgataccgagcgccgccaggatttcgccgaagccctgcgcactgaacgggcgatgcgcgaagtctatgcggagtcgggctatcggttgctggaactgcccagagccggcatcgccgagcgcctggcgttcgtcctcgcccacctcgggacggactga

SEQ ID NO: 344784 - DNA, 555 bp, Pseudomonas aeruginosa
atgagccgctttgaaatcgccttttccggtcaactggtcgcgggcgccaggcccgaagtggtcaaggccaacctggccaagctgttccaggccgacgcgcagcgtatcgagctgctgttttccggacgccgggtggtgatcaagaacaatctcgacgcggcatccgcggagaagtaccgcagcgtgctggagcgcgcgggagcgatcgctctggtcagcgagatggaggtcgaggaggtggtcatggcgccaccaccggcaccgcagccctcggcagcgacaccgccgtccgtggcggctgcgccggcacccgccgggcgcctgcaggtcgcgccgcgggacggctacatggcggccttcgccgaggttgacgcgccggacttcggcctggctccgctaggtgccgacctgcaggacgccaaggccgggatcgaggcgccgaagctcgatctcgctggtctcagcatcgccccggtcggcagcgacatgggccaggcgcgcgccgaggcgccgccgccggcgccggataccagtcacctgcgcctgcaggactga

SEQ ID NO: 344785 - DNA, 318 bp, Pseudomonas aeruginosa
atgcgctcgctcgccagctacatccgcgccatccatgccctgccctcacccgtttcgatcagcgacgaacagcgcgaggaacggcggtaccgcgagggcggcagcgaaatccacagccgcgaggccatctatcgcttcgacaacggcgtgcgtctgcgccagcattgcgaacgcgacctgttgccgcgcgagcaggcctgcgaggaatgctggatcggctacgaggtgctggatgccgcgggacaggacatccgcccttgccacaagcatttcagcaacgcctgccaggagcgtttctggttgcgcatgcacgcctga

SEQ ID NO: 344786 - DNA, 816 bp, Pseudomonas aeruginosa
atgcgtaagcgactgttcggcttgttgctgatcgctccgctgtgctgggccgaggccgccatggcggccgataacccggcgccggcggtacgccagcagggcatcggcggcaccgtgcgggtccagcccaactcggtgatgcgcctgcccaagcgggcccaggagctgcgcctgcaacgggtggagatcggcgaggatggcgccctgctgattcctctgcaggtcagcgtgctgcgcatcgaggaactgcgcatggcgcgcaatgcccgcatcggcgtggccccgggcgaggggcgcatcagcatcgaggtgatcagcgggcacctggccgacggcagcatcatcgccgccccgggcgccaccggcacctttcgccagcgtgccggcaacggtcgcgacctgaccctgcggttgcaggcggtggaagtggagaacctgctgctggacgcccgcggtggcgtcggcgcgccgggctatgacggcctggacggcgcctctggcaaggcctcgggatgcttctggggcagcgcgcagaaaggtggcgacggccagtccggcagcgacggtggaccgggtggggctggcggtcggattcgcctggaggtgccgggcgacttccccgtggagcgcctccagacccgcctggagggcggcgtcggtggcgctggcggcaaggctggcaagccgggtgcggccgatcccgacaacggttgctggatctattcggtggacgccggccgggccggccgcggcgggcaggatggcgcgaatggcgccgacggcagcgatggcagcctggatgtcgtgcgcttctga

SEQ ID NO: 344787 - DNA, 750 bp, Pseudomonas aeruginosa
atgaacacagtactgagcgctttcggcctgcaggggcgaaccattctgatcaccggcgcttcgtcgggcatcgggcgacagattgccctgagctgcgcgggcgccggcgccacggtgatcgtcagcggacgcaacggcgagcgtttgcaggcagtgctcgacgagctgggcggcgagccgcacaggatgctggcggcggacctgaacgacgatgcgcaggtggatgccttgagcagggcggtcggcaagatcgacggcctggtgcatagcgctggagtctcggcgctgtcgccgttgcggatggccagtcgcgagcatatcgagagccaactggcgacgaacgtgattgcgcccatgttgctgacgcgccatctgctggcccgacagtgcatatcgaacggcggctcgatcctgttcatctcctcgatctccgcacatatcggcgtgcgtggcgtgagcgcctattcggcgtccaaggccgcggtggaaggtatggcgcgtagcctgtcggtggagttggccagtcgcagcattcgcgtcaactgcgtggcccccggtctggtccggactccgatgctggaggcagccttggccaccactggcggcctggacgctacgatagcccgttatcccctgggtatcggccagcccgaggatgtcgccaatgccgccattttcttcctgtcttcggccagtcgctggatcactggcagggcgctggtgctcgacggcgggcacaccgtggagtga

SEQ ID NO: 344788 - DNA, 639 bp, Pseudomonas aeruginosa
atgcgcaagaagctgataatcgtcggtgccggggggctgggccgggtggtttacaacgtcctggccaatgatgcgggtttcggcgagcaatatgcgttggccggctttctcgacacccgtcccgacctgcggctgccggacgatatcgcggctccgctgctaggtagtccactcgactaccaggtccgccccggcgaggcgttcattcccgccgttggcgacccggggctgcgcgagcgtttgctcgccccgttgctggcgcagggcgccgagtttgccacctactccgagcaggctttcatcggtgcgcggacccgcatcggcgcggggacgttcatcactccgggcgccgttctttcggtggacagcgagatcggccgttgcgtctacatcgatacctatgtggttctggggcatgacgtgaccatcggcgaccacgccatgctgggggccatgaccttcctggctggcggtgtccgtgtcggacacggcgccagcatccatccgcgcgcgaccatcgccaaggatgtcagcattggcgatggggccactgtcggtatcggttcggtcgtggtcaatgacgtaccggcaggtgtcacggtgttcggcaatccggcgcggatcatattttccaagtga

SEQ ID NO: 344789 - DNA, 1179 bp, Pseudomonas aeruginosa
atgagccgtgatcaggcattggcacgattcgaggcgcagctcatggggtggaccggcggcgcgagcggcggcggcctgcatccggagatgctcggacaggcacgctgcgcttatctgctgggccccacctcgttcctgggattgagctttgcggaaagtatcgcgcgtaggctgggtgaggcagggatcgacgtggcgtacgtcgacgatggcttggccagtcgccagcaagcgttcggcgaacaccgggtgctcgatacccgcgggttcatcgacgaggcgcgtcgccggcccggggcgcttgcggtgaacctggggaactcggtgtttgccgcctgcttcttctcgcaagcttgccgacgggcaggagcgcaggagctggacgtcatcccgctgctggacttcctcggcctgccagtgatctaccagacggccgcctgcatgcgcgcggcaacgctggagcgcctggacgactatctggctctggcccggcgactccatgatccgctgagcatccgtaccctcggcgcgctgctggagttgcgcctgacgctcgaccgcaaggcggtcctgccggtgctctgcagcctggaggacgagtacttcgcaccttatgccgccggcgaggtcgacaccttcaggctgggtggcgaggaagtgctggtggatgttggagcccatgtcggtaccacgatcggcaaattcctgacggctacccgctggcaataccaggcgatccatgcgttcgagccggacgctgaaaactactcggcactcgagcgaggttatttcgccatgctcgacaatttccatgcctacaacatggcgctgtccgatacccggtcgacgctgcagttcgcccagaccggcacgatggggagccgcatcgaccagagcggcaatgtgcggatccaggcggtaccgctggacgatatggtcgaccatgcgaccttcatcaagatggatgtcgaaggacacgagaccagtgtgctacggggagggcgcaggctgatcgcgacacatcgtccgcgattggcgataaccggttaccactacgcggatgacctgctggacatcgcccgtctgctggacgaaatcgaaccctcttacgaactgcgcttgcgtcaccactcgtattactacttcgacagcatcctctatgccgaggcccggtcatga

SEQ ID NO: 344790 - DNA, 1200 bp, Pseudomonas aeruginosa
atgatcaagccggtattgccgccggcctgctacaccgagcaggactggttcgagcgggagcagcgggagatcttcggtcgtttatggctgctggcggggttgacccagcaactggcggccgaagacagtttcatcacccgcaacttcagtggcacgccggtgctggtgcagaacgtcaaggggcagttgagggcgtttcgcaatgcctgtgcacaccgcggcatgccgatccagacggcggaccatggagtgcgcaagatgatctgcccctatcatggttggggctatcgggaggatggcgccttgcaggggatcccgagtgcagggctctacaacatatgcaagacggagagggacaacgccagattgcagcgttatgcgttggaggtggttggaagcttcgttttcgtcagtctttccgagcagccattacctatcgccgagcaattctccagcgagatactcgaattcttgacgagcagttccgcgcattttgcgccccaggtctcgtatacccgcttcatcaatcattacaactggaaactgaacttcgagaacattcttgactggaatcatttccgattcgtgcatccgcagaccttggctccgctgttgcaatactccagcgatggagtgatcaaggctcctgccggtgcgttgtctccctcgggcgttgaggtgcgggaaccgctcgaagcaggaacggccgaagaagaagccatcgatatcgaagccactgtcgcggccgtcctggacgaggtatgcctgaaggatctttccttgtatgagcgcgcctcgatgccctatgttcctcgttggttctcctcgttggtcgaagcgtccaatagcaggggggcgttcttcaactgcaagctttttcccaacatgaacttcggctcgatccatggcgagcatttctatctccagcagtacgtgccgctcgcgccggaccgcatcgaatatcactcgtgggtcttcacttccaggctcaagccggaagtgccgccgcagccccatctgctctggggcatccatcacgcggaaaagcgggtgatcgacgaggactcggtattgctgactgaattgcagcgtgcgctgaagagcgccaccacaatcggcatcatgggcgaccatgaagcccccctggccgccatgggcaagtggtacatgcaacgactggctggagaggacgcatcatga

SEQ ID NO: 344791 - DNA, 627 bp, Pseudomonas aeruginosa
atgaaatccctgctggttctcggtcccgacagttctctgcgcgggatccactcgctggcgcgacaggtatggccacagcgacagatggaaatgctggagatcccctgcaccgactactaccacttcgatctttccgcgctcggtcgtttcgacccgcaggagtggcaggtctgtgtggtagtcaacgagttctatatcaacgatgtccggcgcgccttggcggaggccatcgcagctctcggctacgagccggcctcggtggtttcgccgcgcgccgagatcgatccgacggcggtgctgggggacaacgtgatcgtccagagtggctgtgccatcggaccgaacgcgacgctgggcgaatactgcgtgctgcggcccaatgtggtcctgagcgaggacgtgacgctcggccgcttcgttaccctggaagcgaacgtgtctatccgggagggcgcttcggtgggcgacttcaccacgatatgcgcgaattccagcctggcccggatgacccgggtgggggctcattgctacctgaacctgcagcgtcactacagcggcagcatcgccgacatgacgttctactcgccgatgttcgagcaaccggtacgggttctgccgggagcgtga

SEQ ID NO: 344792 - DNA, 1164 bp, Pseudomonas aeruginosa
atggccttgaccgtcaacaccaacatcgcttcgctgaacactcagcggaacctgaacaactcttccgcgtcgctgaacacttcgctgcagcgtctgtccaccggttcgcgcatcaacagcgccaaggacgacgccgccggcctgcagatcgccaaccgtctgaccagccaggtcaacggcctgaacgtggctaccaagaacgccaacgacggtatctccctggcgcagaccgccgaaggcgccctgcagcagtcgaccaacatcctgcagcgcatgcgcgacctgtccctgcagtcggccaacggctccaacagcgactccgagcgtaccgctctgaacggcgaagtgaagcagctgcagaaagaactggatcgtatcagcaacaccaccactttcggtggccgcaagctgctcgacggttccttcggcgtcgccagcttccaggtgggttcggccgccaacgaaatcatcagcgtcggcatcgacgagatgagcgcagagtcgctgaacggcacctacttcaaggctgacggcggtggtgcggtcactgccgcaaccgcttcgggcaccgtcgacatcgcgctcggcatcactggcggcagcaccgtgaacgtcaaggtcgacatgaagggcaacgaaaccgccgagcaagccgctgccaagatcgccgctgcggtcaacgacgccaacgtcggcatcggtgccttcagcgacggcgatacgatcagctacgtgtccaaggctagcgcggatggtaccaccagcgcggtttccggcgtggtcatcaccgacaccggcagcaccggcgcaggtgccgcggcaagtacctcgacgttcaccgaggccaatgacaccgtcgccaagatcgacatctccaccgcgaagggcgctcagtctgccgtactggtgatcgacgaggcgatcaagcagatcgacgctcagcgtgccgacctcggtgcggtgcagaaccgcttcgacaacaccatcaacaacctgaagaacatcggtgagaacgtatcggctgctcgcggccggatcgaagacaccgacttcgcagccgaaaccgccaacctgaccaagaaccaggtgctgcaacaagccggcaccgcgatcctggcccaggccaaccagctgccgcagtcggtcctgagcctgctgcgttaa

SEQ ID NO: 344793 - DNA, 294 bp, Pseudomonas aeruginosa
atgagtgcagctgtacagatccttgaagaaaccggtagcgccctgcgcgttgccctggccagtcatgactgggacgccatcggcgagttggaccagcgttgccgccaggccgtcgacgaggcgatgctggatgtgcaggatgaagaaacgctgcgtgcccgaatggaagatctgctggcgctgtaccgcgagttgatcggtgtatgccagggcgagcggcagcggctgggcaacgatctggtgcagctcaaccagtcgaaacagggcgccaaggtctaccagatgttcggttga

SEQ ID NO: 344794 - DNA, 1152 bp, Pseudomonas aeruginosa
atgtccgagcgtacctgtcctcccctgccgctggtgatcgtcctgctcgccctgccgcaggccgccgaaaccattctctcgcccgccctgccggcgctcgcgcgccactggcagctggacggcgccaccagccaatggaccatggcgctgttcttcgtcggcttcgccccgggcatctggctctggggctggctggccgaccatctcggccgccgcccggcgttgctcggcgggctcggcctggccacgctggcgaccctcggcgcctgggccagcgcagactacgccagcctgctcgcctgtcgcgcgctgcaggggctgggcctggcgacctgctcggtgacggtgcagaccagcctgcgcgacgtgctgcacgggccggcgctgatgagctatttcgtcaccctgggcgcggtgctggcctggtcgccggccgtcggtcccgtcagcggccagtggctggccgacctgggcggccacccggcggtgttcgccgcccttgccgcgctactcgccacgctgctggcgctggtcgccctgcgctggccggaaacccatgcgccggcggcggcgggtccgggaaccctggcggtgtgccggcgggcgctcgccgaccgcctgttgcagaagcgcgcgctgctggtggcggtgctgaacgtgctggtgttttccttctacgccgcgggcccgttcatggtcggcaacctgccctggctgggcttcggttgggtcggcctggccatcgccctggccgggagcctcggcgcgctgctcaaccgacgcctgccgccaggctggcccagcggccgtcgggtacgcctgggcctggcgctggcggccggcggggcggcggcgcagacgttgctggcgctcgcgggatacgcccacggactggcctgggccgcgccggccctgccgatcttcatcggcttcggcctagcgatccccaatctgctggggccggcgctgcacgcctatgccgattgccggggccgcgccggcgccctgttcggcctcgcctattacctgctgatcggcctgggcctggcctgctccaccctgctgccgttcgaccacgccgggcccctggccacatactggagcgtcctcgggctggtcgcgctgatcctggcctccggcctgccggactga

SEQ ID NO: 344795 - DNA, 780 bp, Pseudomonas aeruginosa
atgccgcgttacccctacgaacaggtcgacgatcccgacctcgcccgttgtccggtggtcggcctagaggtcgacagcagcggccaccgcagtgactggcattgccatcggcgcgcgcagttgctgtacatggccgccggcagcgtcacgctgtacttcgccgagcgcatctgccagctgactccgctccaggccgcctggctgcccgccggagtgccgcaccgcacggtcctgcatgggcgtttcgcctaccgcagcctgtatttcgcgccggaggcgttcagcgacctggcgcaggtggcgcgggtggtggaggtcaatccgctgttgcgcgagctgatcctgcgcatgactggctgggccgccgatcttgagctggaagatcggcaccggacactgctgcgcgccctgttcgaggagctggcggcggcgccggaacaggccgcgagcctgccgttgccgcgcgacccgcgggcgctgcgggtggccgaggcgctgctggcgcaaccggccgagggccgtggcatcgacgcctggggacacgaggtgggggccagcgggcggaccctggcgcgcctgttcggtgacgagaccggcctcagcttcgcccgctggcggacccaggcgcgcctgttcgaagcgcgccggcgactggccgaagggcgttcggtgaccgaggtcgcccacgccctgggctatgccagcgacagcgcattcatcgccatgtaccggcgggtttgcgggcagtccccgggacgggcgctgcgtggcgcggactga

SEQ ID NO: 344796 - DNA, 711 bp, Pseudomonas aeruginosa
atgaccgaaccgatccgcctgtccagacgccttgtcgaactcctcgcctgctcgcgccgcgaggccgagctgtacatcgagggaggctgggtcagtgtcgacggcacggtggtcgaggagccacagttcaaggtgctcgaccagcgcgtggagctgcttcccggggcccgtcccgagccgctcgcgccggtcaccctgctgctgcacaagccggccggttgccgggaggacgaagccgcccggctgctggtcgcggcgcaccgctgggaggccgacgccagcgtcctgcggccgctgaagaagcatttcgcccggcaacgcgcgacgatcccgctggataccgaggcgtccggcctgttggtgttcagccagcaacatggcgtgctgcgcaaactggtcgaggacggcgcgcggatcgaacaggaatatctcgtggaagtcgccggagaactgcctcccggcggtctcgaacggctacgccatggtcttgcctaccgcggtcgggcactgccgccatgcaaggtcagctggcagaacgaaaaccacctgcgcttcgccctcaagggtgcccagcccggccagttgcgcttcatgtgcgaaagcgagggactggaggtacgcggcatccgccgcctgcgcatcggcgcgctgtcgctggccaggctgccacccggagaatggcgctacctcggcgtccacgagcgcttctga

SEQ ID NO: 344797 - DNA, 336 bp, Pseudomonas aeruginosa
atgaagcatctgctattcccggccctggccggcatcctgctggcccccctggcgcatgcggccagtttcgactgcgagaaagccacgcgggccgatgaaaaagccatctgcgccaaccgcgcgctcaatgaccaggacgtcgagatgagcgtgaaataccgcttcctgcgcggcctgttcgccatgggcggacgtggcgcgatgcaggaccggcagcaggcctggctacaggagcggcgccgctgcggcggcgacaccgggtgcctgtcccgcgcctacgcgcagcgcatcggcgagctggacaagcagtacgcgggcatcgacaagccgctctga

SEQ ID NO: 344798 - DNA, 555 bp, Pseudomonas aeruginosa
atgaagcggcattactacatcagcgacaacctcgacgagctggaacggctcgaagccgaactggaagccagcggcatcgccaccgagcagatccacgtcctcagcgacgaggatgcggaagccggccggcaccacctgcacgaagtctcgccattcatgaagaaggacgtggtccgttccggccgcgtcggcctgctgatcggcctggccctggccatcgtcgcggtggccgccgcctacgccagcggctggaccgaaaccgccgccggctggatcccggtgctgttcctcggcgccgtgctctgcgccttctgcctgtgggagggcagcttcttcggcctgcaacggccgaacagtgccttccgccccttcgaggagcgcctgcggcagggccagcacctgttcttcgtcgacgtgaaaagcgcccaggaaccgatcctggccaatgtcgtcagccatcacccgcgcctgcaggacgccggcaccggcagcgccgcctcgccgctgctgacgggctggcagcagcgctggcggcagttccggcggatggtctga

SEQ ID NO: 344799 - DNA, 753 bp, Pseudomonas aeruginosa
  misc_feature (348)..(348): n is a, c, g, or t
atgcgccacgccgccgggctgctcgccggggcccgccgcctggtggtcttcactggcgccggggtttccgcggaaagcgggatacccacgttccgcgacgccctcgacggtctctgggcgcgctacgatccggcggccctggccacgccagccgccttcgccgacgatccggcgctggtctggggctggtacgaatggcggcgccagaaggtgctgcgcgcccagccgaatccggcgcaccgggcgatcgccgcgctcgccgaccgggtcgccgatacccggctggtcacccagaacgtcgacgacctgcacgagcgcgccggcagtcgcgaggtcctgcacctgcanggcagcctgcacgcgccgcgctgcgccggctgcgccatggcctaccggggccccctggcggaagcggcggagccggaggcgggacggcggatcgaaccgccgcgttgccgggcctgcggcgggccggtgcgtccggggggggtctggttcggcgaggcgctgcccgagacggccctgcgcgaggccttcgccgccgccggcgaatgcgacctgctgctcagcgtcggcacctccggcatggtgcagccggcggcgcggataccggcgctggcgctggagcgcggtgccagcgtggtgcacgtgaacccgcaaccggtgcgcaccggccatccgcgcgaacgctgcctcgtcgggacggccggcgaggtcctgcccgccttgctgcgcatggcgtttcccggctga

SEQ ID NO: 344800 - DNA, 588 bp, Pseudomonas aeruginosa
atggaaaacgtctacaagactccgcaagcgcctctggtcgaggaccgccccgcgacccaggcgcatttcttcgtcacctcgctgggcaagatgagcgtgcttttcctcgtcaccctggggttgtacgcggtgtattggatgtacaagcactggaaggcccagcagccgcagatggagcaacggatcagcccggtgtggcgggcgatcttcggcatcttcttcttccacgccctggcgcggcggatccaccgggccctgccgggagaacggcaggcgccgtggagcccggatcacgacgcgacctgggcggtgctgctgacggtcgcggcaaacatgatcagtcacctcaccgacgtcatcccggcgctgcagccctactcgctgccatcgctcctgctgctgctcacgccgctgatcccgatacgcaacatccagcgccaggccaacctcgccagcggcgacccgcagggcgcgcgcaacgccggctattcgggctacaacctgctgttcatcgtcctcggcacgctctactggctattgatcctggccggttccgcggtgatcctcctcggcctggaccagggctga

SEQ ID NO: 344801 - DNA, 414 bp, Pseudomonas aeruginosa
atgtcactgccgccgtacctccagcccggcgacaagctcgtgctctacgacgaacactgccgtttctgcggcctctggagcagcttcctggcacgtcgcgcggacgcccgcctgaaactgtgcgccgcccagtccaccgagggccgggcgatcctcgaatggttcggcctggcacccgggcatttcgacacctggctgttcatcgatggcgcctatgcctgcgacgacagcgacgccctcctggaagtcctgcgcctgctaccggggccctggcgccatctgcgctggctgcgcctgctgccggcctggctgcgcgacgaatgtcacgaggcgctgcggcgcaaccgctggcactggttcggccgccagcatccggccccgcgccgacgctcctggcggacccgccgggcctga

SEQ ID NO: 344802 - DNA, 369 bp, Pseudomonas aeruginosa
atggacgccaaagccctgctcctcggcagcctctgcctggccgccccattcgccgacgcggcgacgctcgacaatgccctctccgcctgcctcgccgcccggctcggtgcgccgcacacggcggagggccagttgcacctgccactcaccctggaggcccggcgttccaccggcgaatgcggctgtacctcggcgctggtgcgttatcggctgctggccacgcaggccaatgcgcaggcgctggtccttcaggaaggcctgctcgacggtcgccacgaaggcgtccgcacgctgatgctggcggcggatacgcgactggcgactgacaggacgctcgcggtgcgtctcggctgcgccagcgccgattga

SEQ ID NO: 344803 - DNA, 555 bp, Pseudomonas aeruginosa
atgtctgacaccctcctccaccccagacgtttcacccaccaccatcgggtcctgcgcgccgtgctgctggatgaggaaggctggttcgtgctctccgacctggtgcggctgctgggccgttacctgggcggtcgggcgccggcggtgttgtgtgacgaggcgccgtggccgctggcgacggcggaacagcgcgagcgcttgttcgccctctgccatgcgctggagcggcatctggatgccgaccagtggcggctcgcctggctccacgacgaacgccacgggccacgccaggattgcctggtcagcgagtccgggctctacgccctgctctggctcgccgtacccggcgcggcgcgaggcttgcgtcgttgggtcagcggctcggtgctgccacgcctgcgcagccagacccgccacaaagccacgccccagcgcgccgtgctgcgctggaaaaccgccgagatcgacaccctgcactggcaaggcaagacctggatccccctctccgactgcccgcacctcctcgacagcccacgcccgctgatccgggcctga

SEQ ID NO: 344804 - DNA, 1974 bp, Pseudomonas aeruginosa
atgagtcacaaacctcttcctatccgccctttggcatacgatgatgagactgcagccagcctcctaataagagcttcatatttgaatggatactgcagcagccaacaactaatacgccatatagatagtcgaatcaaagtaagtcacgtagtaaataacagagcaaaattttcccatatagcaagcgagcttggaatctccatcgaaacaacagacaatattattccctttagaacaggcccaactaaatactcaaagagaatatttcgacaccataaaattccggcatccgctttcagagatgatggctccgcgctttgcccagagtgtttgcaagaaaaagagtatctgcggcaagattggcttttaaagccatactacgcctgcaccaagcatagtatcctattaattgaccactgccccaactgcgaaacttcaatcacctccgcacgtggaaaaatttcattttgcgacaaatgcaatcacgacttcagaaaagtaacaaaaatcggggtaaacacaagcgatataaactggctacttgatagcatcagtgagagcaaccaagaatacatccgtagaatatttttgttctggggtgcacattctaaaacctttcaaaatcaatcaattcaatctgaagcaaacagattaaaagcatgcatgcacttcatgcataacagccccgaagcgaaaaacgcaatcataggaacaataactacccaatcacaacctccccacccaagggtattccttctaccattcctcaagagcgaagaccttggagtagtgaattttgccgaggaagcaatttcagaaataccgcagaagctatacataaactcgagaaataatagcagagtaaagccaaacataaccgacacatgtatagtcttgaaaataaatcaatcaaatctgcatgaatgcttgagaggcacggacctagaaaccttactactcaacaaaaaatcaagcagaatcgtatttttcccaacaagcgaagtccttggattactgcatgaaaaaagaacagaaatcaccgcaggcttaaatgaaaatactatttcaccagaatggcttagcatagaacaagcggctcaatacttacgaacacacgaaaccgcagtacgctcagtaataaaatcaagtcaaatcaagacacgaataacaaaaataaaacgcaccactgcaacgcagataagccgtcgatccctatgtgttttccacgaaaactttgcatgcataggaactctagccaaagagctaaacgtgcctccaaataatctaagagacaagctcgctagtctgaatatactcccagcctttcctctatatatcaaaggcatgaaaactccaatttatcgacgtgccgaaacccaagatcttaacgaagaaaagattaagtcaataaaaaaatatcaaaccaaatcaggaaggccaaaatctggaagtgccaaactcgcgccatatacgagccggtcggttcttctaaaagatgttgctcaagaactaaaaatcagccgacacagagcactaactctagtgcatgaaaaaatcttagatatatcagacgaaccatatcataaaatattagtaaccagatcatctctagactcactaaaagaaaatatatctaaagacgattacatatcacttaccgaggcggccactatgattggcattagcccacagaatctaattcttaactactacaatactggaattatagaaattaaagatctccatctttggagacttataagcttgaaggatgtccaaaaggtcatttcaatgcgtaagaattacatcactgcatcagaggccggcttccttttaggatcacaccgaagcctcatgaccaaccttgaaaaagccggaaaaataaaatcggaactgtaccaaaagaagcgcaagattaagctatacgaaatgaccgacttcaatgagctacttgataaattaaaccaactctaa

SEQ ID NO: 344805 - DNA, 960 bp, Pseudomonas aeruginosa
atgacagataaaacatttttggcagtagtttcagaactggacaggcttgtaattcaacacccggaatttgagcgtgccttcaacggggtcaaagagtgtgcagagaaatctgaatactacgctgagccggtaggctgtttgctttcggcggaaggcgggatgggtaagacaaccatttgccgcacaatcatgtcaactatgccaagtggagttaaaaggttagaggactgcgagaaaaatattgtccccgcgttttatgccgaagtcccgtcacctgccaccgtgaaaacagtagctgccagtatgctctctcagctaaacgatccgaatccacttgtaggtaataccgcacaacttacggaaagactttgtaaattactggagcaatgcgaaacaaaactggtttttcttgatgagttgcataaccttttggacaccagcaaatcaagagctcgcttcaacacgaacgtctgcaattggataaaatccatagttaataacacatctgtatcattttgcttagtaggactcccagaagtttctccaattctatctatagacagtcaactatcacgccgctttcctcttcactataaacttgggagattgactatcggcggccagaacttaactggcacgctatcaccttttttagcgaccgtcgcgaacgagataaagcgaattatgaaatttcaagcaactcccgatttttctcaacacgaacttactctcaggatctatacagccacctcaggaaaccctgcatttataatgtctctaatgaaagaaagctgcttactttccttaaaagaaaaccaggagacattagaaatacataattttaaaaccgcgtgggacaaaggaatagtggctaaatcaagcctaacaactaagaatcctttttgcctcccgatttcagagctatctaaagctttaggccctaagcactatgccgggtaa

SEQ ID NO: 344806 - DNA, 1875 bp, Pseudomonas aeruginosa
atgatggaaatagaaccacatacaggtatgagatttacccttcacgaaatcgactacgaagtaatttatgttgcagaagaaaaggttagatatgcatcacagcggggaggaaagcagcaccatatagaactctctaaattcttagagcttttttcatcacagaaagcaaagcttataggaaacaacgtcgtcaaactctcccaagagaatcttaaggcagcaaagaggaagtacgaatatattaaagcagctatcacacagacaaaaagcccaatgtctagcaatagattaaaaatcgttataaccgaagcatccaaccgcattgctgatccaactccaccaagcacaagcactgtagccaagtgggttagagcctacttggacaatggtcaatccagcctgtcaccaaagaaaaaacctgggaataggacactgcgcttctcacccgaaattgagactctaattcatgaagcaatagaaagtgaatatttatgtaaagagaaaagaaattgccttgacgtactcgcctatatcgtagggaaattatatgagcgaggaatcgccaatgccacaggctcagagttaattatacccaacctcagaaccatacagagaagggtaaaaaaactagatccatatgtagtaacaaaagccagacttggtaagcatatagccgatcgcatatcacgcgcagccggttcaaaaatacagagctacgcccccttaacagatgttgaaattgacacacatattttggacatactggtgttagaccccgagacaggagatgtattgggaagaccctatctaacgtgcatcatagacagaaatactcgagtagttgtaggcacatatatctgtatgtatccaccgagcgcgacaacagcgctcgcagcgttgatagatatgattagccgccctagtagaggattaccgggaggtatcccatccaaaataactccggataacggagtagagttcaagaacacaagctttatgcatacatgcgctcagctatccataaccattacccctgctcctgtcagagaacctaatgctaagtcatacgtagaatcattctttagatcattgacatacgggatcatacagaaagtctcaggtacaaccttctccaatccagtcaagaaaggtgattaccgttcagagaagcacgcacttcttaacctagaacaaataagatcgatcactgaatcatggataaacgatgtttatcataacgctatacattcaagaacaggacgagcaccaatactgcattggagggacgaaacaaaaaatttcccacctctttatttaagcgatagcgaagcacaggctatagcacgacgcccgctgactagatcaatacagaaagggcaagtgcaagttgaccacctgttctactactcacattcgctgacattattgcaagcggaaggaataacgcgcgtaacagttttagtcaatgaattagatttgagcgaggtactagtcaaaaatccgctaaatgaaacacaaatgattaccgcattatcaaccgaccctaactacaccaaagacttaacttgctatgcgcacgaggaatgtcaaaagataaagaagagcatgaagcaatcagacctcaatcgcctaggtccgctatctaatcttcttgcccgatgggaattgatgaaaagaatccactcagagagcatcgccgccaaaagatggataaaaaagataactaacggcgagaaacgaaagaacgtagatgtaacaaaaacagaatatccaactcaccaatgtgagcagtgggaagatctagctcttgaggtagatacaaaaatatcttcccaggacgagcgaattacctcatacaaatcagtaagagtttag

SEQ ID NO: 344807 - DNA, 762 bp, Pseudomonas aeruginosa
atgtccatacaaaacgacctacacacagctctacaagcgctccaatcgagattgcggtctcgttcagcggcagatgatttcgcctcgtattataaagcgaacgccactcttcttaaaaaccccaattccgctaatctaatgcttcaaatatcagaggcgcttcaaagcgaaccagatattgcaggcaaaattcgcggaaaaagatgcatccatcaagggaataagcatcagcgaactgcattatttcccagcaaaaaagcaaacggcactatccaactggaaagtcagctcgagctagcttacgccatagagcttgaaagaaacagccaagtacttacataccgagcccaaccattaaaaatcccactccctggaaaccgcttcgcatttccagattttctcttagtatttttgaatggctcaatagaaatacatgaagttaagccttcaaaaagcgcactcacgccagatcagatagaaaaattcgagatcatccattcaaccctaagcaacctaggcattgaattcaagatcgtagactcatctgaactccagcacttagcagacctagataaactattaatgcactatgcacgaggaaattcgcgcacctggaattatctacaactagaacttgccatcaaactaataggcgaaaaaaacgcgacacccaaagacgcctatgacgcgctcacgaaaaataatctgccaccacagatatttgactacttatggttccacaaaattttaggagcacactaa

SEQ ID NO: 344808 - DNA, 1149 bp, Pseudomonas aeruginosa
atgagcaccttcgatggaaatcataaaaagataattgctgctttcattgctttgaagaataaagcccttcttttggaaaagcacacactgcgcgggatttaccagataaaccagaattccctgccgttcatcgagttgcgtaattattatgccaatcttagggatgtgtgtgacctgccgattgtcttcatgatgaatgaagagttgtctaataccgccgcgaggcacctgtgtcccgatctgttgatagagatgctcgaggaaaagcttctgacccctagagtacaggtcgatggcagattcaccgccctggcgcatgaggattttgaggcatcgttgtccgatgtcagagcgctattcagcgatcgtatcaatggcatggtcgggagcctgatgctggacttcaccgtctcggcgttttcctgcttcgaatactggatcacgaaattatatgacggttactccaaaaaattggaagctgattacgagcagggccgaagggagaaagttgtcaagctacttgagcgctatggcaatgcgaagtcggatgaggagatgtctaaatgtctgaacggaatcctgaaagtgcgcggctcttaccgcaccttcccagacaagatcaatgcgctctacaagatggtggacaggcagagttacgggcgtgacatcaagcacgacaaggacatcatcaattttctaggcgcctgtaggaacacagtgcataactccggcttgcaccgaaaggctccgctccagatcacatgcaacggagtcaccttttggctgaagaccgacagaccttggtatagcgctagctatcctcagtcgatcgcgctgctaggtgagttggcggatatctatagccatctcataagatcgctgaacgattggtctttggagtctgtcagtgacgaaatcacgctgcaaccacatatgacgtattttgaaaccgctgttcagcttgcttatgagttggatagagaggcagcgctaaaatatgtcctcatcgagagcctggaagtcggtgaggtaaaggcggcgaacattttgagaaagcttgcgaagattaaggcggattccaagcgggatccagaggcattctgcatttacgaaatcttgatgtgcgatttgctgaagccacttgattaa

SEQ ID NO: 344809 - DNA, 246 bp, Pseudomonas aeruginosa
atgcagcatcatgtacttattgaagactgggacggcgacggcgccattcgcttacccaaagatattatgcaaaccataggggtgggtgtaggtagcacactttatctgcttgaagagtacgttggtagcactcgttgcctggtgctcagcaagacgccgagaatcccagatcgagtagatgagctagtcgaccactgggagtcgttagatacggcttccgctgacttaaacgcgaaagatgactga

SEQ ID NO: 344810 - DNA, 378 bp, Pseudomonas aeruginosa
atgcgtccctcgactgcccaatgcctgctgctgagcctgggcctggcggcctccctggcccaggccgaagaccccgtcgctccgcccactgcgccggtcgcgccgcaggccacgccgtccgtcgccacaagcccggtcgaactggaacgacgcctggcggaaacggaacgccagcgcgacgaactggtcagtcgtatgcgccaggagaaccgccagctgcgcgagcagctgcgggtggcccgggcgcagcaacaaccgccgctgctcagcgaagaacagacctggtatgtcgccggcgccgccaccgccctgctcgcgttcgttctcggcgccctgagccgaggccgccggcgacagcgacgcgaatggatcaattga

SEQ ID NO: 344811 - DNA, 1056 bp, Pseudomonas aeruginosa
atgaggttgctgatcgtcagcgacgcctggttgccgcaagtcaacggagtcgtcaccagcctgctggcgctgcaacgtgagctggaggggctgggtcaccaggtgcgcgtgctctcgcccgacgacttccgctgcctgccttgtcccggctatccggaaatccccctggcctggaacctctggcggctcgctgccctgatcgaggccttcgccccggacgccgtgcacctggccaccgagggcccgctcggctgggctgcccggcgctggctgggcaggcgcggcatgggcttcaccacggcgatccacacgcgctttcccgaatacgtgcgcgaccgcattccctggctgccactgtcctggggctacgctttcctgcgcgccttccaccggcccagcgaggcggtactggtgagcaccccgcgcctgcgcgaggaattcgccagttggcgcttccagcgcctgcggctgtggcgcaagggggtcgacaccgggctgttccggcccgccgagtcgccggctgaggaccggcgggagccggtgttcctgtatgtcgggcggctggcgccggaaaagaacctggaggcgttcctcgacctcgaactgccgggcgagcagtggctggtgggcgacggcccgcaacgggcggcgctggagcggcgctatccgcgggcgcgcttcctcggctatcggcatggcgaggcgctggccgatgcctaccggacggcctcggtgctggtattcccgtcgcgcaccgatacctacggcctggtgatgctcgaagccctggcctgtggcgtgccggtggcggccttcgccgtgccgggcccgctcgacgtgctgcgccagggcgtgaccggcgtcatgcacgaggacctcggcgaagcctgccgccaggccctggcgctggaccgcgaggcttgcgcgcgctgggcgcgggagcaatcctggcgggcctcggcggaggagttcctggcattgcaggcgtgctgcccgcgggcggcctcggagtggacgcaggagctgccggcggcgctcgaccggctcagaggatga

SEQ ID NO: 344812 - DNA, 300 bp, Pseudomonas aeruginosa
atgatcggttggggacgtgcctgtattggcatcggcggcctgctgttgctgggccagttgctgggtggcgcgctgctgctgggcgggaagggggagagcgccctggcggccgagcacttctggcaattcgtcttcctcctgccggcgatcctggtggcgctgggaatgttcgtcctgcaacggcatgtcggctccttcgcccagctgtaccgtcggcgtctcgatggcgcctcctacctgctggtggcctgcggaatcgccctggtcctcggcaagctctgcgcgctgctgctcgcctga

SEQ ID NO: 344813 - DNA, 735 bp, Pseudomonas aeruginosa
atgagcgatgtcacgttgcaacgcgggttcgccgcgcgcatccgcgatccgcaggcgagcctgccgcccggtgtcgcggcggaacgcatggcgctctacgaggaactgttcttcaacaacctggagagcttcgtccgcaacggcttcccggtactccacagcctgtttccggcgccgcgctgggagcgcctggtgcgtgccttcctgcgcgaacaccgctgccgtacgccgtacttcggcgaactgggcgaggagttcctcgcctggttgcaggacggctaccgggcggaggacggcgatccgcccttcctgctcgaactggcgcactacgaatgggtcgagctggccctgttgctggccgaggcgcccgccgggatgccgacgcaggcctggtcctggtcgccgctggcctggccgttggcctatcgctggcccgtacaccgcctgggaccggagcaccgacccgcgcagccggcggccgagccgacctgcctgctggtctggcgcgatccggcggagcaggtgcgcttcctgcagttgtcgccgttcgcctattgcctcgcccttcgcctgagcgaagcgggcgaggctcccggcacgctgttgccattgttgcgcgagctggccgaaaacagcggcctggagcccgacgcgcagtatttcgaaaatgccttcgccttgctggaggactggcgcgcgctgggcatcctcctcggcgagggcgccctggagtga

SEQ ID NO: 344814 - DNA, 492 bp, Pseudomonas aeruginosa
atgcgccaggccctgcttatcgtcgacgtgcaaccctgcttcgccccgccgcactggctgctggatgggattggccggttgctcggacacatgccttcgctggccagcgtcgagctccacgacgaagcgcgcacgccgttccagcgccagctcggctggcggccgccgctcgacgacgcctgcctggtggcggccgagcgggtgttcgtcaagcacggctacctgccgacggcggaaatgctcgatcatctgcgcgggctgcaagcggagcgggtgctggtctgcggcatccaggccgacacctgcgtgctggccgccggcttcgccctgttcgacgccggcctgcggccgaccctgattggcgacctggtggtcggttcctcgctggatcgctcgggcgagctgggcgtgcgcctgtggcggcaccatttcggccaggtcgtcgacctggccgaggtgctggaggaactgggactcagtgcgggcggctga

SEQ ID NO: 344815 - DNA, 210 bp, Pseudomonas aeruginosa
atggcccgcatcgatcctgtcctggtcggagaaatacgccgtctgccgatcagccggcggctggaactggtcgaggcattgctggagagcctggagcgcgccgaccccgaggtggagcgccaagggttgcgagtggccgaggaacgcctcgccgcctaccgggcgggcgccaccgatgcgctgccgttggccgaggtgctcaagcgctga

SEQ ID NO: 344816 - DNA, 876 bp, Pseudomonas aeruginosa
atgccccaaggcgcctgggtacccactgccgacgatctcgaacacttccgccaggtccagagactggcctatacctgctgcgaaaccatccatgccgaactgcgccccggcatcagcgagaaggaagccgcggcactgatgaaaacctggttgctggatcacggcgtcgacgactggttccaccagcccttcgcctggttcggcagccgcacctcgttcaagggcttcgatggcctgcgccatctcggcggcctcaacctggccttctaccccggcaagcagcgcctggaggacggcatgccgttcatcctcgactgcgcgccgaccctcggtgcctataccgccgacgtcggctactccggggcgctgggccacaacctgatgcaggagcggctgatggacgatctgctggtccatcgccgcaccatcctcgacctggtccgcgagcgccgtaccctggccgaggtcagccaggcggtggaccgcctgtgcgtgatccagggtacccagccacggcacaaggcctatcccttcgaggtgctcgcccatcgcgtggaaaagctcggtcatcgccgtggcccctcggtggcgcgcttcggcgtgcgcaacctgtacatcctgacgcgcaacgcgctggtcaccggccggcgcgagggctggtcgccgctgtggtccggcggcaagcgctccgagcacccgccaacgcccggtctctgggcggtggaaccgcacctggggctacgcggggtgggcgccaagttcgaggaactgctggtagtcaccgaggacgacgcctactggctcgacgacgacctgccgcacgtccgccgctggcaggcgcgcggactgctgccgcaagcacgggaggccgcatga

SEQ ID NO: 344817 - DNA, 597 bp, Pseudomonas aeruginosa
atgaggaccgacgagaaagaccgggaaggcgccgagccgggcggcgccaggctgatggagttcgcgctcaaggccaggaaggtgttcgtcatcggcgaggccaacgaaaagctggccaaggacgtggtgcagcagttgcacatcctcgcctcgatcagcgacgaaccgatccacatgttcgtcaattcgccgggtggccacgtcgagtccggcgacatgatcttcgatgcgatccgcttcatcacaccgaaggtcatcatgatcggctcgggcagcgtggccagcgccggcgcgctgatctacgccgcggcggacaaggaaaaccgctattcgctgccgaacacccgcttcctcctgcaccagccgtccggcggtatccaggggccggcgagcaacatcgagatctaccgccgcgagatcgtgcgcatgaaagagcgcctggaccggatcttcgccgaagccaccgggcagacgccggaaaagatcagcgcggacaccgagcgcgatttctggctgaacgccgaggaggcgcaggcctacggcctggtcaaccggatcatcgtctccgaacgcgagatcgtcctgccgcgcgactga

SEQ ID NO: 344818 - DNA, 324 bp, Pseudomonas aeruginosa
atggtcatcgacttcaaccggctgaatcccggcaccacgccagccaccaccggccgtaccggcaacaccgccgccggccgtcccgacgccgctggcgccgacaaggcaggccagtccgcgagtcccgcgaagcagagcggcgagtcggtgcagatcagcgaaaccgcccagaacatgcagaaagtcacggacaagctgcagaccctgccggtggtcgacaacgagaaggttgcccggatcaagcaagcgatcgccgatggcacctatcaggtcgacagcgagcgcgttgccagcaagctgctcgacttcgaatcccagcgctga

SEQ ID NO: 344819 - DNA, 1161 bp, Pseudomonas aeruginosa
atgaccgaactgacacaaaaaatgcaaacccactgcgttgggcgcttgctcatcgacctgccagagggatcgacctgggaacccaacgccagcggggcacatcttgacggttatttagcactttcggtcaccacgggggtcacggaggccgagtacgatgccttggtggagaggcgttggtcggaaattgaagcggaagaaaaaaaatccacctggccggctgcgcagccggcaaagagagtgagccccctgaagaacagcacagtcttttcgtacggcttccacgaaaatgaggggcctgatctagatggtatggtgcacaaggatgtatttcatgacgccgagggctatctgtggggcgatggcactttattcacgctcggccccaagctgaacggcgccgatgtgatctcgggttggttaccccgcctgcatgcgcgaaaaaatgatgaggtgcccagcaaaccggggctttgcctgaatggtgccttcgtcgagtcctactacgatctcgccggtccttccgaaacagtaagttgggggtttaagttgccgaagaaccttggattggtggtacgtcacaggaaggtatgggaaccagagcaacccatgctggagcgatatcgcgaagcggaaagtgaattcgctgggcttgtagcgagagaattagccaagccaggtgttatcgctgggcggaaggagtatcgagcggataagcggaacgttaatgggttagaaggagacgagcgtgttgttggtggcaccgaagggagaagtgcccgaaactacttcaagaccaacgtcggtggcgaatggaatttcccaggcatcggaagtgccaaccccatgcctagtatcaatattgaccttggtactaccttccaaaccacaactagacctgccgaactaggtggctttccttcgcacgatgaggcaccgggatacccgactgaggcggagttctttgaactctgggacgccatcctcaacagtattcgctaccgtcccggtgcgttgaccccatccccgccgggctcaagtctaacgatcagaagttcacctgtacgctcagcatcattgtcttgtggtgcgaacgattacgctctagaagaatttctcaccagcctggaaccgaaagagaactggctggacgatctatag

SEQ ID NO: 344820 - DNA, 1776 bp, Pseudomonas aeruginosa
atgagtgagccaactagatctgtgtctacgtatattggacgcaatggacataccaccgctcgtgtgacgatgagcccaactagcaacaaggttcgtgccgaagttacagccccgccggatcaggcaattccggtcgtgttcataccaggcatcatgggcagcccattgttggcattgaaagatgaggcaagaaaactgctggggaacgataatcgctgggcctggtttccagatgacacaacaggctgggtggcggggttgacgaataaaaaaggataccgtcatctgagcccggcagagcggaaattgttgcttgaccccgactcaacacgcccggtctcgtctcctgaggatgcagatcgtgaggtggtttccgagcacattactactctgccgctgcaggaagcgctcaatcgcggttggggatcagtgatgatcagttcgtacggcggcatcctcaatttcctagaagcacagctacgcttcatcctcacgccaaagggcgaactctatccaggcgtgcaaggtgcagtgccgcataatccattagcctggggccaactccaaggctatcaaccactcaccaaggaaatgctgcaacaggctgccgattttcgctatccggtctacgccgcgggctacaactggctgcaaaccaatgccaaggcggccgattacttggcaggaaaggtcgaagccatccttgatcgctgcaggaaggaattgcgcgtcaagtgtgaccatggcgtgattctcgtcactcactccatgggtggtctggttgggcggatgtgcgccaagcgatatcccggactgattcaaggagtggtacatggcgtgcaacccgcggttggggccggaacggcctaccgccgcgtccgcgcgggctgggaggacttctttggcagtgttggtctcggcgggacaggaaagaagatcatgccggtgttcgccaatgcggcaggtccgctggaattgttgcctaaccatcgttacggcgctggttggctgcgcgtcacttgtaatggtcgagtcattgcgcaactgccggaagccggttcagggccgatagatccctaccagcgtatttatttggagcctcgggcttggtggcgcctgatcgatccgtcatggatcgacccagattcattgatccaacgtccagccacacccgcggggaaagtaaagctgcaagaggcttgggaaaactatcggaagcgactgctcgaggctaagcgtttccacacagagctgggcagcagttatcaccccaatacctactcgtactatggtgcagatgaaggtcagatggctttccatcgcgtcacctggaatcttcagcctcaaatgatcgctgcgtaccgtcccggattatcccctacccgtggacctgcaccctcttctgcccacgccattggcttgcgcatgtggcgtgaagaccacgagggaacggtttatttgatcaacgatgccgaggggctggacatgatcatgcagcatggtgtgggcgtgacacgcagtactaaaggcaactcctatgtgggcaaattgcaggaccgggatcaggtgggggatgcgacggtgcctgctcactctgctgaggactccgccaaggcggcagtttttgctgcgcgtatgacggggtttgaacaccaaggttcatacgacaatcggatggtgcaaaacgtcaccctgtattcggttctgcgcattggcgcgacggccacgagaaaaacggtcagcaaaggcgcgacagccacagagattcccgcatga

SEQ ID NO: 344821 - DNA, 3168 bp, Pseudomonas aeruginosa
atgaacttcccacgcttcttcatcgatcggccgatcttcgccatcgtgctctcggtattgatgatgatcggcggcatcgtctcgttcttccagctgccgctgagcgagtacccggcggtgacgccgcccaccgtacaggtgaccaccgcctacccgggggccaaccccgaggtcatcgcggaaaccgtggcgaccccgctggagcaggcgatcaccggcgtcgaggggatgctctacatgtcctcgcagtcggcgaccgatgggcggctgatcctgaccatcaccttcgaccagcacgtggatcccgacatggcccagatccaggtgcagaaccgcgtctcgcgggtgctctcgcgcctgcccgaggaggtgcagcggcagggagtggtgacccagaagacgtcgccggacatcctgatggtggtgcacctgctgtcgccggaaaagcgctacgacccgctgtacatctccaactatgcctacctccaggtgcgcgacgaactgctgcgcctgcctggcatcagcgatgtggtggtgtggggcgccggcgagtacagcatgcgtctgtggctcgaccccgacctgatcgccgcccgcgggttgaccgcgggcgaggtgatcgccgcagtgcgcgagcagaacgtccaggtggcggccggctcggtcggccaggcgccggactccaccgcggccttccaggtgacggtcaacaccctcgggcgattgaccgacgaggagcagttcggcgacatcatcgtccgcaccggcgccgacggccaggtcacgcgcctgcgcgaagtcgcgcggatcgagatggggggcgacgcctacgcgctgcgcagcctgctcgacggcgagccggcggtcgccttgcagatcatccagagcccgggggccaacgcgctggacgtggccgaagcggtgcgcggcaccgtggcgcggctcgaaggcaacttcccggccgggatcagcgcgcggatcgcctacgatccgacggtattcgtccgggcctccctgcagacggtggccaccaccctgctggaggcgatcctgctggtggtgatcgtggtggtggtgttcctgcgcagctggcgggcctcgctgattcccctgctggcggtgccggtgtcgctggtcggtaccttcgccgtcatgcacctgatgggcttctcgctgaataccctgtcgctgttcgggctggtgctgtcgatcggtatcgtcgtcgacgacgctatcgtcgtggtggagaacgtcgagcgccatatcgagaacggcgagccgccgctgcaggctgcgcggcgcgcgatggaagaggtgaccgggccgatcgtggcgatcacctcggtgctggcggcggtgttcatccccaccgccttcctcagtggcctgcagggcgagttctaccggcagttcgccctgaccatcgccatctcgaccattctctcggcgatcaactcgctgaccctcagcccggcgctggccggcctgctgctgcgtccgcgccagggcgggcatgcggcgtcgcgcccgggccggctcgggggctggctccaggccctcggccgaccgttgcgcaacgcgcccgacgcctatggcaacgcggtgcgccgggtggtgcgggtcagcggcctggcgctgctggtctacggcggcctgctcggcctgacctggttcggtttccaggcggtgccgccgggcttcgtgccgatgcaggacaagtactacctggtcggcatcgcccaattgccgaacggagcggcgctggaccgcaccgatgcggtggtcaggcagatgtcgcggatcggcctggacgagccgggggtcgagagcgtggtggccttcccgggcctgtcggtcaatggcttcgtcaacgtgccgaacgccgcggtgatgttcttcatgctcgacccgttcgaggcgcgcacctccgacgaactcagcgcggtggccatcgccgggcgcctgcaggcgaagttcgccagcattcccgacggtttcctcggcgtgttcccgccgcctccggtcccgggcctggggaccatcggcggcttcaagatgcaggtcgaggatcgcgctggcgccggcctggaagccctggccaagcacacgcaggtgctcatgatgaaggccaccgagtccggacagctcggtggcctgatgagcagcttcgacatcaacgccccgcagctcgaggtggcgatcgaccgcaccaaggtgaagagccagggtgtgcagctggccggcgtgttcgaggcgctgcaggtctacctcggctcgctgtacatcaacgacttcaaccgcttcggccgcacctacaaggtcaccgcccaggccgatgcgccgcaccgcatgcaggccgaggcgatcggccggctacaggtgcgcaacgcggccggggcgatgctgccgctttcctcgttcgttaccgtcacgccgggctccggcccggaccgggtgatccactacaacggttatccgtcggcagacatcagtggcggcgcgctcccgggcgtcagttccggacaggcggtggcgctgatggagcgcctggccggcgaggtgttgccggagggcatgaccttcgaatggaccgacctgacctaccagcagaagctggcgggcaatagcgcgctgttcatcttcccgctctgtgtactgctggcctatctgatcctcgccgcgcagtacaacagctggctgttgcctctggcggtgctgctgatcgtgccgatgtgcctgctcagcgcgatcgccggggtctggctggtgggcggcgacaacaacgtgttcgtccagatcgggctggtggtgctggtcggcctggcggccaagaacgccatcctcatcgtcgagttcgcccgcgcgctggaagcccagggtgccgccacgctggaggcggtggtcgaggcgtgtcgcctgcgcctgcggccgatcctgatgacctcgctggccttcatcgccggcgtggtgccgctggtgatggccagcggcgccggggcggagatgcgccaggcgatgggggtagcggtgttcgccggaatgctcggggtgacgctgttcggcctgttcctgaccccggtgttctacgtcctggtccgtgcgctggcgctacgcctggagcggcgtcgcggctccggccaggctcatctgcaggagagcgcgtcatga

SEQ ID NO: 344822 - DNA, 1488 bp, Pseudomonas aeruginosa
atgagccggcatttccgtcatccattggcgtccctgggcgcttttctcttgctggccgggtgcgccgcggtggggcccgactattcgccgcccgccagggccgttccggccagcttcggcgccagcgtcgccggcctcgacggcgctggcgtggaggtcgcctggtggcgcgggctcgatgagccggcgctggtagagctgatccagcgcgcgctggcggcgaaccacgacatcgccctggccgccgcgcgcctggacgaggcgaaggcgttgctgcgcgagagccgccaggagttcctgccgcgcggcggaccggcgttcgactaccagaaccggcgccgtggcgaggtggagacgccgagcggagagccgcgcgatatcgagacctatcgtggcgcgctggatgccgcctgggagatcgacctgttcggccgcgtgcggcgttcggtggaggccgccgaggcccaggcgggatcccgccaggcgttgctgcgcaacgtgcaggcgagtgtcgccgccgccgtggccgcgacctggttcgaattgcgtgggctcgaggcggagctggcggtggtcgaggacatccgccacaaccagcgcgacagcctggagatggtcgagcgcctggtcggcgccggcgccgcccacgagttcgaccggctgcgcgccgaggcgctgctgcgcaatgtcgaggcggcgttgcccgacctcgaacggcgccgcgccgccagccgcaatgcgctggccatcctgctcgccgagacgccacagacgttcgtcccgccacctgccggcgcctctcgcgagacgctggcactgcgtagcatcggcgtgggcgatccggcgggactgctggcccgccgcgccgacatcaccgcggccgagcgcgacctggcggccgcgaccgcgcgcatcggcgtcgagaccgccgggttgtacccgcaggtccaggtgcagggttcgatcgggctggtggccggcgatctcgacgccctggacgagagcggcgcgaccttcagcctgctcaacccggtgatccgctgggcgctgctcgaccgtggccgcgtgcgcgcgcggatcgccgccagcgaagcgcgcgccagggaggcgctgatccgttacgaccagacggtgctgcgcgccctgcaggaaaccgacgacgccttcaagggctatggcgcggccggcgatacgctgcgcctgcgcctgctcgagtcggcagccaatcgcgaggcggcgcggctggcccgggagcgcttcgtccagggcgacggcgagtacctggacgtgctcgaggcggagcgctccgactatctcagccggcgtgcgctgagcatcgcgcggacccgccagcgcctcgccatcgtcgacatctacaaggcgctgggcggcggctgggaagtctgcgcggacccgcagcagccctgccgcgtggccgccgacggagtctccccggagcgggagggcgcgcaggcgtcccgctcctga

SEQ ID NO: 344823 - DNA, 210 bp, Pseudomonas aeruginosa
atgttttccctgcatattcccaatatgtcctgtggcggctgcgccagatccgtcacccaggtcctgctcagcgtcgacccgcaggcgcgcgtcgaaaccgatccaccccggcgcgaggccagggtcgaaagcacgctggacaagcgcgccttcctggcggcgctgagcgaggccggctatccggaggggcatcaggaaggtcggggctag

SEQ ID NO: 344824 - DNA, 1434 bp, Pseudomonas aeruginosa
atgccgagtcatattacggaatcccgtatacacgggggcgcctactcgtccccggcattcgccgcgatcttctccgacgccaaccaggtgcagaagtggctggatgtcgagcgggccctggcggcgacccaggccgaactgggtctcataccccacgaggcggcgcaggaaatcgcccgggtcgcccgggtggagcgcttcgacctggcggcactgggtcgcgaaagcctggagaccgggcacctgctggtgcccacgatccgggcgctggccagggcctgcgagggtggccggggggagtacgtgcactatggcgtgaccacccaggacatcctcgataccggcctgatcctgcaggtcaaggaagcctggggccatgcgctgggtctgctgcattcgatccgtggccacctgctggcgctcgccctgcgccacaggcacaccccgatggtggcgcggacccatgggcagcaggcgctgcccacgacgttcggctacaaggtcgcggtctgggtcgatgagatcgaccgacacctggcgcgcttcgacgaggcgcgcgagcgggtgctggtcggcaacctcaccggcgccgtgggcaccctggccgcgttcggcgcgcagggcttcgagatccagcggcggaccctcgccaggctcggcctcggcgcgccgctgaccagttggcacagcgcccgcgaccgggtgctggaagccgcctggttgctggttcaggtgtcgctgacgctgggccgggtggctaccgaggtctaccacctgcagcgcagcgagatcgacgaactgcgcgagcctgcccggcccgggcaggtgggcagcagcaccatgccgcacaagcagaacccgtcgacggtcgacctgatcagcgcgctgtcgcgcctggtgcgctcgcagatggtcgcgctcaccgacgccgcgttccagctgcacgagcgcgacggcacgacctggcgcatcgaatgggcggcgttgccggagctgttcgtctatgccggcgccttgctgacgcgcatggaggcgctgctggccgaaggtctggaggtccgcgaggaacgcatgcgcgccaacctcgacctgctcggcggcctgatcctatcggagcgggtcatgctcgccctggccggacagttcggcaagcagagcgcccatgagctgctccacgaggtgtccctggcgtccgcgcgacagggcgtcccgtttcgcgaagcgctgctcgcgcacccgcgcctgcgcggttgcttctcggcgcaggcgctcgaagcgctgctcgatccgctcggttatgtcggcctcgcggcggacatggtcgaccttgtcgccggcaaaccccacgccaacgcctcgggcgaaggccctgtaggcatggcgacttcccaagaaaatcccagtcagtccctgtacgtgatggaggataggtga

SEQ ID NO: 344825 - DNA, 438 bp, Pseudomonas aeruginosa
atgaagacactcgccctgttgatcgccagcctcgtcctgccggcctgcaccgtggagtccgggatcgagttcgacaagcccctggtccacccgaacggcctggtggtggagcgcccggtcggtttcgacgcgcgacggaccgccgacggtttccgcttcgatgaaggcggcgacctgcgcaatccgcggcggctggagctcggccgcgaggacacggcgccgcgcgccggcctggcgagcagacgcctggacagcggcgaagcgcgctatgcgatcgaggaagaccccggcggctcggccggcagcgaataccacctgtgggcagccaagccggctggcagccagtggatcgtggtcagcgccagcgaacagagcgaggatggcgagccggccttcgccctggcctgggcgctgctggagcgggccaggctgcaatga

SEQ ID NO: 344826 - DNA, 543 bp, Pseudomonas aeruginosa
atgaagccacagttgatctactacgtcgccaccagcctggacggcttcatcgcccgccccgacggcagcgtcgactggctcgaccgtttcgccggcggcggcagcgaccatggctacgccgccttctaccagggcatcgacgggttgctgatggggcgcggcagctacgatgtcgtgcgtggcttcggcgactggccctatccgggcaagccctgccaggtactcacccgcaatcctcgggtgagcgggctggagggggtcgaactgcgccatgccacgccccaggacggcctgtcgcgccttggcgaacagggctgccggcgggtctggctggccggcggcggcagcctggccggcagttgcctgggcgccgggctgctcgacgaggtgatcgtcagtgtcgttccgcaactgctcggcgccggcatcccgctgttcgccggcggccgcgagcggcgcctgcgactgctggaacaacacagctaccacagcggcatcgtgcagatgcgctaccaggtgatcaccgaggacgatcaggaatga

SEQ ID NO: 344827 - DNA, 210 bp, Pseudomonas aeruginosa
atgttgggaaaacgcgccaccgaccccgccccggccacccacttccgcagcgaacgcataagttcggtgaatggccagtacttcttctccacccgcgagggcaccctcgaaggcccctacttcacccgctatgacgccgaacgggagatcgacgcctatatccgccggatgcgccagtccagcgagatccaggcaaagggcacgggctga

SEQ ID NO: 344828 - DNA, 372 bp, Pseudomonas aeruginosa
atgccgcgactggaaccgggaatggcgcgtatccgcgtcaaggacctgcgcctgcgcaccttcatcgggatcaaggaggaggagatcctcaacaagcaggacgtgctgatcaacctgaccatcctctacccggccaccgacgccgtggaggtcaacgacatcgagcacgccctgaactaccgcaccatcaccaaggcgatcatccgccacgtcgaggagaaccgcttcgccctgctcgaacggatgacccaggaaatcctcgacctggtgatggagaacccggcggtgcgctatgccgaggtcgaagtggacaagccgcacgcgctgcgcttcgccgaatcggtgtcgatcaccctcgccggccatcgctga

SEQ ID NO: 344829 - DNA, 294 bp, Pseudomonas aeruginosa
atgcacgatcccgtttctcccctgcgtgtattcgacgagggttcctggctgttccgccaactggtgctggcccagccgttcatccgccaatccgggctgatcctcgccgaactcggcctgctgctggcgctggggctcgcctacctgtgctggcaccagggcaaccgctggtacgccgcgggagcggtcctggcgctgctcggcagcgcgttgctggtggtggcccggcgcaactacgactggtggctgttcaagctcggtccgcgcggccggctgtacatcccgttcgactga

SEQ ID NO: 344830 - DNA, 399 bp, Pseudomonas aeruginosa
atgcccgctctccccacctcccccacccgcacgcgacgctggcgcctggaccggcgcagcctgctgctggcactgctgctgttcggcctgctggtggcgctcgccaccctgggccggcactggggctgggtacgcggcttcggcggcgacctgctggcggtggcctggctctactacctgctgaacggcgcgctcagggcgcccgccggccggctggtgacggccgccttcgccgtcggcgcgctgctggaactgggccagtacctggcgatgcaactgcactggcagttctccagccccgtgctgcgtatcgttttcggcagcaccgccgactggctcgacatcctcgcctatgccctcggcgcgctgctggtgtggtggctggagcgccggcgctga

SEQ ID NO: 344831 - DNA, 696 bp, Pseudomonas aeruginosa
atgacccacagcgtctcccccatcggccacatccgttcctgcttcatggagaagttcgccatcccgcgccagcccctgctcgcgccggcggcgcgggggacgctggaactgctgccgccgttcgaccaggcggaagcgctggagggcctggagcaggtcagccacgtctggctgctgttcctcttccaccaggccctggaagacaagccgcggctgaaggtgcgcccgccgcgcctgggcggcaaccgctcgctgggggtcttcgccacccgcgccacccaccggccgaacggcatcggtcagtcggtggtacgcctggaacgcttcgagccggggcgcctgtggctgtccgggatcgacctgctcgacggcaccccggtgctcgacatcaagccctacgtcccctacgccgacgccgtggccgatgcccgcaacggcatcgccgccgcgccgccgccgggcatcgccgtggaatggagcgaccaggcgcggcgccaggcccacgagcacggccagcgcctggagcagccggtggccgagctgatcgagcaatgcctggcccaggatccgcgtccggcctaccagaagccggaacccgggcgccgctacggggtgcgcctgtgggacctcgacgtgcattggcactacccgcgtccggacctgatccgcgtgctcgacgtcgcccgcggcagctga

SEQ ID NO: 344832 - DNA, 147 bp, Pseudomonas aeruginosa
atgtggatcctggctttgccgctgaccgccctggccctctcggtcggcgtctatgggctgctctggctgatggagcgcggaggggaagaatatccagcgagggttccgctgagcggcgaggacgccacggaagctcggcgccactga

SEQ ID NO: 344833 - DNA, 276 bp, Pseudomonas aeruginosa
atgagcagctcacgcaatctggtcggcaccggacttctttccctgctggctctcgtggtcttccagaacaacgcactgggcgacgaggatcgaccccgggagcaacacgacgaaacggtggtgctggacagcaacgcgacgccgcaatgggcacccgccgcgcagcgactggtgatccaggcgcccgacgaagcgccgcggatcgtcacggtcggcgaggacgagcgcggcacggccctggtgaccagcgccgacgaacaggcctggacattctga

SEQ ID NO: 344834 - DNA, 4956 bp, Pseudomonas aeruginosa
atgcatagagacaatcctgtcttccacctctccccccggggaaaactccgctgcctgatcgccggcctgctgctggcgcccaacctgccccaggctttcgccggcgggctggaggcggccggcgggccgggcggcacgccgcaactgctcaaccagggcggcgtgcccatcgtcaatatcgtcgcgccgaacgccgccggcctgtcgcacaaccagttcctcgactacaacgtcgaccgccagggcctggtcctcaacaatgcgctgcaacccggcgcctcgcagctcgccggacaactggcggccaacccgcaactgcgcggcgacgccgccagcgccatcctcaacgaggtgatcagccgcaacgcctcggcgatcaacggcccgcaggaaatcttcggccaggccgccgactacatcctggccaaccccaacggcatctcggtgaacggcggcagcttcatcaacacgccccatgccagcctgctggtcggccgtccggaactggccgacggcaagctgcaggcgctgaacaccaacgacgccgtcggcgccctgcagatccagggccagggcctgagcaaccgggatggcagcatcgccctgctggcgccgcgagtcgacagccaaggcaagatcgaggcgtcgaccgagctcgacctgaccgtcggtcgcaaccgcatcgactacccgagcggcaaggtcgagcgcgacccgtccggcgacgtccgtccgggcgagcggcgcatcgacgccagcctgttcggcgccatgcaggccggacgcatcaacatcctcagcaccgccgagggcgccggcgtgcgcgtcggcccggtcgggatcgacggcagggacggcgtcgacctgcgctccgccggcgacctgtcgatcagcggccaggcgcttcccgacaacagcctgaacgccttgcgcgcggcgatccgcagcgacagcggcaacgtcggcctgcatgcccgcggcgacctgagcctggccgccgccgacgtcagcggcggcagcgtcgacctcaagtccgggcgcaacctgaccctgggcagcgtggaaagccgcaacctgcgggaaagccgcgagcgctggagcaacagcaccatcggcatcacctgggaaacctacgaccgcacgcgtaccgtcaccgattcgaagcagcacggcagccggatcgatgcccgcgccgacgcgagcctggccgcgcggggcgacagcgaactgagggcggcgacggtcaaggccggcgctaccctgaaagtctccagcggcggcgatacccgtcttctcgccgccaccgagacccgcaccgaacgcgaccagggcgcgcaccgcaagcacctgtggaaagccaactgggacaagggcagcagcgagcaacgcagcgtggccagcagcctcgaaggcgcgcgggtcgaactcggcggcggccggcgcctgaatctggaaggcgccgacgtggccagccgcggcgacctcgacctgcaagccaagagcgtcgacatcggcagcgccagccgcagccacagcagccgcgacaacagctactccggcgacctggtcggcggcagcttcttcggcagccacggcgacggcgacagcggcaagaccctgcaacagggcagccgggtcaaggccgacggcgcactgacggtgaccgccgatgcggtcgaggtgcgcggcagccaggtacgcggcgcgcgcaaggccgaggtggtcagcgggaaaggctcgctgcgcatcgacggcgtggaggaaaccgcccacagcaacagctacagcaaggacagcaagttcttcggcatcgccaaggacgagagtcgccagcgcagcaaggacagcagcaatcgcgccagcgaagtacgctcggacagcaacctgaccctgcgcagcgccgccgacatcgccattcgcggctcccgggtcgaggctggcggcgccctcgccgccgaggccaagggcaacctggagatagcctcggcgcaggagcgccacgacggcagcgacagccgccacacccgcggcttcgacgcctatgccggcgagcagaccccaggtagccgccaataccgcgccggggtgcgctaccaggaccagcggaccagcgtccgccgcgaggaaacccgcaacagcggctccagcctgggcggcgcctccctggccgtgaaggccggcggcgatctcaccgtgaagggggccgagctgaaggccagcgcgggcgacgccagcctctccgggaagaacgtcgccctgctcgccgagcaggacagcaagacccgcagcagcgaacagaccaccaccggcggcggcttctactataccggcggcctggaccgtgccggcagcggtatcgaagtcggccaccagcggatcgacgagaacgacgccgaaagccatgcgcgcaccagccaggtgaacgcgacgggcaatctcaggatcgacgccgcccagggcagcctgacgacgcagggcgcgcgcctggaggccggcgacagcctggcggtcgccgccggcacggtcgacaaccaggccgcccgcgacagccagagcagccagcgccacgacagcggctggagcggcgacatcggcgccaacctcgagtaccgcggcatcacccggccgatcgagaaggcggtcgaaggcgtcgcccagcgcaaggtccaccagcccggcctgctcgacaacctggagcagccgaacgtcggcgtcgacctcgagatcagccaccgcgacagccgcggcgagcaacaggcgagccaggcgcaggtcagcagcttcgcgggcggccaggtcgaactgaaggtcggcgacgccctgcgggacgagggcacccgttaccaggctcgcagcggaggcctcctcatcgacgccgccagacatgacgccagggcggcggagaacacctccggcagccatgagcagagcctcgacgccaaggtcggcgggcgcctctacaccaccaccggccaggacctgaacctgcgcctgagcggtattggcggcagcagcgagaacagcgccagccagaccaccgcggtggtcggcgaatacgccgcgaagcagggcgtcgagatccgcctcggcggcgacggcctctaccagggcagccgcttcgacggcggcgaagccggggtcaggctcagcgccggcggcaacctggccctggaacaggccaacgaccggcagagcgccagcagcgccagcctgcgtggcgacgccgcgttgagcggcggcatggcccccagcgccaacggcaaagggctgaacgccagcgccggcctgcaactcgaccacaaggccggcgacagccgggacagccaggcgcgggtcgccgacatccaggccaagggcgcggtggagctgcgcagcggcggcgatctggtcctgcaaggcagcaatatcggcagcgcggcagcgaagaccggcgacatagtcctggccgccggcggcaagctcgacctgcaggccgcccgcgatagccaccgggccgggggaaacaacctcggcggcggcttcagcctaggcggcggcagcgttcgcgacgccgaaacgagcagcaagaacggcagcgtcagcggcaacttcaatatcggccgggtcgacgaggaacgtcacgcgctgaacggtggcaacctgcacagcgcgaccaaggccagcctttccagcgccgcggacgacgccaccgcggtacgcctgcaaggcactcgcatcgaagccgcccaggtcagcctcgaagccggcaacggcggcattctccaggagtccgccgaatccagcgagcggcgcgccaactggggcgtgctgctcggtgccggggccaacggcggcaagaccaccggcgcgccgagcgactaccggagcgattatgccgtccaggcccgcgccaaggtcgatgtcgatgtcctgcgcagccagacccagagcgacagcgtcatccaggccgaccgggtaatcctggcgagccagggcgacacccgcctggagggcgcgcgcatcgacgcggcacaggtggacgggcgcatcggcggcgacctgcgggtggagagccgccaggaccgcgcggagggcgtgaaggtcaacgtcgacgcgcgcctgggcgtggagaagaaccagcccggcctggtgaacaagctggcgagcaagaccggaccgctgaaggacaagctggaaaccaaggccgagaatgctttcgacaagcaccgcggcaagttggagaacggcatcgaccgtaatgtcgagcggctcggcaaggccggggacaacctcctcgccaaagccgaaacggccaaggagcgcctgggcgagaagctggtccgcagcggcagctacgaggtcaacccggagccgcgcggcgccttcgccagcaagctggacagggccaggggctatctggcggagaaaggcgaagcgctcggcgaccggctgtccggcctcaagcagcgcctgtcgccgaacaagaccggtagctatgcggtgaacgacaagcagacggccggcgccaaggtcggcaatgccgtcgagaacgtgctgttcggcgacaagagcggcgaagcctcggtaaccccgacgctgtacctggacgtcagccacgtcagccgcaactacgtcaccgaggcctccggcatcaccggcaggcagggcgtgaacctgcaggtgggcgcagcgacccaactgaccggcgcacggatcagcgccagcgacggcaaggtcgacctcggcggctcgcgcgtggaaacccgcgccctggccggcaaggactaccgcgccgatctcggcctgaacgtctccaggtcgccggtggacctggccttcggtatcaaggacgagttcagccaggagcacgaccaggcgacccgcgacgaccaggccttcaacctcggcgccctgcgcgtcggcggacgcaaccgcgaccagcagttgcaggccggcatcgagcagaaggccgactga

SEQ ID NO: 344835 - DNA, 1713 bp, Pseudomonas aeruginosa
gtgccgtaccgctctaccgaatcatcgccccgccgcccgttctgccgagccctgctgctgggcctgctcggcgcctcgcccgtcttcgccgccgatccgggccaacccgggcaggaagccctgcgccaacaccagcagcaacaactggaactgcaacgcatgcagctggaagaacgccaacgccaattgcagcgcggcaatttcggcggctcgacggccccggcgccggcatcgccgcccatcgcagaccacgactgctggcccctgagcggcacgcggatcggcggcgtcaccctgctcagccgggagcgcctggaccgcacgctcggcccgctgatcggcgaatgcatgggacccggccagatcaaccgcctgctggcggcgatcacccggctctatgtcgatgccggctacgtcgccgcccgcccctatctggccaatcccccggaggccgggcagagcctggatatcctggtcgacgaaggctacgtcgagtccatcgaactggacgaccagagcctgccggtatcgctgcgcggcgccttccccggcgtgctcggcaagccgctgaacctgcgcgacctggagcagggcctggaccagttgaaccgcctgcgctcggtcgatctcgccgccgacatcgccccgggcagccagcccggcgcctcgcggatcctcctgcgcaaacgcggcggcgccgcgcgctggagcctcggtctgggcctggacaacctcggcagcctggccaccggacgcgatcgcggcaacctcagcctgggcctggacagcccgctggaactcaacgactcgctgttgctgagcgccagcgacacgctgaatcgcgaccgacgctacagccgcagcagcagcctgtactacgcgattccctatggctactggacctacagcctgttcgccagccacgccgaattccgctcgccgctgcgcaccggccggcagaccttctaccagaccggcgcgaccgatctcttcagcctgcgcgccgaccgcgtgctctggcgcggccagcgtcaccagttgagcgccaacctgcaactggcgcgcaaggatgtcgacagctacctcggtggcatccgcctgaccaaccagagcccgcggctgagcgtcgtcgaagccggcctcaacctgttctggctggacagcgcggtctggagtctcgacctcggctacgcccgtggcctgagcgccctcggcgccgaccgcgatcgcgcggggcgggccgacaactacccacgggcgcaattcgacaagtaccgcctcggcctcaatcaatggcgcaacggccagctcgccggccaggcctggcagtggcagagccaactcacggcgcagtacagcgccgacccgctgccagccatcgagcagttgctggccaccgacgactccgcggtgcgcggcttccgccgcaacagcgtctccggcgcgattggcgcgatatggcgcaacaccctgcgcctgccgctgcgcagcgacctgccggtgcaggtcactccgcgcctgggcctggaccacggctgggtcaagctctaccacggcgcccccggccagtacctgagcggtgccagcgccggcctcaacctgagctggaagcaggtccagctcgacctcgactaccagcgcagcctctccgcgccgtccgccttccgccacgaaccggagagctggctgctgcgcctgagcctgcagatctga

SEQ ID NO: 344836 - DNA, 267 bp, Pseudomonas aeruginosa
atgaaggctttcgccctgatcgccctgttcgcctgctcgccgctggtgatggcggctggcacccaggaacaacctgccagccagcaggaaggcactgtcgaggaatatgcctacggcatgcatctcgatgtcgctcgcgtcatatcttccaccgatacttcggaggcctgcggcatcgttcccgcacgcatgacctacgaagattccaaaggccggaaacataccgtggagtatcaggtctggggcaacggctgcagcggcggctag

SEQ ID NO: 344837 - DNA, 534 bp, Pseudomonas aeruginosa
atgtccagcgcacccgcgcgcctggatcacgccgtcctgcgtgaaaccctgcggcagttgctcgacctgcccgccggcggcgtcgtcgacgccgaccaaccgctggcgccgccggccgtcccctatgcggccctgcgcctggagacctcgagcctgctcggcaacgtacgccgggagtttttcgccgacgacgagcaggagtccctgctggccagttgcgaaagcgtctttcgcctgacctggcatggccccgcggcgcaccagcgtctgcaggacgcccgttgcctgctgcagtcgagtgccgccatcgacgccctgcgggcattgaaggccagcctgctgcgcctgacgccgttggagaacctgtccgtcgtcaaggacgggcaggcactggagcaggcccgtttcgacctggtcatcggccacgagcacgtgctggtcgtcgatctcaagcgcatcgcccaggcgacgctgcaggccctcggcagttcgggcctgtccgccgccgttaccgttcaaccctcggagacctga

SEQ ID NO: 344838 - DNA, 1500 bp, Pseudomonas aeruginosa
atgtcgctccccctttcccagatcgtcaacgtccaactgaatgtcaccccgacgtcttcgccacgccgagacttcggcctgttcgccctgttcactccggaagccggcaccgtgttcgccgatgcctccaccctgtacatcagttgcgccagccaggcggacgtcgaagcggcgttcggcagccactcggaaaccgccgccgcgagccgaccgttcttcgcccagtcgccgcgtccacggcagatgatcgtggcgcgctggctgaagagcgcgcgctcgctgccggcgctcaaggcggcgctggctggcgccccgctcggcgccagcctggcgcagctcaagggcatcgccgacggtcagctgtcgctcagcgtcgacggtgcgcgagtggatgtctccggcctggacttcagcgaagccgccgacttcccggcggtggccgcgaccctcaaggccaagctggccgcccaggcgctggattgccgctacgacgaagtcgccggtcgcttcatcctcgaagccagcgccgctggcagcggcaagtccatcggctacgtcgagaaccgcatgctgccgggaacctatctgggcgcgctgctgcgcctggaagagggcatggcgcagaaggtcgccggccgcgacgtgctggacctgccggcccagagcctgggcgaggcgttcgccgcgctgagcgacgtcaatcccggttggtacgccgccagcgtcgccgccgccctgagcgacgcgcagatcctcgaggcttccgcctgggtgctggccgcggacaagaagatcttcgccgtcaccacccgcaacgccgcgcatctggagccggtctccggcaaccctttccagcagctgcgtgaccggcagagctaccgtaccgtggcggtttacgacaagaacgacgcctatgcggcgaacagctggctggcgcgggcgctggcggtgaatttcgcggcgaacaactcgacgctgacgatgaagttcaagcaactgccgggtatcagcgcggatagcctgaccctgagcgaggccgacaagtgtcgcaagctgggcatcaatttctacacctacttcgacgactcggcgatggtcgccgaaggcaccgtggtcggcgggcgtttcttcgatgaagtgcacatcctcgactggtatgtcgacgcggtgcagaaggaagtcttcgccaccctctatggttcggccagcaagattccgctgaccgacgccggggttgctcgcctgctcgcggcggtgcgcaaggtctgccgcgagggcgtgaacaacggtgcctttgcgcccggtgtctggagcggcgacggtttcggcaacctggccagcggcgagcgcctggacgaaggcttctacgtatgggcggacagcgtcgacaacctgtccacctccgaccgtgagctgcgcaaggcgccaccgatccaggtggcgctgaagatggccggtgccgtgcactcggtcgacgtgctggtgaacttcacccgctga

SEQ ID NO: 344839 - DNA, 432 bp, Pseudomonas aeruginosa
atggctatttacgaccacaaccaattgtccgtgctgctcaatggctacgaaatcaaggactgggccgacggtgccgacacggtcaagttcgccttcgccaaggatgccggcgagatgctgatcggtgccgacggcggcggcgtgttcgtcgccagcaccgatcgctcgggcaagctgaccctgaagatcaggcagcattccgaggacaacaggtacctcaaccgcctgcgcgccctgcaggacggcaatatcaaggccttcgtgccgctgaccctggagatccgcgacctgctcaacgaagacctggtcagcgcgaccaggggctacttcaccacgcgtccggaatacacccgtggtgccggccataatgccaccacctggaccatcgtcttcgagcgcgccagcgtgaacctggaaaaaggagtggcctga

SEQ ID NO: 344840 - DNA, 399 bp, Pseudomonas aeruginosa
atgaaccaggagcatcgcctcaccctcgaccaggtcacctacctgatgcgtccggccaatgcgctgccggcctggaacgccctgaagaaggccgcgcgcctgttgcagggcctggagctgggcgagggcagcgagtccgcggcgctcggcgcgatcctcggcaacctcggcgacccggtggtggccgaggtggagcaactggtcctgcagcacatcaacgtgcagccgcaggaaggccaggcgttccgcctggtggatcgcctggacacgcacttcaaccagcatcgcgcccacctgctaccgctgctcatcgagggcgtgaagtaccagttcgcggattttttcggcgccgccatgccggcgctggcgagggtcctgccggtccaggcgcaggcctga

SEQ ID NO: 344841 - DNA, 138 bp, Pseudomonas aeruginosa
atgcgccggctctgcacgctgcacgagctgcgcgcgctctacaccctggccgacctgtgcgacttccacgatgccctcggcgagtgggatgaagcccagcggctggcctacgagagatcgcatcatggagtcgactaa

SEQ ID NO: 344842 - DNA, 1875 bp, Pseudomonas aeruginosa
atggagtcgactaatcaatcggccgccggaccggccaagggcttgcaggactacctcggggaattccgcgaggcgctgagccaggtccagtcggtcgccaggatcgtgcaggggacggcagccgctctgctgggcggcctgaccggctacctcgacgattcgctcaagggcctggaggcgctcgaccagggcgaggacgcgctggggcctatcgggcccgaggccattcgctcagtgcaagactatcgccaggcggtgacggaggtcgatgcgctggtggctgcgctgaacctccgcgtcgccttgggactggcaccgaccctcggcaacctcgcgcagcgtttcgagcgcttcgtgcagggcaaccgcgaggcgctgctcgaggggctggggaaggcgctggaggtgatcgcccaggtcatcgacgcgctgggcaacttcgtctgggcgctggatgagcttgtcggcgcgacactcggctggcgcaccaccctgaccctgctcggcggcaccttgctgtggctgggacgcacctcgctgctggccttcgccagcaaccccttgaccctgctgatcgccgccctggcggcgctgatcctgctggtggacgacttcgtcacctacctgcgcggtggcgactcgctgttcagcggcttctggggagggctgcgcgacgcggtggccgacgtcagcgccttcatcgaggaaaacctgcagggcgtgctggcggtggcgtccttcgtcggcaccgccctgctcacggcggttccgctctccagctggggagcggggctggccaggctgttcctcgccgccaacctggccatcggtgggctgctgggtggcatcggacgtttcggcgcggcgttgcgcggcgtcgcgacgaccgtcggcctggtcggcaacgccttgcgcatcgccttcctggccaatccggtagggctgctgatcgccgccgtggtcgccctggcagtgctggttgcgttgaacttcgagcggatcaagaccgtcgccgctgctgcctgggacttcgtcgtggccagggcggtcgcggtgttcgcttccctgcaggaggtcttcgcgccgctgctgcggtggtacggcaacctgctcggcctggccggcgacctgctcagcggcaatttcagtgccgcgctggagcgggtccgggcgttgtgggagcaactgacgggcttcttccggagcggtatcgaggcgatcggcgggctgttcggcgggctgcgcgactatctgtggttcgatctgcccgacctcgatccgcgcccctggctgctggcgctgggagaggccgccgcggccatggccgcgctgctccaggcggccctggacgcggcctgggacgcgctactggccaaggccggcgaggtgctggaggggctgcgcgcagcgttcggttcgttgggcgactggctctccgggctgttcggccgcatcggcgagacgatagtgcgggcgcttggtggcgtcttcggcacgttgctcaagctctggggcgatagcctgacgagcgcctccggcctgctcggcaaggccctggaggcacttggcgagttgttcccggcgagcggggagggtgtaccgcagaaggttcccgccaccctgcgggcggccgccacgctggcgctcggccaggtcgacgcggcgcaggccggcgccagtccctacatcagcccgccgtcggcctggacgcccggcatcgtgacgggcagcggcgacagcccggtgaacaaccagaacgtgcggatcgacatcgtcaccagcgacccggtgcaggccggacagaccgccgccgcggaaatccagcgcctcaaccagcgcgccacccgcaattacgccaaccgtttcaaacagtga

SEQ ID NO: 344843 - DNA, 750 bp, Pseudomonas aeruginosa
atggtcatgcttatcaatcgccatgtcggtaccgtgcgcctggacgcggtaatctccgagaaccacgtgtcttcgctgaagaccaccgccaatccggtggagtcgggagcgcaggtgatcgaccatgcggtactcgaacccaagtcgatcaccatcgtcggtaccctggtggatcacgcgccgcccggcgaaccgctgccctcactgctggtgcccggcgcccgccgcgcacgggacttcctcgaccaggcggtgccggccggcgtcccaggctcgttgaccgagcaggcccggcgctatgccggccgccaactgcaaagctggctggcgcctggcggtcggcgccaggcacaggcccaggaactggcggcctggctgccgaccctggtgccgccgtcgatcggcgacctgtcgccgagcaaccagcggatccagcagatccatgccagcctgctggccctgcagaagtcgggtgagccgctggatgtgcagaccggctttcatctctaccgcaacatgctgctgaccagcatcaccgcggagcaggtagtggatggcgcgttgaagctgaccatcaccgcccgcgagctgcatctggtggagacccgcaccgtgcgagtacccagcgccggccgcaacggctccggtcgcgccgcgcggcagtcggcgccacgccaggcgcgcggcacgacgcgaccggagccggcggacaagagcctgctgaagagtatcgcggggctgttcaaatga

SEQ ID NO: 344844 - DNA, 318 bp, Pseudomonas aeruginosa
atgaactggctgccgatcgacgacagcccgctgcaggagcagcgattcgagttcgccggccagcgcctgcgcctgaccctgcgctacaacagcgtcggtgaccactgggcgctggacctgttcgacgagcgcgcgcaatcctgggtcgcccaggggctggcgctggtggtcggggtgccgatgctctggcgcagcagcgtgccgtactatttctggctcgccgacgaaagcggcgccggcctcgacccactcgccgggcaggaccttggtagccgctgccggctgtacatcggcgaaaagacggaggtggcgccatga

SEQ ID NO: 344845 - DNA, 843 bp, Pseudomonas aeruginosa
atgaggctctatggacggcgctaccggttggaattgagcaaggccggcgaatacctggtggtggaaaagctgcgggtcgccttcgagctgaccaagagtgccgacagcacgccgaaccagatcagggtgagaatctggaacctgtcgcgcgagcggatcgaccagttgttgcgcggagatttccagtccgctcggctatgggccggctacgaggaactgcgcctgctgtttctcgccgacatcatcaagatcggcgtcaagcgcgaagacatggactggatcgtcgaactggagtgcggcgacggcgatcgcgactaccaccagtcctatgtcagccagaccctgtccgccggaacctccagcgaacgactggtcggcgcggccctggcgagcatgccgaacacttcgctcggccagctggagctgccgcgcccgcaacgcctgccacgggcgcgggtactgttcggcgcgacccgcgacgtgctctccgacctggccggctggcaggacgccaactggtctatccaggacggccaactgcagatactgccttatgaccgagtgctggacgacgagctgatcctgctctccgaggagaccggcatgctcggctcgccgcaactcggtgacgatggcctgaccatcacctgcctgctcaacccggcgctgcgcgtgggcggacaggtacgcctggagtcgcgcctcgactggctcaacggcgactacaagatcgtgcgcatccactaccagggcgacgccctcgaacagcactggaaaagcacggtcaccgtggtcaaccagcaggtccgcggcaaaccgggcaaggagcgcggcgatgactga

SEQ ID NO: 344846 - DNA, 642 bp, Pseudomonas aeruginosa
atgactgattacgactggcagatgccatcggccgaacgggccatggcgcgggccctcgacagccgggtcaagcgcctgcacacggcgttgcccggacgggtgctgagcttcgatccgcaatggcagaccgcgagcgtgcagccgctgatcgaccaggtgctggtggacggtacgcgggtgcccttgccggtgctggcggacgtgccggtacagtttccacgcggcggcggtttcgtcctgaccttcccggtgcggccgggcgacgaatgcctgttgctgttcaacgagcgttgcatcgatggctggtggcagtcgggcgaaccgagcgagcctctggactatcgccagcatgatctgtccgacgccgtggcgatcatgggcatcagctcgcagccgcaggcggtggcggatttcgccagcgatgccacggcgctgcgccggctggacggttcggccttcgtcaggatcgacgacagcggcaccgtgaccatcgacggcagcaagctgcagatcaactgtcccgtggtattcgccgcgggcatgcgcggcgagggcgatgtggtgtccgccgggatcagcctggaacggcaccagcacgggcaggtgatgccgggtagcgggacaacgggagttccacgatga

SEQ ID NO: 344847 - DNA, 354 bp, Pseudomonas aeruginosa
atgagagtcagacgaatagacgaagagggtgactggctgttcggccaggggcgcggcaactatgccgccgccggcgagtcggtgaggcagcgggtctgcacccgcctgcgctcgttcgagggcgactggttcctcgacctgaagcacggcctgccctggttcgaacgcatggcgcggcctgccgacctggtcgcgctggaggcagacctgaagcgttgcgtcctgttgaccgagggagtgagcgagatcctcgattttcatctggcgctcgatccacgggagcggcggttgaagatcgccatcagcctgcgtgatcgctacggcggcacgcagagcgcggaaatcttccgctag

SEQ ID NO: 344848 - DNA, 1146 bp, Pseudomonas aeruginosa
atgggacaactgactgacaagggctatgtcgggcagcgcctggacagtatcctcgaggagctggaccggggtttccgcaccatctacggcaacgacatcgacctggcgccggacagcccggacgggcagatgctcgggctgatcgcacagatccgcgccgatctcgaagaactgggcgaaacgatctaccgcgccctcgatccggatcacgccggcggcgcctggctcgaacagcgcgccgcgtatgccggcttgctgcgccggcgggcgcgctacagctacctgcgcggggtgctcctgggcgggcggccgggaacgatcctgccggccggctcggtgctgcgcgatatcaaccaaggccgctggcaactggtcgatgaaaccctgctgggcgccgacggctcggcgcgtggcgacttccgcagcgtggaactgggggcttttcccctgccggcggacgcaccgctggcgccggagacgctggtactgggctggagcgcggcgagcaaccgacagccggccgaggttggcgcggaggaggagaccgatgccgagctgcgcgcgcggttcttccgcagccgcgcccgtccggcgcagaacagcctggacggaatggtcgccgagatcctgcaactggcggatgtgcgcgaggtggtgggcctggagaataccggcaaccagaccgacgccaatggcgtgccgccgcacagcctcaacctgatagtcgacggcggcgatgagcgggccatcgccgaagccatcttccatcgcaagaccgccggtacgggcttgcgcggcgaggtcgaggtcacgctcgccgacagccagggcatcagccgcacgctgcgtttcgaccgcccgcaaaccgtcgcctgccgggccttgatcgaagtccggcgcgacgccgaattcagtgcggtggacagcgcggcgatcagggcggcgctggccgccagcgacttccgcatcggccaggacgtgcaactgtcgcggctctacagtccggtgaataccgtccagggcttctgggtcagtcagttgaggatcgcccgcgtggggcaggcgccggccgctgccaatatcgagatcggcgtgcgccagcgggcacgcttcgatcccgccgatatcgaagtggtggtgctatga

SEQ ID NO: 344849 - DNA, 654 bp, Pseudomonas aeruginosa
atgagctacgagcgcctgctgatctggcaataccaggcacgaccgcgggccgtcgccacggcgaagctgctcgatgcccacttcggcgagacccgcgagggcctggcgacgttgcccgcggcgctggacatcgacagtgccgaaggcgtcaacctcgacctggtcggcaagcatgtcgggcaatcgcgggtgttgcgcggactggcgccgcgcagcctgttcggcttcgaggaaacgccgggcgccaagggcttcggccgtaaccgcctgggtggcggcaagtggtaccggctgggcgatccgttgcgcgactcggtggtgctcgacgatgacgactaccgcttcctgatccgctgccggatcgcccgcaactaccagctcggcaccctggaggacatcgccgctgccctcggcttcatcttcgacggccagtcggtggcctacgaccagtacgacatgacgctgtcggtggtgatccgcagcgacggcatcaccgacttcaagcgctacgcgatcaccaccctggacatcctgccgcgccccgccggggtcggcatccgtttctatctcgccgcccccaaccgcgccttcggcttccgtggcgcgccgggcgcgctggcgttcaaccaaggcaaatttgcgaggttcctatga

SEQ ID NO: 344850 - DNA, 999 bp, Pseudomonas aeruginosa
atgactcagtacaaacgccccgacgaagcggtgttcgcctccggtgccaaacccggcgaactggaggcattccccgacatcgcccgtggctggggcgtggctttcgagcagaccgccgggattccaccgatggagtggttcaacgcgttgttcaagcgtaacgatgaggctctgcggtacttgctgcaacgagggattcctgaatggtcaacaagcgaggactatccggcaggtgcttatgttcaggagggaggtaagacttggagggccaaattagccagccaaggtaagcaaccaaacttagaaacagccgtgtgggaggagtctgctttaacctcagaacaggtcctgtcgttgataagttgggctaatctttcaggtaaaccgacgacattggctggctatggcatcatcgatgctttgggtaagtacgatgctgcagttgctgcaagtaagttgtctgtagccaaggcgatagtgctgaaaggagatgtcattgggaaagcatattttgatggaagtagtgatctgtcaatccagactcaagtcccaggtgtgcctgggcaagtttcactatttgctatgagcagcccaccagttgggtggctgaagtgcaacggtgctgcggttagtagatctatatattctggtttgttttcgataattggtaccacctatggtgtaggtgacggaataaatactttcaatctgccggacttgcgaggagaatttgtgcgtggctgggatgatgggcggggggttgatccagggcgtgtattttcatctcaacagtcggatatgttcaaggcgcattatcacacaacgattggtaacaagcagtatggaaattttcagtatatcgctgatgtcggggttggggggactattggtggtgcggctggctcatcttggtcacctaatgcgccattcaataatggtgggggagggcctgaaactaggccaaggaatattgccttgttatattgtataaaaatttaa

SEQ ID NO: 344851 - DNA, 951 bp, Pseudomonas aeruginosa
atgataaaaaaaagaatatcaatcggtggatatcaccacgatgtgtggggcgatacagactaccttggactcatgggggaagctttcgagccggataccgtcgatatcctgcgggccttctgtgatcccggtagcaccttgatcgacataggcgccaatatcgggctgacctccctggctatgtccgggctgtgcggagaggggctggttgtcgccgttgagcctgtacccgccacctttcggttacttgaaagaaacctgtccctcctcctgcacgccaatgtcaagatggtgaacaaggccctgggagacaaggacggctcggtcgcgatgtatgtcaacgagagcaatcttgcaaccgccttcgtggtcagcgaggaaagtagcggaaatctggacattcccctgaccaccctggatgcccttgtgaccgattgcggcctggcgtcggtggatttcatcaagatcgatgtcgaaggccatgagctggatgtattgcggggcgcgaggaatacgctggagaagttccggccgaacgtattgctggaaatgaatcactggtgcctgaatgtttttcggcgcacctcgttgcctgaattccatgaggctttgcttggaatatttccctttgtcttcgctgtggaaaaagggatgtatatcgatttcaccgagcgaggcaatgttggcgatatctttcagcggcatgtcttcgagaacaagtacatgcacatcgttgcgggattcgagagggaagagctggtacgccggctggactcgctggagagtgcgtcctcccttcaacagccattgtcgtcgcccgcgtcggccatgtcctctcctgaaatcgactatcgcttgcaactcgaggcggtgttgaactccaccagttggaagatcaccgcaccgctgcgcaggctggccagcctgcttggttggaagagagccggctga

SEQ ID NO: 344852 - DNA, 315 bp, Pseudomonas aeruginosa
gtggctgagcgcgccgtcccgctgctggcggtgctgctcccggcaccgccctgcgccaacccgtggttcctggagagccgcctggaccgcgacggcctccgcgtgtcgctccaggaccgcgccaccctgcgtacctggcgggtggagttcgtcgaggtcgagggcgtgcgccaactggacgccggcgacctcctggagttctggccggcctgcgcggccgcgcaaggctggctgtaccggatcgagcaaggtggctggctggaccaggaatgccggcgcgccggcttcgtcgcccgcgagaccaaggccatctag

SEQ ID NO: 344853 - DNA, 360 bp, Pseudomonas aeruginosa
atgatccaggcgggcttccaggtcggcttcggcgtcgtgctgggcgtggccgccggatggtggctgggggattgggagcaggcgttgcaggtcaaggattcggtggcgcggctcgattgcctgctgtacggcgcgcttctggtgaccctgttgcgtcgcaggggattgccgcgccggctggggctgcttggcgtcggcctgttcttcggcgccttgctggtctatgcgttgaatccggcaggcctgttcgccgcaagcgagtcctggagcctggcccgggtgtccatgcgcgcgttcggcccgctggtgatgctggcggtgggcatggcctgcgcgcgcctggtgtacgaactgcgctga

SEQ ID NO: 344854 - DNA, 1353 bp, Pseudomonas aeruginosa
atggcgagaaataaaggcggcttgcgcttccagcccagtggcggcgcgcgtagtcccgcgattccagtcggcaagaagcagcgtctgcggatcgaacgcctggcccatgacgggcgtggcatagcccatgaggccgggatgacctggttcgtcagcggcggcttgcccggcgaagagctggaggcccgggtactcggcgcgcgcagcaaggtggtggaggcgcgcagcgaacgtctgttcggcagcagcgaactgcgccgccgggagccgtgctccgttgccgggcgttgtggcggttgcaccctgcagcaccttggtcacgcggaacagttggcgctgaagcagcgcaccctgcaggaacagttgcagcgtttcgccggcatcgagccggaggagtgggcgccgccgctggtcgggcccgagttcggctatcgccgccgcgcgcgtatcgccgtgcgctgggagccgaagtcgcggcgcctggaggtcggcttccgggcatcctccagccaggagatcgtcgccttcgatgaatgcctggtgctggtgcctgcactgcaaacgattgcccaggctctgccggtgctgctgcggggctttcgcaagccggaagccatcggccacgtcgaactcttccatggcacggccagtgcactgctgctgcgtcatacggtggccctcgccgtcgaggaccgccggcgcctggaggatttctgcgccgagcaccaggcccagctctggctgcaggggacggacgaacccaggccggtggagcctgcggccgaactgggctatgccctggatgactggaaactgacgctggcctatcggccgggcgatttcgtccaggtcaacgcgccggtcaaccggctgatggtccgccaggcgctggaatggctggcgccgggtgccgaggaacgagttctcgacctgttctgcgggctgggcaacttctccctgccgctggcgcgccaggtggcgcaggtggtcggggtggagggcgtggcggcgatggtcgggcgggcaagcgccaacgcgctggccaatggcctggccaacgcgcattttttccaggccgatctgtccaaagcgcttgccgaagcgccctgggcggcgcaaggttttaccgccgtactgctcgatccgccacgcgatggcgcgttggaggcggtacggggaatgagttccctgggtgcccgccgggtagtctatgtatcctgcaatccggcgaccctggcgcgcgacgctggcgaaatggccaggcagggctatcgtctgaagcgcgccggaatcctcgacatgttcccgcagacggcgcatgtcgaggccatggctttgttcgaggcaggctag

SEQ ID NO: 344855 - DNA, 1332 bp, Pseudomonas aeruginosa
atgccatcctcgcagttttcaggtccagagcgcccggaagtcgatctggttcagctattccgacagctatggagcgcgaagtggcttgtcgcgtcgatcacgggcgcaggactggctgtcgcggttctttatttgctactggttgttcccacttatgaggttagcgtcctcctgcgtccgatacagacgaaggcgctggaagcggtcaatgcaagggatatctatgccttgacgcccagggaagcgctcgatcgcgtagccagcgaattgtcggcatactctggtcggttcgagtatttccaagctcatccggaacgattccagcagttgaacaaggacaacggcttgtcggctgagcaggcgttctggaaattcaatctgtctgccttctccatgaagcaggcagacttgcagaaggatccgcaggctactcctttcgtgcagatattcatgcagtatccaaagggaatggatggtgccggtatcctgaatgatatggtctcccagaccatcgacagcgagcgccgtcagatcctcgaggatctccaggctcgtgtggatagccgcttgcagttcctcgcgcaggatatcgagggcaagcgcgccagctaccaggcaagcaaacaggggcggatcgccaggttgctcgaggcggacaacattcgccgcgcaggcttggaagatgagttgaaagccctgcgcgggcggctcaagatggttcgtgattccaggattcagcagttgaatgaagcgattcagatttccactcgtttgggaattgtgaagcccacgaccccgggggcattgggtgaggtagggctggatggttcgcgtagcgtatttcgtaccgaggtgaacaatcagcagattccgctgtatttcatgggggtggatgccctgactgccgagcgcgacacgttgctcaagcgtaagggagatgacttcaccgagccgagggtggcggcgatccagcaagaactgaagcaactggaaaacaatcgcgaagtccagtatctgcaggcgcggcagggagaagagcggtttttcgacgatatcgaaaagttgcgtggcgagcaggcaagattgcaaacgctgaaggcaggcgatctgaagatcgagttggtgcgcgttgatcagagggccgcgatgccactccagccaatcaagcctcgcaaggctgtcgttctcgtattgggagggctcgggggattgatgctaggggtcctggtcgccttggcgcgggctatgttgcgtagtgcattccagcaacggcaggatcatgcattgcctcccggggtcgtcagtctcgagcgaaccctgtcggggacctga

SEQ ID NO: 344856 - DNA, 192 bp, Pseudomonas aeruginosa
atgagtgtgacagtgaccgagcgcgacgacgaccacaaatcccgcgaactgcgtgcacttggccgccgctgctgggacgtgcaccagcaggggttgctggtaggggtcttccataatgaagaagacgcccaggcttaccggcacagactggaaaaggaagaacagctacgccagtcggacaagctggcgtga

SEQ ID NO: 344857 - DNA, 276 bp, Pseudomonas aeruginosa
atggacggctatcgcccgatcgcctgcgatctccacgattacctggagatcgcctgcctctatcgctaccggctacgcctggagctcgacggtgatctctgcttcgaggccgaggcccgcaccacactgatccaggcggaccagccaggcggggacaaggcggaatatcttgaagtggaggtcgatggcgccacccgactgttgcgcctcgatcgcctgcagtccatcaccgctctcaccgagggggcgctgttcaggcatgtacgactgcggtaa

SEQ ID NO: 344858 - DNA, 561 bp, Pseudomonas aeruginosa
atgtccgctctcgccctttacgattacctggaaagactgaccagcctgatgcgcgcctggtcgcgcgaacagccgttggtggcggagctgcagccggtacagctgagtgccttgcactatctggcgcgctgcaatcgctattcggatacgccgctggtggtgaccgagtatctcggcctgaccaaggggaccgtgtcgcagtcgctcaaggtgctcgaaggcaaggggctgatcagcaaggtgccggacgctcgggatcggcgcagcgtgcatctgcgtctgaccgaggcgggacgctcgctgatcgatgcggtgattccgccgcgattcctggaacaggccgtggcggcgctgggcgagaagggcgagcgtttgcaggggttgctgcatgaactgctggtggtcatccagcgtgaggaggacgtgccggggttcggcctctgtcgctcctgtcgcttccacgagcagcgtgacggcgcgccgttctgcggccttacccgggaatcgttgagccaggccgatggcgaattgatctgccgtgagcaccaggcctgcgcctga

SEQ ID NO: 344859 - DNA, 354 bp, Pseudomonas aeruginosa
atgagcgaactgatcctgctgcacaatccccgctgctcgaaatcccgcgccgcactcgagctgctcgaagcccgcggtctgcaaccccaggtagtgcgctacctggaaaccccgccgagcgccaccgagctgaaggccatcctggccaagctgggccttcccgcccgccagttgctgcgcaccggagaggaggagtacaaggcgctcggcctggacgatgccagccttggcgaagaggccctcatccaggcgatggcagcgcatcccaggctgatcgaacgcccggtgctgctggcgggcgacagggcggtcattggccggccgccggagaaagtcctggagatcctcgcttga

SEQ ID NO: 344860 - DNA, 195 bp, Pseudomonas aeruginosa
atgccaccagtctcgaacaaggtcgtccatttgcatcacaaggatgagcaggcagcgcttgagcgtttgaaccgcattaccgggctgcagttcagcagttggccggaatcgctggtgccggcggcgcccgccagcgaaccgccgtccgaacagtcgccagccgaaccattgttcgagcaggtgcgccagggctga

SEQ ID NO: 344861 - DNA, 276 bp, Pseudomonas aeruginosa
atggcaaggatctgcttgcacgcctatgttggcggccgggtgcagggcgtcggtttccgccagtcgacccgggacgaggctgaacgcctggggctcgacggctgggtgcgcaacctggaggacggtcgcgtcgaagtcctgtgggaaggcgaggaggaacaggtgaaggccctgcaacgttggctggagcgggggccgcggcgcgcgcgagtcgcgggggtggaggtcgaggcgctgccgttgcaggggatcgccggcttcatcgtgcgtcgctga

SEQ ID NO: 344862 - DNA, 774 bp, Pseudomonas aeruginosa
atggatctggtgttcagctcgtggcaggacatcccgttcaacgagaaccacatcaagcaactgcaccagatcctgctgcgccacagcgaaaaggatgcgcgccaccgggggcagtacaagaccaactcgaacagcgtcgctgcgttcgatgaaagcgggacacagatcggcatcgtcttcgagaccgcaacgccgttcgacacgccacggctgatggccgaattggcgtcgtgggtgaatgatgagcgggagaaggggcatctgcaccccttgttgatcatcgcaatcttcgtggtggtgtttctggaaattcacccctttcaggatggcaacgggcgcttgagccgggtgctgacgaccctgctgctgatccaggccggttacgcctatgtgccgtacagctcgctggagagtgtgatcgagctgaacaaggaatcctattacctagccctgcgccagacgcaaggcaccatccgcacggaggcccccaactggcagccatggctggtgttcttcttgcgctcgctggccgagcaagtacggcgtctggagaagaaggtcgaacgcgaaaagatcgtgctggctgcgctgcccgaactgtcactgcagatcgtggaattcgccagagagcacgggcgcgtcacgatgatggacgctatcaaactgaccggagccagccgcaacaccctgaagcaacacttccgtgacctgaccgagcgcaaccatctggagcagcacggcagcggacgcggtgtatggtacgggctgaagtaa

SEQ ID NO: 344863 - DNA, 315 bp, Pseudomonas aeruginosa
atgcaagaagaattcctttccgaagtcgatctggccgcccggtgggcgatgagcagcaagaccctgacgagatggcgcaccatccggcgcggcccgcccttcgtcaaattgggcaaaaccgtgcgctacgcgatgagcgatgtgctcgaatttgagcgcaacgggctacgcaaacccgtccttcggctcctgccaacgcccgatgatgagcaagcgcctgatcaacctgtccgattgctgacgatccgcgacgtggcagcggagctgagattcgggccagagggtgacgatgggcggcgaaactgtagaaagtaa

SEQ ID NO: 344864 - DNA, 573 bp, Pseudomonas aeruginosa
atgggcattggcaaaggagatatcataccttttgactacaagacaacctttttcatcgataccagctataccacccccagacgagccgtttaccatatagaaggcacaaatctgcataccaagctagaacacaatgccttcttcaccacttgctatactccaaaagccagcaccgagattgacatgggcaccatttatacagggcatgtaaagcaaggagcggctcccgatattccattcgctttgaatgttgtctgtgaagggctgaaccccacgatcaagccaccggtgaaagtatatttcgaaggaaatgccgttcgcgatggcctactgaatctcagtggaaccggtcagcaagccgtagccaaaggtgtgggcatttcgctgaccaatgacaaaggcgtggcgcttcctttcagcaagtccaaggccctgcctctggtttggcaagcgagcgggccaggttccgaaatgtaccgattctcggccaaggctcgctatgttcccaccagtggaaaaatcaccgccggcaaggccgatgccacgctcacctacattctggaatacaactga

SEQ ID NO: 344865 - DNA, 234 bp, Pseudomonas aeruginosa
atggcgctgtatgaagatgaaacgaaggttcgcaagactggaaaaccagagatctacaagaagtctttgaacatagggataaaacctgcaaaccctggcatctacaaatgcgacacctgcggattcgaggatgtaataaaccgcgaatgcgacaagctcccgccctgttcgaaatgccgggataacaagagatccaatacctggaagcttcttgtcacggccaccgacaaatga

SEQ ID NO: 344866 - DNA, 315 bp, Pseudomonas aeruginosa
atgtccgcgaaggagaccccggccacccaggccgccgagcccgggcgcgcccagccggtcgaagtccccggcggcggccactggtggcgccgcctgctggccttcgccggccccggctacctggtcgcggtgggctacatggacccgggcaactgggccaccgatgtcgccggcggcgcacggctgggctacctgccgctcccggtgatcctgctctccagcctgatggcgatgctgctgcaggcgctgtccgcacgcctgggcatagccagcggcctggacctgcgactgctggccgacttcgcgttcggctga

SEQ ID NO: 344867 - DNA, 438 bp, Pseudomonas aeruginosa
atgccgtcgaccgtccgtacgctgctgctggccttcgtcttcgcctggttcctgctgggcgggctcggccacttcgtcttcaccgatttcttcgtcggcatcgtcccgccctatattccctggccgctggcggcggtgtatgccagcggggtgttcgaactgctcggcgccttcgtcctgttgctgccgggctggcggcgcatggcggcctgcgggttgttcctcctgaccctctgcgtgaccccggcgaacctccacatgtggcagcacccggagtcgttcccggctttcccgccccaggcgctgggcgcgcggctgttgctgcaggtgttcctgcttggctgcatcctggcgctggtgctggcgccggaaggcccggcgagcgggcaaaaaaaagccactgtgcggggggcagtggcgggaaatgccagggaatag

SEQ ID NO: 344868 - DNA, 240 bp, Pseudomonas aeruginosa
atgaacctcggcgcgaggatggcaggcaccggcatcctgccacgcgccagcggcggcgcgcccataacctttgcccggttggcggccaccctgaaacaaatgctcaaacattcccgaccccgggacgacatctgctcaaaaaatatcctggcctttcccggccaaaagacatacaatccgggactgcgtaccaaactgaaagtcaatcaggctttaccccacgaccgggcccacagatga

SEQ ID NO: 344869 - DNA, 324 bp, Pseudomonas aeruginosa
atgctgctggtcttcggcctcaacctgctggccttcaccgctctctgcctggccatgaaccgccaccacaggaacctcctcggccacgagccgccggcttcccgggtgcttctgctacgcggcgtggcggcgctcgacctgggcctggcgctggctttctcgatccaccggcagggcgtggagatcggcatcgtcttctggtcctgcctgctgatgctggcggccggcacgctggtcctgctgctcgcctggcggccacgctgggcgttgccttgcgccgccggagtgccgttgctcggcggggtgctggcgctgctgcgctga

SEQ ID NO: 344870 - DNA, 789 bp, Pseudomonas aeruginosa
atgcgcaacgctcccatcgaccagtacgaggccactcctcgcgaggtggtggccatgggtaccgactatcccgatggctacctgctggcacgccaccgtcatcgtcgcgcgcagttgctgtacggcgccagcggggtcatgcaggtgcgtaccgtcgatggcagctgggtggtgccgccgcagcgggcggtatggattccaccgcaggtcgagcacgaggtcaggatgcttggcgtcagcacccgcagtgtctacatcgagccgggcgtcctggcggcgatgccggcgcgttgccaggtgctggcggtttcgccgttgctgcggcaattgctgatggcggcggtggacatgccggcggagtacgacctggaggggcgcgacggtgccctggcgagcctgctgctgcacgaactggccgccgccgagcccttgccgttgcatgtgccgctgccgacggaggcgcgctggctggcgttgtgcgaagcgttcctcgaccgtcccgatatccgcatggccgccatggactgggccgctcgcctgcatatcagcctgcgtggcttcaaccggctgttccggcgccataccgggctcagcttcggcgcctggaagcagcgcgcctgcgtggtgcaggccctggcgcggctggccggcggcgaaacggtcaccgccatcgccctggactgcggctacgagagcccggcagccttctcgaccatgttccgccgggtcctcggccagccgcccagtgccttccaggcgggcacgctcagagcgccaggaggtccatga

SEQ ID NO: 344871 - DNA, 639 bp, Pseudomonas aeruginosa
atgaatagagttcttgttgtccatgccagcccgaggggcgagcgctcgcagtcgcggcgcctggccgaagctttcctcgttgcctaccagcaggcccatccacaggcccgcccgacccgccgcgaagtcggccgggctttggtaccggcggtcagcgaggccttcgtcgccgccgccttccatccccagccggaacagcgttcgctggcgatgcgggccgacctggcgctgagcgaccaactggtgggcgaactgctcgacagcgacctgctggtgatctccacgccgatgtacaacttcagcgtgcccagcggcctgaaggcctggatcgaccagatcgtgcgcctcggagtgaccttcgatttcgtcctcgacaatggcgtcggccagtaccggccgctggtacatgggaaaagggcgctgatcgtcaccagtcgcggcggccacggcttcgggccgggcggtgagaaccaggcgatgaaccacgccgatccctggctgcgcaccgcgctggggttcatcggcatcgaccaggtcacggtggtcgcggcggagggcgaggagtccggcggcaagtccttcgccgactcctgcgccgaggcggaacagcggctgctggcgctggcgcggtcgatctga

SEQ ID NO: 344872 - DNA, 135 bp, Pseudomonas aeruginosa
atggggatgtgcggctggatgaacatgagccgcgcgtcgatgaacgacagcatgcggccgttgccctgggtcaacggaccgaaacccagcccgaacagctacgagcgggtggtgctgccggaggtgcgcctgtga

SEQ ID NO: 344873 - DNA, 276 bp, Pseudomonas aeruginosa
atgcccggaagcgaaggaccgctgcatcggctacgccttcggcttcggcaagaccgacacccagcgggtcgcagcttctggtcggacctgttcgacttccgcgagaaacgggaattgcaggaccgctcgttcaagacggtgttcgtcttcgtcaacgacgcgctggtgcgcaagctcagcaacggcgaagcgaacatccatcgcctggcagacaggaagaacccgctgggtccgctgcagggcgcgggcgagagcttctccgacaagcccaggtga

SEQ ID NO: 344874 - DNA, 453 bp, Pseudomonas aeruginosa
gtgtccagccggattgagccgttcgaatgccgctggcgggtctctccgaccctgctggcggcctgtctgacattgtgggggctggcgctgctggcgatcttcctggcggcattgccggtctggctgaagctggcgctcgtcgcgggctgtctcgcctatggcggctgggggctccagcgccaggtactgctgcgcggtccgcaggctttccgcgggttgcgccacgacgagcgcggctggcagttgtggagtgccggtagcggctggcaggcggtgcagttgcgcccggacagcctggcgctgccctggctgatcgtactgcgcgtgcgcctgccgggcggctggcgcacccttggctgctgtatcccggccgacgcgctgggcgccgacagccatcggcgcctgcgcgtccgcttgcgcttcagtcgccgtagatgggcggcaccaggatag

SEQ ID NO: 344875 - DNA, 192 bp, Pseudomonas aeruginosa
atgcgtcgtttgctttcctccctgctgatcctcgtcctgccgttgtcggcctgcgtgctctacgaccgcgacgaccaccggcatcgccccggttaccgctacgagcgctaccacgaccgcgcccatgacaaccgcggacgcgactggaaccgttcctggcagaatcgccgcgacgacggtcgctggcgctga

SEQ ID NO: 344876 - DNA, 651 bp, Pseudomonas aeruginosa
atgcccgcaaacacttcttccaccacgctgtaccgcatcgacgaatgcccggacgtgatggccgacgcttgcgtcggcgatgaccagggcaacctgatcttcctgtcgatctgggcacgggacaccgccgtccagcagttcctggctcgcctgaccctcgggcgcgacgagcagggcctggagcagttccacctcatcaccgaccagggcagcagcgtcccggtgttcgtcagcaacgtcgatcgcctggaaaagcgcatgacccgcgcctaccggcgaacgctgttcggttcgctgtccaacgtgtggctgttcgatcggcgctgcgtcaagcccgacaaggccaacgccagcgcactggcattgctgccccgcgatagcgaccaccggcttgaccgcctgtggacgttggtgcaggacacctgcccactgccgttgctcgaccactggcgcgaaaccgtgctggaactgctgcaaagccgcaagatgctgacccgtctgccattcgccctcgggcctttggtgggccatcggctcgccatcgacgtgccggcgctgaccctggcgctcggctcgctgatccgcagtgacgtgctcaccgcctatccctatccggccaagatttggacgccggaaacggtagcggcttga

SEQ ID NO: 344877 - DNA, 909 bp, Pseudomonas aeruginosa
atgtccgttgatctcaacaccaccgccaacgatgcagcgcccgtacagggcgaactgctcgaagcggaatccaaccctctgaccctgagccttcaggttttcgtcggcgagttcggcgacgaactgctcgattctctcaaccgcgccaacccgccggtctatgccggtcaagcacaggcgcagcggcaactcgtcgttgccagcctcaagcgcaagctgttccaggcccaggctgaagttgtccatgccgccgccgagctgctggtcgatcaaggcgagcgcgctgcgatcgtcaatggcgaaatgggctgcggcaagacgaccgtcggcatcgccacggccgccgtgctcaacgccgaaggctaccgccgcaccctggtgctttcgcctccccacctggtttacaagtggcggcgtgagatccaggagacggtggccggcgccaaggtctgggtgctcaatggcccggacacgctggtcaagctcatcaagctgcgcgagcagttgggtgtgcagcccacgggccaggagtttttcatcctggggcgcgtcaggatgcggatggggttccactggaaacctgtcttcacccagcggcgcacccgccacggcgacgtggcagcctgcccggactgcggcacactcatcaccgacctcgacggcgagccggtcaacccggtcgcgctcgaagccgaggagtcccgcaggaagtgcagccactgcgccgcgcccctgtggacgctgatccgcccgcgtagcctgtccggcagcgaccagtcctcggtcgtcctcaaagccttgaagcgcatcccgaccatcggggaagtcactgcacagaagctgatgcagaagttcggtgacggcttcctggcctcgatgctgggcgactgggtaattgcattgatttga

SEQ ID NO: 344878 - DNA, 1524 bp, Pseudomonas aeruginosa
atgcctaacgcgtcctctgaaattgcggcttccaaagcccccgcagccacgtccagccacggtcgattgattgaggtgttggatgctttggtcagacgagcggatggcgaagcgtggggtgtcagagagctggctaacgacttgggggaaagtcggagcaccatcaatcgcatcctggtggccttggttgaccgagattttgcggttgaggacggggtcggaaagtatcgggtgggcccgcgcttcaaggtgctgatgcacgccttgaatcatcgcagtgctctgttggatacggctcggcatctcctcgatggcctggcggaggatgccaagcaggcagccttgttgtcggtgtatgcgccgcatttgaacggctactacgtcctgcactgtggcgaagctcccgccaccttgttcttcaggcccaagagcggaaatcccttccccttggagttcggagatatcggtagagctttcagtgagtaccttcgaaagcattcctcgccggatgaaatctcacctcaccaaacatcgattgaagcgccgcagggcatctccgagtccgagtttcctccagctgtttcgatggtggtaagacagttggcaccggggttactgattttggtgtcgcttcacgatcttgggggcattgttgccaaggtgcgggactctgcccgggtgaccctcaatgaggtagccgaccggttatcacaggcagttggagtgtcggacagcatcggacgtgaggttgtcagcgatggcgacagttctatcgttgcccggcttgaggggctgctgcagttggtttgcgctgagcccaatggctacaagtgcagattgggcatggccgcccagttgcaatgcaatgcggcgactgccaaaaaaatcattggctctgccactctggagcgcttgatacacatcgatgggcaggtaatctatccaggtgctcgtctctatcagtgggctgcattgctgagcaacgaaacctactctccggtgaagctctgcaaggccattgtccactccctcgtgaaggaaacgggagagacaatcgcgtacctctcgtttgacgggactacctccaaagcccagttccttgaggttattcaaggttggcggcctatccagtacaagctggaaactggagtggatgtcccgctgtatgcggggggcgccggcaaggccgtgctagcccatttgccagcagattttgctgatcgtttgaagctggagaagctcactgaggcaacaatcacttcgcactccaggctgcgggccgatcttcagtcgatcagggagcgaggatggtcggtaggtgacggcgagcgggttataggcgcctttggtatcggcgttccatttttcatcgatgggcaggttgcgggctccatctctgcgacgataccgcagtatcgcaaggaagattgtgacataccgtccctgattgagaacatgaagcaggcctcaagacgcatcggccatctgctttctctgggcagaatgggtcgcgttgtcccctag

SEQ ID NO: 344879 - DNA, 1341 bp, Pseudomonas aeruginosa
atgaataacaacaatacgttgacggagtccgttgctatgcctgagcctggaaccgaacgcaaaacgaaagccaagaaggccactgcggcagccgtctttggtacgttcgttgaatattacgacttcagtatctacggataccttgcagccacccttgccctggtcttcttcccgtcggacgacccgacaacaggcctgctcaacacctttctggtcttcggctcggcattccttgtccgcccgattggcgcaattgcgtttggctggctcggggacaaggtaggacgtcgcgcaagcctgatcgcgagcatcaccctgatggggattgctgcgacactcatcggcctgttgcctggctacgcgcaaattggcgtctgggccccgatccttctcgtcgcactacgcatgctgcagggcttttctgccggcggcgagattggcggcgcggctagctacatccgtgagtgggctccagccaatcgtcgctcgctgtacatctctttcctgccgtcgattgcccagttcggtaaagggctcgccgcagccatcgccggccttgcagccgcgtggctgaccgacccacagatggcggattggggttggcgtattccgttcctgctggctctgccgctgggcatcatcggcctgtggatgcgcctggggatcgaagacagcccggaattcgaatcaaaaaaatccgaagagaacaaagaacacagcgcacctttcgctgagctggtgcgcgactacatgcgcccgctcaccaaagtcatgatgatctccctggtgcagaacatcggcacctacatcggaaccgtcttcatcgcagcgtacttcagttcgatcctcagctactcgaagggacaggcttccaccatcgttttggtcgcagtcagctttgcagccctgatgattccgttggcaggccacctcggctcgatcattggcagtaaagctgtgcttcgcttggcctatctcggctacgccgttctctccgtcccatcgttcctgctgatgcagcaaggtcaggtcagcatggccatgaccggtctggccctgggaatgatcccttacgcgctgtgcctggccggcacctactcggtcatgcctgaattcttccctacccacgttcgccataccggcgtcgcgtttggccacagcgtcggtgccgtaatcggcggcggtattgggcctttcatggcgacctggctgatcggcgccaccggcaaccaaacggctcccgctttcatcctgagcggtgccggtgttctcggcctgatcgtgttgtggactgtccgcaaccaagctgccgccgacgacaagaaacatcaattcgcctga

SEQ ID NO: 344880 - DNA, 975 bp, Pseudomonas aeruginosa
atgtctctcatatacgtcaccagccccattcacgaaaccatcctgtcccgtcttgcggatctcggcgaggtgcgcctcggctacggccctaatgccgttgggtatgaagaaatccgtaatcaggtggatgccgtgttcttgcgtggtggccacatcagcgctgaaatgatcgctgcctcgcccaagctgcggattgttgctcgccatggcgccggctatgacaacgtcgactacaaggcagcagccgactacggcgtctgggtcacgaacactccaggtgcaaaccagcgcagcgtgatcgagcatgtcttcgccctgctcttgtcgctgtgccgcaagctgccgctggcatccgaacaaacccgcaaccgggtctgggcagaagatcgcctcgcgctgaccggcatcgagctcgaaggacgtactttgggcttggtggggttcggcaacattggctccagcgttgcacctgttgctgaagccttcggcatgaaagtgatctttaccgacccggccatcgacccgagctcggacagccgctgggtagactttgacaccctcctgtccatagctgatgtggtgagcctgcatgtccctctgctggaaaccactcgcaacctgatcggcgcacctgagttcgccaagatgaaggacggcgcaatgctgatcaacaccagccgtggtggtgttgtggaagagcaagcactggtcaatgcactcaagagcggaaagcttgccggtgcaggcgctgacgtactcgccgccgagaacatcgacatgatcaagccgttcgaccatgccacgccagacatcgcgaacacgcccaacctgatcgtcactgcccacgtcgccggccagaccgatgagtcgctgatgcgcgtaggcatgagtgctttagaggccatcgccaccgtgctgaagggcgaagcacctgcccacccggtcaaccagcctgtgccgaagtcgttcagctaa

SEQ ID NO: 344881 - DNA, 639 bp, Pseudomonas aeruginosa
atgttcatcaacgtgtccgatgagtcgatcagtgtcaacgccaactgggagcgagccgacctgtcgttgatcgaagaaatctcgcactacccagtggcacttatcggcgacgtattgcagcgcatgggcatgatggcttcggccattcgccacaccgcaggcaaggccacattcttcggcacgatcttgccgctgaacactcgcgagggcgacaacctcgctatccaccgcgcgttggacgaggcgcagccgggggatgtgctggtcatcaacggaaacagtgaagtgaaccgctctgtgttcggtgatctgctcggcgaaatctgcctggcaaagagagtttcagcagtcgtcattgatggtgcggtacgtgacattgaagagctcgacagcatggggttgcctatctatgcacgtgcagtgaacccagccggcccctcgaagtggggcccaggccaggtcggcgtcccagtcgcctgcggcaacgtcgtttgctacccaggtgatgccatcatcggcgaccgcgacggcattatcgtgattgctcgcagcctgctgccaagcctggccgagaaggtgaagctccaggacggttacgaaaacagcttccgcgagaaagtacgggcaagcgtgccctaa

SEQ ID NO: 344882 - DNA, 984 bp, Pseudomonas aeruginosa
atgcaatccatacgtgttgctgttctggcttttgaaggggtaagcctgttccatctctcggtgcccggtgtggtactggggacggctcaatcggcccatggtgagccccactacgaggttagttgcttcgcagaaacacccggtacggtcagaagcgaccagggggtaggcttagcgatcacccacgggctagagctaatggaggcctctgacataattatcatcccagcgtggggtgatcattcggttatggcatcagcacagcttgtaagcgccctccagtgcgctaacgctcaagggaagctcatcgtgggattgtgtttgggagcattcgtacttggcgatgccggactacttgatgaaaaagaagcaaccactcactgggcagcgcgagacgagtttgcacggcgctttccccaggctcgattcaaccccgaagtcctctatgtcagtgatggcaatatcgtgacctccgctggaaccgtagcggcaatcgattgttgtcttcatctggtacgccagcgactcggtgctgacgtagctaatcgcactgcaaagatgctcgtgacaccaccacataggcacggtggccaagcccaatatgttgagcatgctgtgccgcagctttccagtgagactcacttggctgaggtactggcatgggcgcgcatgaacctttcaagtgatctctcgctcgatgtcctggcgaataaggcgaaaatgagcaggcgcacgttcacccggcgattcaaggaagccactggcagtactgtttcgaaatgggtgaccgcagaacgcgttgttcgagctcaagcgcttttagaaacaactgacttgcctatcgaatgcattgcgggcgaggcaggcttcggaacgcctttatcgatgaggcagcaatttggtctccacctcggtacgtcgccatctgaatacaggcgaacgttttctcgcgattggaacccaaaccggaaggcgaaaggctga

SEQ ID NO: 344883 - DNA, 900 bp, Pseudomonas aeruginosa
atgaatcttgtgaatttcaaaacactacccttggcattaagcgttattactgctgtagcaagcagccaagcgtcagcaggcgttgaagcagctgaagcacccgtcgcagtccataaagtggatttgcagcaggtacgtaacgctaccgtgaaaatcacctacggcgatacgactttcctgatcgatccaatgctggcaaaaaaaggaacctatcctggttttgaaaatacctaccgtagcaacctgcgcaacccattggttgacctgacagagccgcccgcgaagattatttcgggtgttgatgccgtcatcgtcactcatacacaccttgaccactgggacgatgctgcacagaaagcactgccgaaagatatcccgttattcactcagcacgaggacgatgcaaagttgattcgctcccagggcttcaagaacgtacgcgttttgactgacgaagctgaattcggcggtgtcaaactcaccaaggcgggtggtcagcacggcacagacgagatgtatgccgctcccccactcgcgaaacgactgggcgaggccatgggcgttgtgtttcaagcgccaggctacaaaacgctctacctcgctggcgacactatctggcgtaaagaggtcgaccaaaccatcgagaaatatgggcctgaaatcatcgtactcaacgccgggaaagcgaaggtgaacgggttcgaaggggcgatcatcatgggcgaggaagatgtacttcgcgcctcaaaggccgccacaaacgcgaaaatcgtcgccgtccacatggacgcagtcaaccatatgtctctgacccgggaggaattgcgcacttatgtccatggtcacggtatcgagagtcgcgtagacataccagaagacggcgcttcactggagttttga

SEQ ID NO: 344884 - DNA, 498 bp, Pseudomonas aeruginosa
atgaaattgcacaaactgaaggccagtgagtcgcccggcacctaccgggtcgagtcaccggtcagcgaaaccgacatcctgctgatggcccggcagttggcgaatctgcgcctgcgccgggggcgagcgctgacgtccccccaggaagtgttcagccacctgcagaccctgcttgcagactacgagcatgaggtgttcgccttgctcatgctcgacagtcggcaccgagtgcttgccttccaagaaatgttccgaggcaccttggacggcgccagcgtctatccgcgggaggtcgtcaaggtcgcactgcagcacaacgctgctgcggtaatcctggttcacaaccacccctccggagaccccgaccccagccaggccgatctcaagttgacccataccctcaggaatgcactgaacttggtcggcacccgaaccctagaccacatcgtcgtcggtcaagaacgctgcgtatctctggccgaacggtgccttttatag

SEQ ID NO: 344885 - DNA, 186 bp, Pseudomonas aeruginosa
atgcccctgttgcgtttcgtgatcttgctgttcgtgttcatcggcgtgctggccagttgcgcagttgctgtagcactattgatgctcatgctgcgcttctggccagtgttaattgcaatcttactcgggtgcggtgtgttcgggtggctgctaagccgagccgggaaatataaggaccgctcttaa

SEQ ID NO: 344886 - DNA, 1455 bp, Pseudomonas aeruginosa
atgaagcgaatagcgctaatatctgcacttgtaataacccaaggctgcaactcatcagatgatactgcaccctacatgagcaccgactcgacattcagttgcagagatgtaaatcttagccaattccataacgacacaggcaatgcgctgaggatgattgacaccggactctcacaactaaaatccgcatacaatgaagaaacatcgatacagatattctttagagaggccgcaaccaaaaacgccacctaccatctactcctcaggcaaaaaaccatcgaagcatgcgctgcaaaccctgagctaagcgtgggccatgccttaacagacggacttaatgccttatacaaagaaagctttgaagacatgcgcatagcaacatgccgctcgttcggaaaagaatttgacaacgaacagattttgcaggaaatgcaaaacccgagcaaacagctaccatatggtgacgaagcggctcttagcgtaaaacctgttcttgaagataaacgttatggcgcagcatattttgaaacagaaatccataatcactgcgaagaaaatcctaacgaacgcatttggaacgcctattcttcagttgcacgcccagccctaaacgcaattgctagcgaacagcaagctgcgtaccagcttaaaaaagaacaagaggctgcagaggaaaaacgcttgtcagaagagcttcatcaggaaaatctcaggaaatacagtaaagatctctaccaatcaggcacgccagattgtgaaaactttatagcattacatgagctaagcatctttgcagagaaagatcgaagcacatttcaaagcgccctaaacgatacaaccaattcaatccctaagcccagcattccacatcaacgtgaagcctttcagtacgcgcttgagtctaattacgagcgtacggtccgcataattgcaaacaactgctcaaccagcattgaacaagccatattaacaataccgacagtcatggactctagaagtgaaataataagcgagctgacaagcttatctcagaaactcagatggggaatagagggacaagcagccgaacttgctcttaaacatgcaacagagtgcgagcagggggcaaaagaccaaaacttagtctgtcccaataacgcacaagattttttcaactacagcctagttccgctgcagataaaagatctagaaaagaaactcgacaagctagaagcacaacgacaaaacaaaccaagcgacttcgagctgagctcatatggtaatgactgcaagcagcgacttataaaccaaggccttcgcgataaagaatacgacgatgcagcccaagaaaaatgcgcttccgaggcactcactgaatactttttgccactcaacaaagagatagattcgataaaggaagacatctcccaggcgaacaaccatataacgtcaattgagacgaaattcaagaattaa

SEQ ID NO: 344887 - DNA, 2754 bp, Pseudomonas aeruginosa
atgagtattcgccgcttttcttctcgtacccatcggctggatgccagcttcctaatgcagcatctggccggtgccaggagctacaagcgcatcgcgggctacttcaccagctcattgtttgaggtggcgggcgaggcgctggaacacatccctgaggtcaagatcgtctgcaacgtggacatccacccggacgacctgaaagtggcgcaactgcgtgagagcaaaatgctgggccgctggaacgagcgcggcctggaggccgaggccctgctgaaccgcgaacgctatcggcggctggacatcttcctcgccaagcatgggcaggcggtgcgcattgcgcccgacgatatctgtggatttgtgcatggcaaggcgggcgtgattaccctggccgatggccgcaggctgggcttcatcggctcgatgaacgagacgcgcagcggttggcagcgccactatgaaatcttgtgggaagacgaatcaccggaaggcgtggcttggatcgagcaggagttcgacttcctttggaacgcagccaagccactgccgcaggccgtcatccgcgaggtgcatcggcgtggctatcggcgcgaaatcgagttcctcgaaattgaggatgacgagaaccttgcgccagcggcgctgatcgaatcaccgctgtaccgagaaggccagcagctacagccgtggcagcagggctttctgaccgagtgcctgcgccaccagcgcctgtatggcacggtgcgcctgctgctggccgacgaagtgggcctgggcaagacgctgtctctcgcgactgctgcgctaacgctgtgtctgctgtcggacaaggagaatggcccgcgccgcccggtggtgatcttcgccccagccacgctgaccgagcagtggcagactgaaatgctggacaagctgggcatccccactgcgcgttgggataccgtgggtaaggcctggttggatgcggacgagcgtgtgctatcgcctgcgggacgcgagcaaattgcccattgcccgctgcgcatcggcattgtctccaccggcttgatgatgcgcgactcgttggaaaagcagcatttgctgggcatgcgcttcggtgtagtgatccttgacgaagcacacaaggccagaacccgccagggcttcggcaaagtagctggaacaccgaacgagctgctggccttcatgcgcgagatcgccgcacgcgccgatcatgtactgttgggcacggccacgccgatccagaccaaccctgccgatctgtgggatttgctgggcatcctgcaccaaggtcccgggcgtttcgtactgggccacgaccttgcgccgtggcaccgaccaaatgaggtgctagacatcctcgcgggccgcatggaggtggaaacgctggcacatgcctgggagctgttgcgctcgccgctaccgcgtatggaatcaaccagcgagccgcgcgcccgacgcttgttctctgctattcggcaagacctgggcatgcagaacggcgagtggcaaaccaatcgttcgctggctgaactaaccgaagagacgcgcgaaattctggaagaggaacttgagcgccgcattgccggggcgaccttgttccagcgcgagaacccgttggtgcgccatgtggtgttgcgcaagcgccagcaactggaagaaaccaaggacaaggacggcaagcccttgttgactccagtgggtgtggacgtttatcccgggcgcgagcatgcgtcagagcagcgcgccttcgacgtgttgtttgaaggcaaggggctgcgcacttccgaagactttcggcaggcatacggcgaagcgcgcgccttcggcaaggcactggctaagcgcggtgggggcagcggcttcatgaagaacctgatggagcagcgcatttgttccagcatccacgcgggcctctcgacggcgcggcgcttgctggagggcgactccatgcatgaggaagacgaagagcaggaaggtgacgtaaaggtcgagacaggcgaggagcgtgaggtgctacaacgcctgattgatcggctggagcggttggaggccgacccgaagatggaggccgtcatccacttcctcgacaaggagaaatggctggacttgggtgtcatcatcttcagtcagtactacgacaccgcgaagtggctggccgattcacttgcagcccgctatcccgaagaggcagtcggcctctacgcaggcgcgggccgtagtcgtctgtatcagcgcggcgacagcgtgagtgtcgagcgcgaaacgctcaagcgaatggtggccgagcaccagattcgcgtcatggtggcgaccgatgctgcctgtgaaggcctgaacctgcaagccctgggcacgctgatcaacgtcgatctgccgtggaacccaacgcgactggaacaacgtatcggtcgcatcaaacgcttcgggcagcggcgtgaaaccgtggacatgctgaatcttgtgtttgaacagacggtggacgagaagatttacgaacgtctgtccgagcgcatgaaaaatcgctacgatcttttcggttcgctgccggacaccatcaaggatgagtggatcgaggacatcgaaacgttgggtgaacgcctggatgagtacatcaacgcccagaagaccgcgaccggtttcgacctacgctacaccggcaccatgatgccgccggagaaagactggcgcgagtttactgaggtgttatcgcggcgcgatctggccaccctaatgagcgccgcttggagatga

SEQ ID NO: 344888 - DNA, 1395 bp, Pseudomonas aeruginosa
atgatgcaagctcagcaactgcgcgaagctatcttggttgcgccacttgagaccagcaacttcggtgaaactccacaggccgggactctgtatttgccgccctcccatctcaaggcattgagacttgatgcgcatatagtcgtgggcggtcgaggggtgggtaaatcgttctggacagcggcgctgcaatccgaaccgcttcgcaatcaactgggggcggtggccactgaactgcgagacgtccaagtgtttgcgggcttcagcaatgctgaatctattgacaaccatccgaatgccgacgttttttccgctttccttgacaggaatggtgatccctacgatttatggcgggcagtgattctgcgctgggttgcacaaaaggaaaatgagagcgttccgaataacgactggcaacagacagtcgattggctgaagcaacaacctgaagcagccgcgcgtctgatgcaacgcccacgtaattggcaagggctgattctctttgatgcgctggatcgtacgagcacagactggcgacgtatggatgagatcgtgcggggtttgttgcgcacggctctttggttgaaggcgttccctgggctatatgccaaggtattcttgcgcgaggatcaggcggaacggaccgtttttaacttcccggacgcatccaagcttactgctaccaaggctgaactggtgtgggccagacatgatctgcatgggttgctctggcagcggcttatcaatgcgccggatgctcatggcgaacaaatgcgtggcgtctgtaaaagcatcaaacagaatgatgtatggcatgtcgctccagagatgaagtcggaatctgagatgcagaagaaggcttttgaaacgctggcaggtccatggatggggcgggacaggcgacgtggcgtgccttacacatggtcggtggggcatttgtccgatgggcgcgggcaaacatcgccgagatcctttctcgcggcaatcagacaagcagcagaagactccaaagagcgttatctacagcatgaccatgccctgcacttcgagagcatcaagcgcggtatccagaaagcttcggaaatccgtgtgcaagagatggctgaggactacccgtgggtgcccgacgttctttctgccttgagtggcatgaatgtacccgttgaatttgatgccgttagggggaaatgggaagagaaatttcccactggcgcgcaagacattagctctgggcgccttcctgcacagcacgttgatcgtggttgggacggtgttcgtgaagatttgcagcgccttggtttgttggaaaccaaaaaggatgggcgtattgacatgcccgacctgtaccgtgtcggtttcggtctcggccgcaagggcggcgttaagcccaagagctga
